United States Patent Application Publication US 2003/0099974 A1 - sequence listing, part 5

SEQ ID NO: 11048 - DNA, 2308 bp, Homo sapiens
  misc_feature 1, 2, 285: n = A,T,C or G
nnattgacgaacccatactactagcacttcttgtttctacagccctacgttgttattctagggggctctattcctccagctggtggcacactttgtcgcgacaccaccttgtctatggggcctactctcccccctgttctcccctgtgaatgttcaatgggcccaggggccccttgtactccgcggttatatgccgtccacttctctctgagcctgttccaattgtcttgtgaaaggctagacttcccttataccacttccaggattcctcacataaagttgagnatcccggctgcccacaccagcctctgccgtttacgggaaccctgggtaaggaatagatattaattaggaggaaatgggggagataccacatagccgtggcacgtaatggttctgagcctagaaatgctgtccgtcctccatcaccaatgattcctacgcattcgatacatttagtgagcacctactagagcagtcccttttctaggcactaagagcaacccaaaccaagggtccttgctttcatggagctcacatgagccagctccaatccacctcttctaggaactttccttaattgcattaggaaaaaaaaagacccctgtcccctatgctttgttcaaatctgttactacacatgtaatgttgtaatttactgatctaacattccttgtccatctcatccaaactgtgaaccaaatgaaggccaaggctacttcttctttttttttttgtttttgttttgtttttgaaagtacatcaacatgactgcttcttatttctctttgaatctccaatacctggcaccaatgtttggcacacaataggcattcgataaatatctgttgagtgaacgcaagaaagaataaactcccacgaacatctaaaacaacagtcctgcaaacagagagttagcatacaacaaaccatgtgtcaacattccctcttgttagtccctgcagatcttagagactggaaagcggggggatatagaaggactggagggatatattccatatatcactggaaggtaataaaggtggcctggttgaaatactccattgacataactaacagtcaccaaacaagccagtggaactctacagctaccttaaaaccctcttcacaataacttggggccctcatcctctaatctgaatcacactatttaacaggtattgagatggtgccagaacacttaatgccttgcccacagatcacccagactcatgctcaattaggatgggcactgaaaccaacttcccacctaattacttcagccactagataatgtctctaaaagtggggtccaaggctgaccagcattagaatcacccaagagcgagtataaatgcagattccaatcctcaccctagacctgctcagaatcaccatgtagagaacaaggtatccgcattataacaagcttccaagagactcttttacaaataaagtttgacaatcaccgctttccacatccagagtctcttcgcattcactcagccagttcctggcaggagaggagcacgtgagacaagacattctcaatttaacaaaatatatgaaagaccaggagaagcagagaaacctagctcttcatttcaatgaggcataacaatgaggtatccactgaaaaagagaagaggggagaaaaaggaaaagtaagtctctggcttaataacattttttatttatatgatattaagaagcaagaaagttggcatgtccaagagattaagatcaagatccaacagtgtgatttcctgattgggagaaaagcaaacagacactttgggccaagagtagagattctaataaccattctttgtgatggaaattctacaaaaagatgtgtgagcaggagctgagattgcctcactcctgcggctatttcaaaaaacaggcagaaagatttttttttttttgagacagagtcctgctctgtcacccaggctggagtgcagtggcgggatctcggctcactgcaacctccgcctcctcggcccaagcgattctcctgcctcagcctcccgagtagctgggaccacaggcgcgtgccaccacacctggctaattttttgtatttctagtagagagagggtttcaccgtgttagccaagatggtctcaatctcctgacctcgtgatctgcctgcctcagtctcccaaagtctgggattacaggcgtgtgccaccacgcctggctggaagattctcttaataggaacatagggccaccagtggagaaagaaaaaaggaaagcaaaaagtcagttccatcaatcattcagtcaccattatccaggt

SEQ ID NO: 11049 - DNA, 1104 bp, Homo sapiens
  misc_feature 1, 1104: n = A,T,C or G
ncggccgaggtacatggtttccattgcagcgaatagactaatattccttctgctggcaacctagacaagttccctaagcttatgggtaaaaatggagtcaaagagaagtgccagtatccaatcttcaaatatttcgctgaggatcacatggaatttaaaaagaaacgctccgaacaggaaaaacaattggccaagccttgggaaggaagacaagagggaggcatccagagactctgggctgcactgatgtagggcctttcgaggttgaacaaggtgaagggggaccctcacatgggaacagcgtgatggaggcagtctggcttatgagctggggagtgaattgtgtaaacatttattgaagtcagtttggaagttggcaagccacaaaaagccactatctgaagagcttgttgaaatttagccctttgtggaaactcatctggtcatgcccacagcatgtaatttcagggcaagacggagttccctcagtcgaggttccaccacccacagctgtgctgggtcgctaactggaaggacgcgctcaatagcagtctggcgggagtgtgtgccctcaagcacacatccgattatatcacgttcccatgtgaagccctgcaagggttccctaatcgtcagccatctcatttcttcttatccttctgccctatataaggcccattttctccctcttggattctccatgctcacaggtctccaaggccagatacttgcagtccttcctgcctgggtcaccctttccccacacaccactaagctgtgctccaatgtcactattcagagtggtcgtcctgacccccctggcccatgttatacacctgccaccctaatgccacttgctgcactggacccctggtttattttctctgtaacaattctggcttctgaaatgatcccgttgatgcatctgtttctctgtttgctgactgtcttcagtcactagccctggtgaatgtaagctcagggcttgttcttgttcacgactacatctccagcacccagaacattgtccagcacacagcaggtacctgcccgggccgccgcccaccgcgagtggagctccaattcgccatatagtagtagtan

SEQ ID NO: 11050 - DNA, 572 bp, Homo sapiens
  misc_feature 567, 568, 569, 570, 571, 572: n = A,T,C or G
tacaccgagaacatcacctgacttccctaaacttcagtttccttgtccttaagagaaaataaaaatatcttcctcaatgattaatttcttaaaaatcaataaaatgtgaaataatatctgggatggattgtgacaaatattatgaatgaaattaatacagtttcctttaattatttatcagagttcagagaaacacaaatgaaatcatgaatactaattaactgtgtgctttgtttagaaaatgcattacatctcttctcagtattcaagcatgccttctttttttatttgaaattatcaatagcattctaattctgtcttcatactggtgctagaaattcatcacagttttaaaatctacttatataaaatgtattataatgtttttcacatcattttacaaagacatgatttcatggtagaaaacattggatgtggaagaggcgctaaatatctgtgtctcaagattattgccctcttaagagttataagaattggctggaaattgtgctgatcatagtccgtcagagatccgggctgatcatggttcaattttcacctgtaccnnnnnn

SEQ ID NO: 11051 - DNA, 944 bp, Homo sapiens
  misc_feature 916, 917, 918, 919, 920, 921, 922, 923, 924, 925, 926, 927,928, 929, 930, 931, 932, 933, 934, 935, 936, 937, 938, 939,940, 941, 942, 943, 944: n = A,T,C or G
acgcgggcatcacctaatatcttaaatatttaaccttttatgcagtgtttgcctctctacttgggtatgcccttaacagtaaaaagtgttgataatgctctcccttttggcactcacagaattgctatacatatatatgtataaaatatatgtaaatataaaaatacatagttaaaaaaataaatctaccactaaatatagtaagggagttttaaactgaggtttttgaagtctttaagaatttatttagagacttcttttgttggaagtatggtggctagatgccatgaaaaacccactgaaaacaagtgtaagtgctaggtaatatgttgaaacatatcttttgaaatgtattactgagctggcaagaaagtatgccattgtagagagtgaaaataagtgaaggcagaatcctgggaggtaagccagcctgaagatattgatgacactggatggccttaagtttccattttgactggcatgtaatccagccaaagattcccacagaaatccgaggttccaaatggtaaatccgtggtgacattggggtgaccgagaaatgaactctgtgcagaaaggaatggtaacaacacttgtctcgtacaactttggctctaggtaggggaaaggaaaacagcttcctagagaaatgttaaccacaagctagccctcatgagagatttcagctaggatggatgctatctgtgtagtgcaaaaaaaaaaaaaaaaaatccatagccagattttgtgctttaatgtggacctaggtcaatagtgactgcaaagccagaagcagtggctcacccctgtaatcccagcactttgggaggccgaaggaggtggatcgcttgaggtcaggagttcgagaccagcctggccaacatggtgaaaccctatatctactaaaaatgcaaannnnnnnnnnnnnnnnnnnnnnnnnnnnn

SEQ ID NO: 11052 - DNA, 869 bp, Homo sapiens
  misc_feature 868, 869: n = A,T,C or G
accaagaagaaagccatgggcactgtcagtaaagagatctagaatgggaacaagacagggagaaagccaggtgcaagacacaggaaaagttctagaaagaaagctttttgcatctaacatcagtctccccagattcaacccatctcaatattgaagaaattgtcatcctattcccaaataaagtgaaatgaggttttttatgtaaagtgcttagaatggagtgtggcacacagtaaggatcacctttaagtattacctatagatatactgataaatacatggatatgtcaagggagaggttggccttttaacttgaaggagtcagaaaaaaactgccatgcgcattttgctttgactttgaaaatctggatgcatggaagctctatagaagcacagcaggaatttcaagaggtatgctgcccaatgtgtggctggcagagtgctcacaccaaaggctccattggcattgagtggggagaacatactagaagtgggtttttcttgtcatggagttgaattttttttttaagcagttcatcttctttctagtgaaaaaataaacaaggataggggaaaatgtttggaggatgaatctttaaaaataacaactcatagccaaaatagagaaatgttcctttctcagtataacgtctctgtttacttaacagactgcacaccggcaggggaggaagtctcagtgtgggagggagcctgtgttcacctgctgtgagcaaaagttcagttcagaaactgagaaagtggagacttaacaattctcctttcttcttgtcctttttcaatcgtctcccatacccgcgtacctgcccgggcggccaccgcggtggagctcccaattcgcacctatagnn

SEQ ID NO: 11053 - DNA, 1359 bp, Homo sapiens
  misc_feature 1359: n = A,T,C or G
cggcttggtgggctgggtggtgacgaagttcagtccttcagttcacaaattagtccatgactgactacctggagaactctgagcaagctacctgacatttctagatctctctttcctcctcgctaatctagaggaaatcatggaacccaccacatccaacgattctaagaattgaatgtgagaatgcaggttaggagtttaccatagttccccggatatagaaaacactcaaaagatgttcgttgttgttaccgttattttatgatgaaccctctttcttttctctcttgttgattgactctctctccctcaaatgctccttactcattggctttgatcacatgcgagactgtcccataaaagagtctcccttgccccacatgctctctaacttccatcttctatcttatcccttgttcccagctgaactcagaaacgtctgcacatgaaatctccttttcttcacctctctagcattgctcaacccacaccaatctgttttccaccttagttaccccaaaaaagcaacttccctaggattaccaatgaatcgcgttgccaaattttacagatatttttcagtccgcatcctacataacctatctgaagcagcttacaatgttgatacctcccttcccgctgtgagacaggctttttcccttggcttccataatcccaaacaccccagttccttctgcctctcaggctgcagcctcccggtattgtttacagattcaatttcctccatccaacattaagccagaggtgctcagggctcaatcctaggtcttctccttctcttactactccatattctcccacaagacaatctagtgcatgtccatggcttccatcatcaccaaatgcagatcactcagaatgtacgctccaacacaaccctcttctctgagctcctggtacatatgtccagctgcccacaggaagtttctgctctaagatttagaagtcacctccatccctttatccctcaaaataaatctggtttatagggagcagaatattaaaattcacaaactaataaatattggcatgtttttataaagtctgtctgcataagtctaaattcttacatatcttggggaaatgtcctgaatttagactaaggaagttatgtatactattgtaaaacatggttctcattctcccaccccaaaactgaatatatatttcacaccctagttcagattctctgcttaagtctctaattttttccatttactaagggcaagatgcaacatgcagtgaaatgttttaactacagagctctttgttctttattcaacttaagggtcaggcccaattagaagagggtggagtgaggacttgacaagaaatgcn

SEQ ID NO: 11054 - DNA, 596 bp, Homo sapiens
cagtaggggcaccaaacccccaagaacaaggtaccacctgaagttcaggagtgggcatggggcctaaggcaggccagtgagaactcagaggcactaagatgtatgttcccacttgcagaagaggtgcatgctcacccagtagttgctaaaaaggctgaaggtaggtgtagagatgcttttggggccatggttaccacccttgaggtaaggagggagggtgagtctgcctaaaaatgaaccaaatcgagagtgcaaccacaactgcactaaatggaaagaaacagaaataagagagatgggctcctctcacaacacatttggggacctgaactcagccccgcctcaccctaggtacccacttagacttttcacatagctaatgagtacattttctttttgcttacatcatttcaagctaggtttctgtcacctgcaaccaagagtcttgtctaatgcaaacaaaccttcagaaactgatcttattttcactggatcttgttttcaccaaaaaacagcatatactcacccgttcctgaccagcagtgtcccagatgaggaacttgtgaagttcatttccacaaggcacagttcggacg

SEQ ID NO: 11055 - DNA, 613 bp, Homo sapiens
acagtagggtattacacagcaaaaaagccttcctgctggaatatttcagcatttcagttatttattacattagctttatggcatatcacaacctatttgagacaggtagagtgaacccttttctgccacacagaggcacattaagtggccatcatgactggtgagacttaattgttttacaccgggcagttctctgtcgtgatttaaatccctcgtaaagcagctgaccccagttctcaggatgatttggatcccccgctaacttggaaaatcagagccagctgagagttggcttgcacattttagcatctggtaaaagcgtgcaagctagtgagatgtgcagggaaggagtcattggcaattgtatgtgaaaacacttaattaattgtttatctcttttaatttgtttaaatgatcataaaattgctcgcattattttgaagatgtcttcatgtttataaaactgtcttcatgtcttcacatatttataaaacaaagttacaatcatttaccaactcattgtttatgattagaacgtaatgtgcaaaaccagattaacaatgcttttgtatccaaattcaaatgccaagtgcttttggctatgattgcaggt

SEQ ID NO: 11056 - DNA, 757 bp, Homo sapiens
  misc_feature 757: n = A,T,C or G
acgcgggtgttcagggaattacagcatagatatgaaagatgtctgaaaaattggaaatatcaaataaaaattaagaagcctaaaactacatcagattaatatgtagtatagtctttcacatctggccatgatggaatggagcaatgggattatatatacattctcacagtaaacagttttcagatattgaacaacaaaaagtaggcagtgctagccagagattccttggagccaaaaaacaaaacaaaacaaacaataaaaattggtaatctctatattgctccagtttgctgcttggagaaagttctcaggctgcagctcagagaggaaaaatccagagctcagtggtctgaatgagttaaagaggatttggggcagcaaatgcaattagaattcacagggcagaggtgagaggaagtgtagagatggagagggttgtgctgagggaagagagagagagcgaagagagtagaactacagagagaacaagttgcaaagtaaaagagaaataaagatctggagtgctgcagacagtttcaggcttaagtattgatcagtgcacacatgtgaggaaactacagggcaaataactactgaaaagaagcagatagaacaatgctcaatggacagagaaggctagaaataatagctggcctcctcatcagccacagtaggcaacctcaatatacccagaggattgagaaaattacccagaaaggtattgcctcagtaacagggtacctgcccgggcggccgn

SEQ ID NO: 11057 - DNA, 392 bp, Homo sapiens
  misc_feature 392: n = A,T,C or G
acttgtcgaatgtagaagtgaataaatagcaagacagagtcacccggctggcttggacctggactggccaagctggtggtctacaccatgatttgctggataatccatgcagctttccctgcatagacacagatgcagcccctctgtccaaacatgatgctccctctgtcattgatgggaaccagatggagtcgcgcctgtaacatgactgagcactgatttcagtaaagtaaatgaattaccaaattgtagtcattataatctatcttcatcttagtgacacacttgactggctgctataaaccaggatttgaagagtgaatgtggatttacagacctctcatctctgcccacaggatccaaatctggcagaattgtcatctctcccgcgn

SEQ ID NO: 11058 - DNA, 201 bp, Homo sapiens
  misc_feature 199, 200, 201: n = A,T,C or G
ccgggcaggtacgcggggaaaacaaaccatatctaaacgcggggagtggcatcctttgaactcacggatccagtcataactgaagttccatctacacctggggtcttcagacccaggctctggaaaagatcctgttacttacaagcaaaagaaattctgcctcttaccctcagcatgtgagtacctcggcccgctctannn

SEQ ID NO: 11059 - DNA, 367 bp, Homo sapiens
actgatcaagctaggtcatgtgctggaccctgggaaagcggacacaaatatcctgcccttactggctgaatacgtaatgagggggacccaacatgggaacatataaatgtgcaatttcaattttttttaaaaaacacccatgattagaaatcaaaatgtgcagtttcaaagtgtggcaaagccatgcaagaaatgaccgggcacggtggctcacacctgtaatcccagcactttgggaggccggggcggtgggatcacttgaggtcaggcattcgagaccagcctggccaatgtggtaaaatcccatctctactaaaaatacaaaaattagctgggtgtgatggtgcatgcctgtagtcccagatta

SEQ ID NO: 11060 - DNA, 719 bp, Homo sapiens
acattgtaggatgcttaccagatcctgcccactagaggccaatagcacctcatcatcatagcaccccttccctcagtgataataaaaaatgtctccagacattgtttaagttaataaatgtgcccagagcccaggcacagtggctcaggcctgtgattttagctctttgggagaccgaggtgggtggatcacttgaggccaggagttcctagaacgttcctctgtcaaaagacaaaattacaacaatttaaaatctaattggctgttattggccattctagaattggttgacatctcattctatgaaatacaatgagtgctcttcaataagctgagcagaggggggttagctttattggcagaaaagggctaaagaaaacagaaaaagaacaaaaagtgattggttgtttcagagttactttccttaaagaggtaaagcacagaggacccccttatcatcctggctcaggtaacggtggtgtcactccacatcagccctcattttacacgggaaggtagttgctaatttaacaagatttcatggccaataaaatatttatgatgcttttagtgttcaatgcatttatcttatagtgatttattataaaaatggtattttattttctttttttggagggtgttctggggcattgtgaatcatggaatctcatggtttgtacttgactggattttaatggacacatagagaggaacaacgt

SEQ ID NO: 11061 - DNA, 420 bp, Homo sapiens
  misc_feature 415, 416, 417, 418, 419, 420: n = A,T,C or G
acattcgctagaaacagttaagtaacaatacaaagcgcccctgagtctagttgctggggaggccaaatgtgaactggctctagaaagatctgggtgggctgagagaccatgtggtaatagcataagcgaagacagagtggacatgagtctggctgctttgcaggtcagacggacagaagaggtgccaggcaggtagagggttgagggcacacttggcttctgtagaagtcgtgagttgtcggggagattggatcaggaaatgagatgataaattgtaattttataggcctgctgggtagaaagtagggacttttcctttcatgccctgaggatagcatgttgcccaggccggggatgggacattcctttcactattccctaccgccccatatttttttcagaacttaataatagnnnnnn

SEQ ID NO: 11062 - DNA, 1125 bp, Homo sapiens
ccgggcaggtacgcggggaagacaggcatctcaaatcggctgattctgcatctggaaactgccttcatcttgaaagaaaagctccaggtcccttctccagccacccagccccaagatggtgatgctgctgctgctgctttccgcactggctggcctcttcggtgcggcagagggacaagcatttcatcttgggaagtgccccaatcctccggtgcaggagaattttgacgtgaataagtatctcggaagatggtacctgcccgggcggccgggggccattgagactgccatggaagacttgaaaggtcacgtagctgagacttctggagagaccattcaaggcttctggctcttgacaaagatagaccactggaacaatgagaaggagagaattctactggtcacagacaagactctcttgatctgcaaatacgacttcatcatgctgagttgtgtgcagctgcagcggattcctctgagcgctgtctatcgcatctgcctgggcaagttcaccttccctgggatgtccctggacaagagacaaggagaaggccttaggatctactgggggagtccggaggagcagtctcttctgtcccgctggaacccatggtccactgaagttccttatgctactttcactgagcatcctatgaaatacaccagtgagaaattccttgaaatttgcaagttgtctgggttcatgtctaagcttgttccagctatccagaatgcccacaagaattcaactggatctggaagaggaaagaaactgatggtgttaactgaacccattttgattgagacctacacagggctgatgtcattcattggaaaccgcaacaaacttggctattcccttgcccgtgggagtattggtttttgagagtctttttggtaccataagcatatcatccacagatacgtcactttgaaaattccagtttgacccacgctatttttggactgaaacaattaattatttttaaatgacgctttatgatttagaaatttagtatttccgaaaatttaaaagcttgattggactgatagatacacactttagacctcatacaagaataatcaaattttcttaaaactagaaaataaatgctgctgagccta

SEQ ID NO: 11063 - DNA, 248 bp, Homo sapiens
acagctgcatgccatactgcagaataaataaataaaacacattcccaccacttttactactctgataatctatgaaaatcaacactttcatcaattatacaatataaatataaaaacaattaaagcaaacaagtaaagcaaccaaaattttgaaagatgaacttttagtgccctgcaacaatacatttaaaaagacaattgaagtcttttacttggacctacaacttaaggtccagctcaccagtacc

SEQ ID NO: 11064 - DNA, 2003 bp, Homo sapiens
  misc_feature 2001, 2002, 2003: n = A,T,C or G
gcgtccggtacattggcacttggattagattccaaaagacaaaagtgttgggtgcttctagcttgaattcagtccctaaatacatgaggctgggtgagcagatgaaaccggtagccactgtgctgatgcatgtgactccattcagttggggattttggttccatgtggatccatactaagtattcttcagtcagtggattttagcaaggggaggtaggagtggaagagaggtgtgaagaaacctctccgaacaaatgaaccagcagtaagtttctaaaaatcagaatctagatagaagttctgcaatatgaaatgagcacattctttgataaggcgtatctattcatgcttttgtaccactgttttgtacctgactccctgaccgatttgtattttttatatacaactagaaggaagtcacaagattgccttctacagtgtgccatttccaaatggatctgttgttggaggaaactggttgctagtcaatgttctatatttaatgaatgtgtgataaatcatcctgtaatcagtatggagtaacctgtttttgtagtttggatgaatatgtcctgagaaatttccatccactttggttcagcggacatcaaggtagtaataataatttttcctccacaggtccctccactcatatggcctctccctccccagctagtggaggggaagcagtctggacttagaaaggaaataggtggtctgtcataggggctttcattagagttaaacttcatagagtcaactgtttcatcatcatagtgagcccagagagccactgcccagcagcatgctcacaccacctaccctagtgtaggtaataggtctacgctaggaccccgtgctgggctctcagcccatcatgagattttggtggatttaatggcaggtaggaacttatttatagtggattgataattgctttataattccttggtaatgacagctcagggaaggtttcacaaggtcatgatcaggagacttgaattgttactggatgtaggaattgtttcactgctcttaacttgctcaaactggggcaggttccaggaacttgaactaaaaatatctatttaagcctctctctctttctctcctccccaacttttttctgaaagccttgatttctgtagacagaactatggtttttggcatgttgggtcaagacgtgtttctataggaaatgcttgcacgtggcactggcttggtgagtcaagcttcctgagcttcagaccgtttgtcctgtcatctgtcctgcccaacactgtatggtttttctctagcacggcttcaattttgttctctgcacaaagcctttggtggttctgccctctgccctccagctttacccaccagagtaaggaatcttttctttttagaaatcaagaatttggcttcacagatggcttctcacagatgccctcctgccagccaaaccggacttgttcttcctgcctctgtgccttctctcattctccttctctccctccataccccacttttgaggttctgtgggtaccatctttgtggactcttgtcttttttttcaacccacatggagtgccctgtgtgtacatactgacctttttttttttttttttgggctggaactcgggtcggtatgagcctctttaaaagcaggtaacggggcgggctgggggactcaggccggtattcccagcatttgggaaggcctgacgggggcaggcatggcttggagcccaggagtttgagaccagcctgggcaactatggggaagacccgtgtttctaccaaaatgaacagcggtaacaacacaggggacggtaattctaatttcctccgggggttccccccggaggtggcttccagggctgttgccgggggggtaaaggcagaaaaaaatacccgcattgaaggcaaggtaccttggaacatttcggctttggacccgaaatccagcgactcggataaactctagaaataaaagcctggcggcagtcagannn

SEQ ID NO: 11065 - DNA, 290 bp, Homo sapiens
  misc_feature 1, 2: n = A,T,C or G
nnctgcggcggccgcccgggcaggtactagctgtttttgcgacttttaataataacacctactagttactgagtgtcatcatcaccaatgtcatgattgccacgatttattgagtgcctactacatgcaggccccaggtcagtgctttacactcttaactgtcatgttgacaacagctctgaatgacaggagctctgttcagtgttttacaagtgagaaaactaaagacactaataatttttaaaaatatatccacagttctatgattagtaagtaagggagctagtcct

SEQ ID NO: 11066 - DNA, 897 bp, Homo sapiens
actctcacccctagctcattttcattccctggctgacctaccagcagaacctccgcccccctgcggcccgataccatcatttttaatgaagttaatttttatttttatttttatttttactattttgataaccactttctgtgaaataatagttttttttttcaaaacttggctcatatctccttttatgttagcagtcatggcatagaaaagctgcccacagaatgacatacatcaaaaacagttttctgtttagacggatagctttaagtgtgtgcaaacaggtgcctctatgtgtggaaggaagacatgctagattatttggggtccacctgcagaggaatgagctaatttacagaagagtgaagcaggctctgcactgaaggccagggttaaggcatatagctaatgataaaataaatgaatgtgactttctaaaaatgtcatgggggagaagaaaatgaggaggaagggaaaactggcttctataatcttgtaatgttacaaatagaattgccatgtgactcagatcttctcagaggttagagggcataggtcactttttttagtggtgcatctttgtcattagacgaagaataattgggaggaaatgatttcaccccagagtttaaattcctcggtcactgcctcattttcttccatagatccataggaatctcctgggagtgaagtggagcctgtgcatttcctagagttgggctttttggggttttggtttggatctatggtgttgctctcttggggacagaaagtatggacagggcacaggcgcagagacaggtcactctctgtgtttcattcccgtcctgacactttctagctgtgtagctttagataagccacgggacatttgtggatttgagtttttgcatctgt

SEQ ID NO: 11067 - DNA, 340 bp, Homo sapiens
  misc_feature 339, 340: n = A,T,C or G
acgcgggtggcccgaagttagatagatgaggagggtatttatctgagacaaacactgggaggaaatttcaaccagaaggaatattagcatgtgagaaggcatacaatcataaaaggcatgttgtgttaacggagctacaagtagcacaatttggctaatgtgtacagcgagaagagagttgtgggcagataggttggaaaagaagccgtgagttagatcatgaagagcctcggtaaggagtttgttttaaaaacaattactgaaagattcggagcaaacacaatatttataggttggaaatattgccagaatggaaaaaaccacccttacccaaaccgnn

SEQ ID NO: 11068 - DNA, 1494 bp, Homo sapiens
  misc_feature 1, 1484, 1485, 1486, 1487, 1488, 1489, 1490, 1491, 1492,1493, 1494: n = A,T,C or G
nagtcaggatctagttggcattacctccaagagaatagccatgttggcttttctctgcggccacactgtagcatgtaatgttttgactctgggacaaatggccactctgaccagcatatgatggtactggtacctcatctctgatgattagtgatgttgagcgtttcccatgcctgttggaatggcaatccgttggaaatgtcttctcagttactacccatatgtatgttgctcaggccactgtgtggccccagcactgttggtttgcatcgggacttggggattgtttgtcgttgttagccaagacaaatgttacactgctgttcctacagtgagtagtgggagtggggtatggggacatatgcttatgcccacagttccatcagaaatcccactgccttaagacagtctcacgggaacccagtcccagccttgcagcactgggtagccctgtggcattttgactttggatgtatctgcattgtcgaagtcactcagcatgttgccatgcatttatccacttaggtcaatgttaagggaagttcatcgcctctgcttcttcagtaactgatgtctggtgcatcaactgaatgcatttcaggcttttaagcagttcccacggatctatgggtaaaaaaggctttcaccatgcccacctactcagtgagtgaccaatgtctcattgttagtgcatctgatgcacagagtttagtggtctgagggaggtcagtcgccaagcagagattgaaatcacatttgtatttacattattacttttctacagcttggttccttgcagggtttcacactatttagtctggattgaatccttgaattactttactttgtctaccaaggctttcaaagaacttgataaacttgttctaattagccaacatattcatccatgatgtccgtataccaggtctaaaaataaaacatttcttaatgcacacaggacatggaaggcaatctacacattttcaagtgtagactttgcttgtgactcttttgtgaggaatagtcattgttactttaggaaaaccctgagtttatccaactcttgttagaattggataagtgtaaaaacctacaatagaatgcaagtgtgagagccaagtcctctggtaaaataaactcatattattatttatatatgtctggtcattgtattaataaaatcagtttgttttggctgaaacacatggttggcctttacaatagatgtgaaaatgggcttatagatcatgtgctctttatggtgaaatattaggtcgtatttattgccaaactcttttcaacagcttctaagcagtgaattttcagtgcattgtgttctccaagtacaaagcagcacttcagttttacacattcatctccacacatgatgaaccatatggagggcggcggaattgaggttgaccagaggagtagtggccagactcctgttatcatctgatccacaatgcggggtaaggcctgannnnnnnnnnn

SEQ ID NO: 11069 - DNA, 648 bp, Homo sapiens
  misc_feature 640, 641, 642, 643, 644, 645, 646, 647, 648: n = A,T,C or G
gcggccgcccgggcaggttcccccctattagggaaaagggctcctttcttttccctaaaacttactcctttctgcctctggaaaaagaaggttcagcccattcttcactccagtccactgcttgtgtgatcactacagaccactgcttgtgtgattttcccatttataaatgatactttcatctcctttctaactcttacttttgctcactttttaaagccaagatgtagccatctagcccctccatgatgtcttccccagtgctcccatctctgcctgtctctgctcttagatatctttccatacagtgctgattgtagtgtatgctctaaaaccaaactttctgggtttaaattctggtgccttcactaactaacttatttacccttactatgtctcagtttgcttatctttaaaatggagataatagtataatacttacctcatataagcactcaataatgcaagcttttattatttgtgttccttattagggtgttcaacttgtgttcctagccacaatgaaagtgtttggacataattttagtcttatttggttttctctttgtatgataaccaccggtctcagtttgcccaggactgaggggtttcccaggacatgagatttttcagaaaaagnnnnnnnnn

SEQ ID NO: 11070 - DNA, 1292 bp, Homo sapiens
  misc_feature 1287, 1288, 1289, 1290, 1291, 1292: n = A,T,C or G
acttggggcggcaggtggagttataattatagcttagaaaaaagcagcatcagcagctgttgcttctgtttgttcccagctataactgtcatcagtgggtaaactggcataaacaggcctctacaagtggaaaaacatttaacccctgttcttgtcacactctgggtcctctcagtggccagagaacagaaagaaaatctgactgtgcacgagcgaagggtgacaccgggcgtgcagcaccgacctgaaggcacctcttcgggggagccagaaatttgaagattctctttcctgtcggagactacaaaccaaataaatagggttttatgttactctggtagtgaaccgatggtggaaccagtttgtgaatttgccctggccagacaggctaatgttcctcatctctagcagtgttcacggaagcgacgagcacgggcgcctgcttagaaggacgctgatgcgctacgtcaatctcacctccctgctcatctttcgctcggtgagcactgctgtgtacaaaagatttcccacaatggaccacgtggttgaagcaggttttatgacaacagatgaaaggaaattattcaaccacctcaagtctcctcatctgaaatattgggttccattcatctggtttggaaatcttgcaactaaagcccggaatgaaggtagaatcagagacagtgttgatctgcaatcattgatgactgaaatgaatcgataccgctcttggtgcagcctcttattcggttatgactgggttgggattccgctggtttacacccaggtagcagagcagcttatcaacccttttggagaagatgatgatgattttgaaactaactggtgcattgacagaaatttgcaggtctctcttttagctgtggacgaaatgcacatgagcttacccaagatgaagaaggacatttactgggacgattctgctgctcgcccaccatacacattggcagctgctgactactgcataccctcatttctggggtcacagtccagatggggaaacagatgcctaagaatgagtggaagatggaagatataaaatcctactccctcagcctcaattccagtgtgctaaagagttgatcctggtgggtttaaaggtacaacactcgaatctttcaaaacaacttggtcctaaacacaagcaacaatctcatctgtgctcaattgaaaaacattctccacttttagcatcccggcatgtggagttcctaagaaatgcactttattatgcccacatgggtacttcccggagaattatgggannnnnn

SEQ ID NO: 11071 - DNA, 381 bp, Homo sapiens
  misc_feature 1: n = A,T,C or G
nccaccgcgtggcggccgccgtactcacagctgcatcacactgaatatcatctccctgcactgccatttcatttgagcagggctttgcctgtcaagaacattcatatcttttgataaacagtgcattttttccctgatagtctgtatgggacagcctccttgtttgcatctgaaggacagggacttcaggacctcctgctgtggtcaccaaggaatcacattcaaacttctcagcaaggtgttatggtccttctcagtttgcctacgatccattgaggcaaaggtttccttctctcaatacaccctctgctttagccagggggacctcccactgtcctctctatgtgttctatttgttcctgactgttagtacctgcccgg

SEQ ID NO: 11072 - DNA, 788 bp, Homo sapiens
  misc_feature 719, 732, 744, 745, 762, 763, 788: n = A,T,C or G
acccgcttgtgtggtttccatgatccttcttctgcctggaatgaggctcctcttgagtcctgagagcttcatttctgtctgtcttttgggctgtgccaaagcccctctgccttcgtggactccccactgattcattaccaattttcctctcctctgggctcttcttagattgcaaatggtgcctctggattgggtaccaagacttgcagtgccttattttgataccactaatatgagaccatgttatatgcctcttgagatatcattccctttctagcaatagacagtgataagcatgcgtatagagggtaaacgtaggactttgaggttcatccatctcaatagacaaaagtaaaagtatgctaatttcaatccttcacacagtaaattgaatgtaataggtcttcagtaactatttgaggaatgaaattgttattgatatattgatttaactgagcaaatccataagtgccacgcttggagtaaagtacagggaatctcattttttgggtaatttcaaacaagtaggagaccatccactatctattaaggacaaaggagatttgagtgacaaacatgttccagaccatccaatggtgttattctactacttcatcccagctagtaaaatggggcaataagaaccaaaaagcaggtactgtccctatgtaagtagacttcctagtcctggccaaaaccatctgacattaaaaaaaatncagtacctgcccnccgggcggccgnnccaccgcggtggagctnnccaattcgccctaatagtgagtcgn

SEQ ID NO: 11073 - DNA, 378 bp, Homo sapiens
acatgggtttgtcacagagaaaaattatgatgctttaaaaacacacacagagaaataataggttttatgcaaatgtcaagacattataaataaagaaaataatgttatttgttatgcaggctaaacactgaccaactcactcaatatattctggaagtggcaaaataaaattggaaaagtagaacaagtaatttaacatactacacttatcttcatataaattactgcaatgaggcgccatcaccatcaccatcaaaaaaagaagaattcctacaatcaatatgtgggattttagctaaaaaagaaaagtctatttagaagtcagtcacagccacatggttacctcaagccttacctcatcactgctccaccggtttg

SEQ ID NO: 11074 - DNA, 1608 bp, Homo sapiens
aggtacattgacagtgcttctggtttcagcacacatggagatatagaattgaaattgctctgctttctttacaaatgactcagagtgtgcttgttcttccctaaaatgttgccagcatgtaaaggattttcaatgagcagtgcaataagccagcaactgggaaggcttggagcggcactgatataacgtggtgctgtcacacagataatcagggctggagccaagtctcggtagcgctgtgcattatcctggtcacatactggaagttttgtttatccaacttggttgctcttgaagctggtgagagccctgccaggatgtggagtggacttcctagcagaggcagtactcatggggttcacatggttttgaatcaccagggccgcccatcaggagatgcctttatccagatgaagtctgcggacagagcatttatggctgcacagaagtgtcataaaaaaaacatgaaggacagatatgttgaagtctttcagtgttcagctgaggagatgaactttgtgttaatggggggcactttaaatcgaaatggcttatccccaccgccatgtaagttaccatgcctgtctcctccctcctacacatttccagctcctgctgcagttattcctacagaagctgccatttaccagccctctgtgattttgaatccacgagcactgcagccctccacagcgtactacccagcaggcactcagctcttcatgaactacacagcgtactatcccagccccccaggttcgcctaatagtcttggctacttccctacagctgctaatcttagcggtgtccctccacagcctggcacggtggtcagaatgcagggcctggcctacaatactggagttaaggaaattcttaacttcttccaaggttaccagtatgcaaccgaggatggacttatacacacaaatgaccaggccaggactctacccaaagaatgggtttgtatttaagggccccagcagttagaacatcctcagaaaagaagtgtttgaaagatgtatggtgatcttgaaacctccagacacaagaaaacttctagcaaattcaggggaagtttgtctacactcaggctgcagtattttcagcaaacttgattggacaaacgggcctgtgccttatcttttggtggagtgaaaaaatttgagccagtgaagccaaatcgtaacttacagcaagcagcatgcagcatacctggctctttgctgattgcaaataggcatttaaaatgtgaatttggaatcagatgtctccattacttccagttaaagtggcatcataggtgtttcctaagttttaagtcttggataaaaactccaccagtgtctaccatctccaccatgaactctgttaaggaagcttcatttctgtatattcccgctcttttctcttcatttccctgtcttctgcataatcatgccttcttgctaagtaattcaagcataagatcttggaataataaaatcacaatcttaggacaaagaataaaattgttattttcccagtctctaggaaaaaaaaggggggccctttaaattttttaaaaaaaaaaccccccaccccccccccggaacccgaaaaaaaaaa

SEQ ID NO: 11075 - DNA, 365 bp, Homo sapiens
accagagactcctatttatttataccagtaagggccctcccactgcctttgtctccagtaggtcagctgcatcatcagctttaaaagcccccaaatattgctgagcttgcttttttaaaacttctcttgcaaactttataaatttgtttcagagcactataataaaatatttcttgcaaacatggactataagtgccagagacactggagaaatctgagggtggggagaaaggataatctatcagcttggaagctccaaagcactgtctttagtagcgctattggtgatggtggttttgagtgcttctctcagtgcagggtgagccaggtttctcagtggcattagatatatactccatgacatt

SEQ ID NO: 11076 - DNA, 716 bp, Homo sapiens
  misc_feature 716: n = A,T,C or G
acaggatgcaaacacttctaaaattgtcttctgggatttctgtagataaaagctagtaaaagacctgagaagagatttttattgagcctatagcaatttggtttcataccctgagtagtaacagatattacattcaaagatgcttaattaccttcacaaagtatgaaattccaagcctacaaattgaatcagcaattcaaacttgaatttggaacttttcattatttatgtggacattctattagcagagaaccagctatacttcttatttccataggagagaaaagagcacaaagcagaacaagaggattccctacaggtgtgaaagaaatatttccgcttgatattcctacagttacagaagaacaaccttaggaaggtcaggacattgtgtctgggggaggaaggcaccaggcaatcactttccagagaagctatcaacattcatcattacaggagcagcactccgtttaggctgtttgtatttccatgggtctaggcacatgtgccactctctcctggcacttgcccctctttccctgcccccacatgcttttttttgagaaggagtctcgccctgtcacccaggctggagtgcaatggcatgatctcggctcactgcaacctctgccccccagattcaagcaattctcctgcctcagtctcccgagtagctgggactacaggcagatgccagctactcaggaggccaaggn

SEQ ID NO: 11077 - DNA, 533 bp, Homo sapiens
  misc_feature 1, 533: n = A,T,C or G
nacggccagtgtaaaactacggccagtgtaaaaccacggccactgtaaactctcaaaaaccaatactcccacgggcaagggaatagccaagtttgttgcggtttccaatgaatgacatcagccctgtgtaggtctcaatcaaaatgggttcagttaacaccatcagtttctttcctcttccagatccagttgaattcttgtgggcattctggatagctggaacaagcttagacatgaacccagacaacttgcaaatttcaaggaatttctcactggtgtatttcataggatgctcagtgaaagtagcataaggaacttcagtggaccatgggttccagcgggacagaagagactgctcctccggactcccccagtagatcctaaggccttctccttgtctctttgtcaagagccagaagccttgaatggtctctccagaagtctcagctacgtgacctttcaagtcttccatggcagtctcaatggcccccggccgccaccgcggtgagagctccaattcgccgtatagtagn

SEQ ID NO: 11078 - DNA, 388 bp, Homo sapiens
accgcggtggcggccgaggtacattttgcatgcacggacttctacatacagaatacttaaacagttcattgtattgaaacacgcttaaaaatggccctagcacttgctgcaatcctgctgtgtaggagttagccaggttgtgtctgctccctctagactattctatacatcaagaactaaaaaagaagagcaatcccagcatgtggctggatgcacatcaaagccaagtctgtcatgaattattttccttcctgttcctttcattcaggtcatgaagcacacatactgctacaggaaagggcaaaaggcaatgtcaagtgctgtgtaattgttgggttctttagtggcaaaggccagcaatgttgcagccaaaagggcatttaagagt

SEQ ID NO: 11079 - DNA, 958 bp, Homo sapiens
  misc_feature 958: n = A,T,C or G
acgcggggtccttccaccatgtgaggacacagcaagaaggggctgactctgaaccaggaagctgtgctgtgctcaccagacactttgatcttggacttctcagcctccagaactatggggttctgctcttgtcacccagactggagtgaagtggcacaatctcggctcactgcaacctccgcctcccgggttcaagcgattcccctgcctcagcctccagagtagctggactgcaggcgcacgccaccactcctggctaatttttgtatttttagtagagacggggtttcaccatgttggccaagatgttcttgatcttctcaccttgtgatccgcccacctcaacctcccaaagtgctgagagactaagacacctttctagacagagaggaggccgatggcagacattctcagataggtttgtagctattgacctggctgcatcaaaggagatgaaatcccttagaaattgacagcttctatgaaatttacaatcaagaaggcataagaacaactgctgcagcttcagaactatgcagaaaataaaatgtcaacagctgggagaaaaaattctaagtgagcaacagagccagtgaaaaatatcaccagtagagcaggcacctgagacagggaaatggcacccactaagtgcaggtctacaggggctgaccttgcagaccatttatggatcccaagttaccaaaacccttatttgattatgaactgcatagtagataccaatacatcagagcattgtctcaatgttaatatctatctgtgctgattgtattgtggtcatgtaacagaatgaatgcccttgttcttaagtgatacgtgggaaaatatttgaggggtgaagtgtcatgatgtttgctacttactctcacatgctttggcaaaaataaaacatctctctctctccagccctaatcatgttagaagaaacttcagtgaaagn

SEQ ID NO: 11080 - DNA, 1087 bp, Homo sapiens
accctggcctagatgccagtagcatattccccagttgtcaaaaccaaatagttctcccagcaatgcaaattatcacctcatgtgtgcgtggtattgggggtggaggaacattgtcacagttggggactactgggccggaggtctgtctgtgcaaaaggggaatctcaaccatcactctgtagtcacaaaatgaaaataaaagaaaaagctatttttaacatttcatattctctctctgcttttcacattttgctttctacttgccaaactttccccattatcagagctccttgtgtttcctagccaccttcaatcatctcgtgtctcagtagaatgcacaatgacaacacagctgcagtgctgagtccgttacatggacacagccaggaacttcttaaagtgaaaagatacttttccaggacagaatgaaattaaatccacatgattttttgagaaccatcaccacttgtataagtatgttctagtaaaaaaaaaatcgattattcagaagggttgaaaatggagtgttatggtttattgaatagtcaagtaaactacatggtatgctgtatggcaattccagttttcaacaagttagtgaacaataaagtgcacttaacagaaatgctatggaacatggtgaaatcttcacttaatgattccgaagccactttcagcgtcaagcaagccttgggcacattctcattgtaaaagaccacagatgtagatgtttcagaaggtgaaattaaatctgtgttgatcctttgatttcctgaaagaggcttacttgacaaaaaatttttatttagttcttttattcttataaaaggaggtaagctatgctttctttcttttttcaacctttgatatgcctcatagtctaagaaaatgagcatttagcgtttcctactaccaaaaaaagatttatacgatttctgcatggtaaataattccttaccatttaattcagataatacaataccccatcagtagcatatgactttttttctttttaaaatttgtatatttgagacactgcggatatagtaattaatgaggtaggccagctctacgtatgcttgtgggt

SEQ ID NO: 11081 - DNA, 2296 bp, Homo sapiens
  misc_feature 2290, 2291, 2292, 2293, 2294, 2295, 2296: n = A,T,C or G
acgcggggaagctcttgagctcctctacctcttagaaagcacaattgaatcagatatcatatgaaagacatacacacttcatgtaatgctacctgcgagtctccctagaaaagcgtttttgtaggtgaaaacaatgaagccaggtaatattgcaaggaggctgtaattttagcagacctaccaacaacactgatgtaggaagctcattattttaatttctggagccttttaattttttctttagaaagtgtataaataattgcagtgctgctttgcttccaaaactgggcagtgagttcaacaacaacgacaacaacagccgcagctcatcctggccgtcatggagtttcttgaaagaacgtatcttgtgaatgataaagctgccaagatgtatgctttcacactagaaaggagctgcaaatgaacacttcatagcaatgtggaactccaacagaaaccggtgaataaagatcagtgtcccagagagagaccagaggagctggagtcaggaggcatgtaccactgccacagtggctccaagcccacagaaaagggggcgaatgagtacgcctatgccaagtggaaactctgttctgcttcagcaatatgcttcattttcatgattgcagaggtcgtgggtgggcacattgctgggagtcttgctgttgtcacagatgctgcccacctcttaattgacctgaccagtttcctgctcagtctcttctccctgtggttgtcatcgaagcctccctctaagcggctgacatttggatggcaccgagcagagatccttggtgccctgctctccatcctgtgcatctgggtggtgactggcgtgctagtgtacctggcatgtgagcgcctgctgtatcctgattaccagatccaggcgactgtgatgatcatcgtttccagctgcgcagtggcggccaacattgtactaactgtggttttgcaccagagatgccttggccacaatcacaaggaagtacaagccaatgccagcgtcagagctgcttttgtgcatgcccttggagatctatttcagagtatcagtgtgctaattagtgcacttattatctactttaagccagagtataaaatagccgacccaatctgcacattcatcttttccatcctggtcttggccagcaccatcactatcttaaaggacttctccatcttactcatggaaggtgtgccaaagagcctgaattacagtggtgtgaaagagcttattttagcagtcgacggggtgctgtctgtgcacagcctgcacatctggtctctaacaatgaatcaagtaattctctcagctcatgttgctacagcagccagccgggacagccaagtggttcggagagaaattgctaaagcccttagcaaaagctttacgatgcactcactcaccattcagatggaatctccagttgaccaggaccccgactgccttttctgtgaagacccctgtgactagctcagtcacaccgtcagtttcccaaatttgacaggccaccttcaaacatgctgctatgcagtttctgcatcatagaaaataaggaaccaaaggaagaaattcatgtcatggtgcaatgcatattttatctatttatttagttccattcaccatgaaggaagaggcactgagatccatcaatcaattggattatatactgatcagtagctgtgttcaattgcaggaatgtgtatatagattattcctgagtggagccgaagtaacagctgtttgtaactatcggcaataccaaattcatctcccttccaataatgcatcttgagaacacataggtaaatttgaactcaggaaagtcttactagaaatcagtggaagggacaaatagtcacaaaattttaccaaaacattagaaacaaaaaataaggagagccaagtcaggaataaaagtgactctgtatgctaacgccacattagaacttggttctctcaccaagctgtaatgtgatttttttttctactctgaattggaaatatgtatgaatatacagagaagtgcttacaactaatttttatttacttgtcacattttggcaataaatccctcttatttctaaaaaaaaaaaaaaaaaaaaaaaaaaaaaaaaaaaaaaaaaaaaggggggggggctttaaatttttaaaaaaaaaaacccccccccccccccatggggcggaaagaaatagaagcccaccagcggtggcgtcccgctttttttggggattttatggggggaacaaaaaaaggacgccgccaaagactccaaaaaaaagggnnnnnnn

SEQ ID NO: 11082 - DNA, 923 bp, Homo sapiens
  misc_feature 922, 923: n = A,T,C or G
accataaatgttgtctcttaagagaatgtcaagtttcagtaaatttactttgaacttcaaagtagtgtgcaataactttgataaataagccgatcttatgaaatttgaaagttacgtttataattatattataaaataaaatgttgaattttctgttttaacttccccgatgtcccatattgattttattacattcacagatttttcttttcaaaagtaagcttcacttggtttgacatcagcagcttatttcttgcaatctatttaattgagacttttctgctgtttatcctaaaatgcagataaatggctttcagcacactgtttatagtataatagctcctgaagtgagtcagcattatcagctagagtctccatgtcataactaatggtctctctgcttatactttcctgctagtgaggagccactgaactccacagagacaggagcctggcatagttgggggtgggtagattattttgatggtgcctataggacaaggcttttttcctcctttattggtgtgaaatgagaagagaaatatgtccttatcatgattttagcatgctcaaaagtgccatgttctaagactggggcaaagaacttttaggatataatgatcctagagggatttgttttattccagattatctgctatgtcataatagcacaattttaatacttttctcttgaggctgtttgacttgctgctagagaatgggagccactaggaaatatttgtattactaccaaatattatgggcttaataataaaagtgagtattttttgtttcccaagaaagaaagaaactaaaaaacttcaattgttaactaatcatttatcataaatcgggcctattcattttgaaaggtcattaagttttttctttagaggaaaaaaaaaaaaaaaaaaaaaaaagnn

SEQ ID NO: 11083 - DNA, 1206 bp, Homo sapiens
  misc_feature 1203, 1204, 1205, 1206: n = A,T,C or G
tgcgacagagtttgttttatactgcctcataattacctcttttcctttttctttctttgctaccttggtcaagtttccctttattttctctttcctatttaactttttctattaattcagaagttttaatttgcttttccagtttcctagtgtttgtattcccatcctgaacaatctctgtatttttcttttattatatcagaagtctctctgtagttcaggtgaatttatagacagtcatccttacactacctatataaaattatggaaggatgtctagaggcatgcttctacttcagattaccaaaatgataatgaccactgcgcagtgctgggatcagtccactggcactacactttaacaatcctttatagcactgatagtgcttgccttccatttttcaggattcacctccaatttccagatcaaaacagagtgtgcctttgtatatacttcaaagaaaacaaagatgctagacaacaggaaatataaagtgaaatcaggtattttccaaaaaccaaaactatactagaattgattttttttaaatgtatatgtcttaatcattcaaataaagtcaactacaatggaggagatatttgaacccctcaattctaactttttactgagtctagaaaataataaatgcttgtagatactactgaaaagttctagttggcaaaccataaaagacatcccatacaaacacagaaaaattttaagcaaagaaatgagaatgaatagtctgaggaccatccccagctagcatgtgtgagatggtgtttagggtaaacaaccagactgatgagaaggacatcagttggctgcaggctccaatgcagtgaacttggggagcaatgtgggaggtgctgtctctgagagatgctgattcaaaggccaggatttgggtggaaaaagagatgcccattaagaagaagattctgtgaggtctagagaggtaggtggtagccatcacccacagtagatcttgccttaaagaggaaaaatgatttttgttcttagggtattaaaggcacagagcaggactctgtacttctagaaaagataccactgtgtcctaaattcaagaattttgcagttcttccaaagaagacttgtagccttgttggctgtcaagtgtaggaggagaaaacaaaaaaacaacaaaaatctttactacacaacccaactctctagcccannnn

SEQ ID NO: 11084 - DNA, 268 bp, Homo sapiens
gcggtggcggccgaggtacactccagtatgtagataactttttgtgtgtagcccaacctgggagacatctgatcaagttacgaaaaagaccctgaatttcctggcacacaggggatacaaagtgttcaaaaagtaggctcaaatcacccttcaactggtttaatatttggggtatattttgatcccccaggcctggcaaatatccccagaatggtgcaagatatatatggtttaggagcccccagtactcggccgccaccgcggtgga

SEQ ID NO: 11085 - DNA, 765 bp, Homo sapiens
  misc_feature 1, 2, 3, 4, 5, 6, 7, 8, 9, 10, 11, 12, 13, 14, 15, 16, 17,18, 19, 20, 21, 22, 23, 24, 25, 26, 27, 28, 29, 30: n = A,T,C or G
nnnnnnnnnnnnnnnnnnnnnnnnnnnnnntgcaaatttacacagttttcttaggaatgctctttctttttttttctctttggactctacattcctgtagctcctattcttcaagggcacaggggcttacttaaacataaaattttacaacttaactggaagggtgccctgcttgcaaatggaaaactgccacagagcagacttaactgcagcaagcaggtgacagagcaaggaacaggatccaaaattatgattttttgtgtgctactgaagtaaaagaatttaagaaggttttactcagggtcataggctgggttggaagactgggaaaaggaaatcagtagtatctatatctaattatggtgacagaatttcacagacatctataacctaggtcaaacgtcaaagacatgaacacctaagacactttcacacatccctgagcatcatgattaaattcagatagttggggatctgtccccaggaccagtatcctattctgttaggggcctctaaataataagactttatgtgttctcttccacaacaaagagtaggaagtgattagcagctggggagaacaaagagactttcccaagttagggtttttcaacttcgttaaacctagcaattaaagaaaggaggagttttgaactatgacataatattgaaaaagaacagactgcatggttaaataataaacaatgctgatgtttaacaaccttctccattgctgtctccagaacccctagaacagagcctggt

SEQ ID NO: 11086 - DNA, 750 bp, Homo sapiens
  misc_feature 749, 750: n = A,T,C or G
ccggagcacctacagcatcggccagcaacgcaatttcgtcgtgaccaagggcgcacaggtaccgatcccggtattcggctcggtggtggcgaataccagggccttaccggccggcatctacacagacaccctgacggtgactctggattggtaaaacatgaggatggacatcatgcatgcacttgtatcgaaagcagtttttccattggtggcgctggtgtgggtatcgggcatccaggcagccaccaccgtgaccgggcagatcagctccacgctgatcctgaccaacagctgcctggtcaacggcgtgggcggtaccaccggtttgaacttcggtacgatcaatttcggcaccaccaacagccagttcaccacccagtccggccaagtgctgggcggcggcggcggcgcactgtcgatccagtgttcttcgggcacctcgccggtgatcaccgtgggcgccgggtcccatgacggccagtccaccggcggcacccgggcgctgtatgacggcgtggccaattatgtgccgtatgacttttacaccgactccgggcattcaacgctcctggccatcaacggcaccatcaacgtgggcgcgagcacgggcgttgcgcaaaccgtgaatatctacggccaggccgtgggcaaggcgggactgccggcgggtacctataccgatacggtgtccgtgcaactgacgttctaatgccatgaaacgggcctgctgggcggcgctggcggtcatnn

SEQ ID NO: 11087 - DNA, 520 bp, Homo sapiens
  misc_feature 517, 518, 519, 520: n = A,T,C or G
actctaaactcagatggcttatgactagaaaaggtcacaccttttaaagacgcagctgcgttccctcagctgtcaggcttgctattcgcaaactctgttacaagacaccatcttagaagaatgttctgaaaaaagcaagatgcaatcaaacaaatatgtcgccataaataggaagaaaagtcttagttgaaatctgatttcttgggaaacattttaaaatgtatttctttcaaaaataaaaatataacaaaacaagaaaagaactaccttcgaaataaatatactcggaaattgcagacttgatttagatttcttcctaggaaagaaaaacgtttaaaccagaatcatagacacctatagctggaagtgcccctacaactattgagcgcaggtgaggaaactgaggccaaaaaggtgaagtcactggctagaatctgcacagcagacgtggaggccaggatgagatcctcgcccagtgctctcttggttaccatgctacctgtcctgtacctgcccnnnn

SEQ ID NO: 11088 - DNA, 615 bp, Homo sapiens
  misc_feature 1, 2, 3, 4: n = A,T,C or G
nnnncgggcaggtaccagttttatcacctaaatgccgcaggaataaatagatcatttactaagattactgggctttttgttggcttctttgttcatttttaatctgcaaatataaaagattgtgttacataattctttaggttgaaacatgaaatgatgaaagaagacttcaacttccaggagagatttattagctagtggatactcagtgctcccaccaaaaccactagaaaaaaatgtatttaaaacaaataaatcaactagttcaaggaaatagagagctgaaaaggcaaagagaccttgacgaagtaagactccagataaggcaacacttagtgaggtgaactgacttttaaagactttatccttggatgcatttcataattctgggcatgttttaggcagaataacagtatttaaatcctgtaaaaaggaattcagtttgcagatgcaaataaggttggtaatcaactggcctgagatagggtgggcacaatcttttcacctgagtcttaaaagcagacagcctatcttagatatagtcacaagggacgggaaaatgcaaggagagtcaaaaaaggtgcgatgttgctggttttgaagatgcaggacagt

SEQ ID NO: 11089 - DNA, 600 bp, Homo sapiens
  misc_feature 1, 2, 3, 595, 596, 597, 598, 599, 600: n = A,T,C or G
nnnctgaggcggccgcccgggcagggacgcgggagcccctcatgggagccggactccctgagactcaagaaaatgcacccgtcctgcgttcctcctgcctggggtgacccataaggaacaccccccccttctcaacaaccacagaagataaatgccaaggggaccaccaacatgggcatggggctgtgatgccaatcttaagggaaaacacaagtaaaattggctccaggactgagctgggggcagctgctctttctgtccatgactttgaggcgggatctcgagcgtctgtctgacgggccttctgtctgctgtcctctcgcaggtttcagacattgaatccaggattgcagccctgagggccgcagggctcacggtgaagccctcgggaaagccccggaggaagtcaaacctcccgatatttctccctcgagtggctgggaaacttggcaagagaccagaggacccaaatgcagacccttcaagtgaggccaaggcaatggctgtgccctatcttctgagaagaaagttcagtaattccctgaaaagtcaaggtaaagatgatgattcttttgatcggaaatcagtgtcctcnnnnnn

SEQ ID NO: 11090 - DNA, 297 bp, Homo sapiens
  misc_feature 1, 2, 3, 4, 5, 6, 7, 8, 296, 297: n = A,T,C or G
nnnnnnnnggcggccgaggtaccatctctgtttctgaggaagcagcagaggagcctatgtgatccagagaacttgttcttggcttctggaagcagagatgcaggaatggaccaataaggcattaaacaaattcatttagaatctcaagaaagaaatatctaacagtataatcataataacaaaattttgatttcttcagaagcactccaatagcttcacccgcattagctaatcttgtgcagtgaggaggtgcaattccctctagtctcccgcgtacctgcccgggcggccgctcnn

SEQ ID NO: 11091 - DNA, 734 bp, Homo sapiens
ggtggcggccgcccgggcaggtacacagatcccagttatcaacatagccagatggctggtggtagaagcaaccctgtccctgtagcacctctctgtgtcctgctcaaaagcattaaaacatcattcttagataagaacagagacaaaggatatgtctttaacactttacagtctataaagtttttccacagccactgtctcactgaatcaacccctaagagacagaaatgaaaatcgctgtttttacaaactgagaaattacgggcctttgaagtgtttcacagccttcacagcccgctggtaagaagcagagatcaggccttggacctgggtcttgtgattccaaagcccatgatccttcggattcatcaaggctccactccaagtgcctactgggactgccttgcagcactcaccttctgtaggtgagtaggtaagttgcggcatgccattctttcaaaagaacagtgcacctctgtgaccgaatatgggccacagtatctcaaggatattttggtcaaagccctggggtgtggggcagaagataatgtattcaatgaagcttctagagaaaagcataataaataaagaagctcctacctgtcgctagccttcctaaatatcccaagaaatcaagaattttctcccaatggattacagctgagcatctactcagaagagaaaatcaagtccatttcagtttagacggcagcagcaaactccccacagagagt

SEQ ID NO: 11092 - DNA, 343 bp, Homo sapiens
  misc_feature 1: n = A,T,C or G
ntccaccgcggtggcggccgacgtacgcggggagaacaccaggtgctgttctcaacaacgtccggcgcttgaccagtgcattgagaaggttggtccccaataacatctatctcaagaccactttccacagccttttaatctcccactcccagtcctctctctttgttctctttccactctgacgaattaaatttagcccttattctttttcttgctttagaaaagttcctcgaagtttagacgtgtagaatgttagtgtcctcagcatatctcgcccaaatccctccttttataggtgcagagactgaggcccacagaggttaaatgccaggctcaaggtggt

SEQ ID NO: 11093 - DNA, 495 bp, Homo sapiens
  misc_feature 495: n = A,T,C or G
aaagtggcgcagcaatggaaagtgtcgcgcgaacagcaggacgcgttctccgttgaatcgcaccgccgcgccatcgccgcgcagcaagccggtttcttcaaggccgaaacgacgcccgtcgaaatcatcacgcgtacgccgaacctggccacaggccaggtggacgtatcgcgccgcaccgtcgacaccgacgaaggcgcgcgcgccgattcgacgctggagtcgctgggcaaactgaaacccgtgtttgccgccaagggcaccgtcacggccgccaacagctcgcagatgtccgacggcgccggtgcgctgctgatcgtcagcgaaaaaatcctgcgcgaacataacctgactccgctggcgaaattctcctcgttcgccgtgcgcggcgtgccgccggaaatcatgggcatcggcccgaaattcgccattcctgcagcgtgcgccgccgccggcatcacgcaagaccagctggactggatcgagctgaacgan

SEQ ID NO: 11094 - DNA, 995 bp, Homo sapiens
  misc_feature 1, 2, 3, 4, 5, 6, 7, 8, 9, 10, 11, 12, 13, 14, 15, 16, 17,18, 19, 20, 22: n = A,T,C or G
nnnnnnnnnnnnnnnnnnnngnaaattttttgcgagaactagtcacgtatttattcaaaagcaatttacaaagctttctatatcttttcaacatatccacctgcccctccagcatctttttggcattcaagtaaccactatgatttaccccgctaagaaaaattattcacatttccatggcacaaattgtaggaaaggaaaagacattcttattcaagcagcggaagggttttggtgaaaaaacaggttctggttctggggaggtttttgttatgttaggtgatcgcctctgaagtttgcatcatcatagagctcttaacgttaaccagggctttggcctcaggagggaagccttatctgtagcagagatcagttgcaggaaacagccccaaatctcaaacagtggcacccagacttgatggccgaccaggcacagatgtaagccataaaaaagtactcatttgcttgctggctacaagaaggagcattttatctagtgagtccatcaggaggtcaggcgtaaagaaacatgtaccgggcagcttgacctccattgcttttggcttttgtctctttctccttttgaagctcaaaagggcatagagtggactctgatcctaggattttttttttccctgctttggctgcctctgttttggttcatgtgtcaagcagagacggggaaagccaaacgacacaatgagcgttctcagaaaggaaacttcttcggaatgaaaagctttggccacattggaaagggtagaagtctgagagaaactttttcatcagggagactaggtcggtgtcttagtcctttcaggctgctgtaacaaaggtaccattctactgggtgggctctataaatatagaaatctctttctcacagttctggaggctgagaagtccaagatcaaagtgtctggtgagcacagcacagcttcctggttcagagtcagccccttcttgctgtgtcctcacatggtggaagcccgcgt

SEQ ID NO: 11095 - DNA, 470 bp, Homo sapiens
tatagggcgaattggagctccccgcggtggcggccgaggtacagagggcaaggaaggaatttttctgtaatttggaaaaatgggaactgtgagaaagaaggagttggaagctcatacttagggagcatctacaaggacgtctttttcacgttggttggaatatccaaatcaaggattatttcagaatcacccagatgattaaaaaactactgagatccaggttgtatttcagcagttctgacaattgctctgggtcgaagcttgaatcagtagttaagaaaaacaacaaacaaaacaaattttggggcttttctcactgatttacagttaaagctcatttactcttcctatgactttagatggaggatatttccaagtcttcaggatggagacatggagggaagtgagactagtgatgtgcctcaaggttttgctgttgttctaaccatgaggagcactattcaaaccca

SEQ ID NO: 11096 - DNA, 375 bp, Homo sapiens
actgggaatgactgagtagtcacaaattcagagagctgctgggaggtagatgagttggggctgggaggtgtccatgggatttgggggcttgagggtcacggtcacctcaagacagcaggatggggtggagagcatgtgaggggcgatcagagaaacaaagggagtgagtgaaggcaactctgtctttgaggggacagcagagcaagcaggctgaaggtctgggcgcagaatgtggtgcacaggaggtgggtgggagggaatttacatatcacccatctgacctgctttgtgaccttctccaatattgttgtagagaagaaataagagaacacgtgtggccagacaccatggctcatgcctgtaatcccagcactt

SEQ ID NO: 11097 - DNA, 865 bp, Homo sapiens
  misc_feature 1, 2, 3, 859, 860, 861, 862, 863, 864, 865: n = A,T,C or G
nnnactggtgagggactcaccatagatctgagggaggaaggagcttagatttgggaaacactggggtggatccctcttctgttgagtaggggcacttaagacaccctgctgttgtgttgttcctccagtgctagatcccagaacaaaattacttcctcccaccacctttcagatttctcctttggttgcctcttgcgttactttcagggtttacagttgaattaaacaggtgggaagaaagaggtctctgccatcttttctataccagaagtctcatacagtgtattcaataacactattaattaaaattaataatactattacaattaaaataattactttaattattattttcatctgtgtcttattttatgtgtatttttacagattacaaaatgcagtgtatagattatatgtatcgattttacagtcgttcctccatatcactggtttccacatggcaaattcaaccaactgcagatcaaaaatacttggaaaaaaacaattaaaataataaacaattaaaaataatacatataaaaaactatatattataacatctatttacgtagcatttacattgtattatgcattataagtaatatagagatgatttaaagtatacaggatgatgtgtgtagtttatactcaaatattatatgccatttcatataagggaagtgaacatctatggagtttggtatttatgggggtcctggaaccaatttactgcagataccaagaaagactctctgtatacatattatatattatatatacatagatggtgaatatttattctcagattgagatatatgagtaaaaaatgtgaaattcaatcactgtattagggtagaannnnnnn

SEQ ID NO: 11098 - DNA, 270 bp, Homo sapiens
aggtacttaagagtgtggcctgaacccagcagggccttgggtgagatctcagctcagctacttcatagtggagacaccgtgagaaagctatgtaacttctccaggcctcagcttcttcagctgaaaatggagcttaacaaaaaagcactttcctcatagggttatcatgaagagtaaagaaatcagtaagtataaagtgctagaacagtgtctggtgcctggtcattactcattaagtgttagctcattagcagttgttgtacctgcccg

SEQ ID NO: 11099 - DNA, 384 bp, Homo sapiens
gtggcggccgaggtacaaaaatgaccacagcagcatatttcctaagatccctgaaaacagctaagatccctgaaagcaactcaaatgtccatcaatagaatgatggatattattctaccccattgaaacatttcacacacaagttttgtgttttatttttatttatttatttatttatttttcatgtcaatgaattcaaaggaatcacacataggtttttgtatagaaacagcactacatttctgtaggaggtgctttttcaagatatctgtgttcactagttgtagcctgcgactagagggctctgtgtcaagcattccacttgctactgattcctaccatacccctctttgttcccagaacattgtacctcggccgctctaa

SEQ ID NO: 11100 - DNA, 430 bp, Homo sapiens
  misc_feature 1, 2, 3, 430: n = A,T,C or G
nnnagcctcaagtttctggaattctaagagggcctgaaaggtaagtgctcacttactgaggtgtgtgaacaaaaacaggcaacctagctcagcaagtaagaatggagtggcatctccccacctgctctggagtcatgtgtttgcttctggaagggaggcgagaggcattcaacctcctgttaatttggttgctccttcagatacgctcttcatggtacagccctgagctgcatcatttaaagtccaattgttaaggaccaatctgagggcctgtgcattagttaaaactccttatctggtcatagagggtggtgtggtttggacgcgttccccttccctgtgcaattcccaacagaggcaagtgcgcatttgagacaggttgagggttcaagctgtccaatccctgctcatctgcagcacaccaaggaan

SEQ ID NO: 11101 - DNA, 268 bp, Homo sapiens
aggtactgtcttttgaaagcagaaaggtagagcaatcattagggtggcacgagggcattgagagtgctatgcattgtcatttactcaataagttgtagtattaaagacggcccacgggtgtgcatcaggctgtatgggtaggaatattctagaggtttttctttcctgggcttaattccccaaccagataaaatacctgatgtttaaaattttgggtttttaaaaaaatcaccccaagaaaccttctgtttaacaagtccctatatgt

SEQ ID NO: 11102 - DNA, 1050 bp, Homo sapiens
  misc_feature 902, 903, 904, 905, 906, 907, 908, 909, 910, 911, 912: n = A,T,C or G
accaccacgcctagataactttttgtatttttaatagagacagagtttcaccacgttggccaggctggtctcaaactcctgacctcaagtgatctgcctgcctgggcctcccaaagtgctgggattacaggcataagccagcacacctggccgttaaactagttattttaatcatgctacacaaagaagacatttctccaaaggaaatatataaagggaaacactgttgaaataaatggaaagctaaaagtctcagcatagaagctataaaaagaaacaagtggaaattgtagaactgaaaatacaataacaaaatttactggaaggtctcaacacaatgaagatgactgagggaagagtcagtaaatttgaagatacatgagcagaaattatctagtctgaatgacagagaaaaaagtgaaaaaaatgagaagacctttggggatctgtgggacaatatgaaacagtctaatattcatgtcttaggagcccagaaagaacaattggaagaaaaaaatatctgaagaaataatagctaaaaacttccaaacatctggcaaaaaacaaatattcacatacatttacataacattctatttaaagccggtctgctgggcacagcaaatcccaaaaaggaaaaccacacccaggcacatcataatcaaagtgatgaaaccaactgtaaagaaaatactttgaaaacaactggaagaaaacaacactttgtatataggagaaccaaagatttcagtgatggcagatttctcatcagaaaccatggagcaacatttataaagtgcttttaaaaagcaacaaaactgtcaacacagaatcctttatccagcaaatatattctttaggaaagaaaatgaaataaagacattttcttttttttatttacnnnnnnnnnnnatgagatggagtctcactctgttgcccaggctggaatggattggtgcgatctcagctcactgcaacctccgcctcccggttcaagcagtgctcctgtctgagcctccagaggagtagctgggattacaggtgcgtggt

SEQ ID NO: 11103 - DNA, 820 bp, Homo sapiens
  misc_feature 1, 2, 3, 4: n = A,T,C or G
nnnnagacttaggaatcatcatcctcatccggtcccattttctcaacactaaacccatggcagggaaagaccatagtctctgtaaattttaatcaatgtatttgaatcaaaagattctgttcatggaggaggcaaccgtgggttgaccaaaacgtttgtatgcaaaaagaaaatgctcacaggtaaacactgggcacaaactctgatcattccactatagctacaaattatttttaattttgttaaaaacagattaagcttttaaggttaaaatggttatagaagaaaccaggaagtataacacttttccagtaagataacatctaattcacccagggcagtcagaaactttcagttgaacacaagagaagaaaattccagaagctctaaggtggttaaatttcatttccaaatccccgcggcggcggcggcgcgaagtaccaactgaaaaataagacaaccaatcccatcatggtgccaaccactctagttgtcttgggcaagtcacttatttatccatcttggctttcttgctcaaaaatgatggatagctacacctcacagtgaggattcagtcatgtaagcaaagtgccttgaagacaggaagccagacattataggagcataatttttgccctgaaatgcatttggtatgggttgggcatcagatgtttctgatttgtgaattagtctgagaatgttagacatgcaatggtttaaggattgctaggagcaaaacagaaccatgttgtgtgtttatgggtaatcagccagtttggcaaaccaccagtggctgaaacttgtacctgcccgggcggcc

SEQ ID NO: 11104 - DNA, 1465 bp, Homo sapiens
acttgtgtgggtgtcttaccttgcattagaatatcctaggcctttctaattcttcctcttgaattccctgtgtcactcatctgaggtcatctcttggatttaaatacatttggtctgaaattctcaaactgctgaataaaatgccatagtaagtccaactatatggtttcatgtagggtaaagtaaccattgtggaaggattacgataaaactgtgtgacaataaatagaataaaagatggcaaaacaatctgtaaattacaaagtgttataaaaatgcattgaatttctagtgttcttacactttcatatttctcattggcacatcaatcagaccttgccttcctaaagtgggaggaagaaaaaggctgcacctgtctgggctgagggtctgggcagaacactagcaaaacttttactaaatcttcatgtcaccaccccaaactcattagggcccaaacttatttcattatcttcactatccccatggttttcctctccattatttttcatgcccatcttcagcactttcatgtttctagtcttagaaaacccaaagttaaaaaggagagcaacttaagagtgttctataccgcttttctctccttcatctgtggccaaggctattttttctttcttctaattcttgcccatattcagttcttctctccatttccattactaaaaccttggactgaattccccttaactcatgcctggatgaccacagctagcctctctgaccactctctcttcagcctaacccaccctttatatactgccagaagaaccttccaataacagcaattgtcttcctaatgcaccatggcccatgcccactgcgtcaaattcaaattctcccaccagagggagaggcatttcaagccattcataatctggcccccttccaaagaccctacctgtcacagcccaccagcttcaggcaccaaaaatcccatcggcttgctcagccagtccctgaacctatgggagcctccatattaggattcccctcctgaccatggcggggtgcagatttggtcttgctctcttcaaagccagtgtcttgggagtaaccttccactcaaaacttaactacgcatctcatgacccacttggttctgatagatgcaggaggcagataaaggggagggtccctggagaatctctgacccacctctgcactgggagaacggggtggagccacgggaagttcgtgctgtgtgcagggaaaggagcctggcttctttagttcctgtgtggtgacctggtgttcaatctgtgcggtgggggcccattagcaggatcccctcttgctttgcagagagttttttttctttttgcccagtaaattccattcccctcacccttcaatgtgtctgtgttcctaatcattcccggtggtgtgacaaaaacctggttttagctgaaccaaggagcaaagctctacatcagttctacattgt

SEQ ID NO: 11105 - DNA, 440 bp, Homo sapiens
  misc_feature 1, 2, 3, 4, 5, 6, 7, 8, 9, 10, 11, 12, 13, 14, 15, 436, 437,438, 439, 440: n = A,T,C or G
nnnnnnnnnnnnnnnccgaggacgcgggggagtgtaaaatatttatgtggcttttctcctcgcatttgctagcatgaatgcaggggcatgaaagtctgaatagggctttcaaccatcacctggggcttagaaaatgaaaatcagagtttaggatacgtcaaaaagggccacattgtagagtggatagcaatccattcaaaagctcagcactaacaaatattaaacttcagatttaaatcaattcaattattgattcaaaaaagttaatgcgaccttatcataactcctggccaaaagaaaatatcacttcttttgggaagaatatagcatcatttagatcctcaaatgaatgctacacatggtcagacgaagtgtttaacagccaatcaaaataatcaagtatgaaaaaaaaaaaaaaaaaaaaaaaaagtacccnnnnn

SEQ ID NO: 11106 - DNA, 942 bp, Homo sapiens
accctatccagagggttctaccccatgtagaacctctcttttctgttcacctgattaggtgtagaagtagccagtcaaattcatcctcgctaccactgttatttctgccccacctctaagcattttcttctttctcattcaccacttttttaaacatgtgtaatacatcagtaactaatttataatattccactccaatccatcaacctcagtaaatttaatattcacatcatcagcccttcatatccatacattacttcaaattctttattctgtttgactccatggatttgcatcacctctccacagcagcaaggccaagacccaaacactgaaagtctctgagggctccatcttgagcctcttgagaatctctaactggaaccactgccactgccatttctttcaattccccaccacgcctgatttctactgtctcttgttcacttcatccatacctgtcacaagtccatttcaaacgctgctccacaaactaagtagatttgggagatggtaattaaaaaatacagattcctacaccttgcccatggagcttttgattcagtatatagagtgtcaagtttcaatcttggtatacccagggaattaaatttaaaaaagatgcctgagcaacatccccagaaattctgatttaacaatactgcatttgggcctggataatgatggctttaaaagtttctcagttaattctactgtgcatctaaggttgaaaacaggtgctctagggtgagatgtaggaatgaggactttaatatgctaccaaggtaactctgtggtcagtcaggcttgaaaccactgtgttaggcacctcctcactagctggaatggacttccttcacgtttagatggtcttaggataaaacacttcagggctgccctttccagcattctttctcccacccctgtacctcggccgccgcc

SEQ ID NO: 11107 - DNA, 1017 bp, Homo sapiens
  misc_feature 1012, 1013, 1014, 1015, 1016, 1017: n = A,T,C or G
accttcaggcctggggcctgtgccaatagagtattactggatataggaatagctctgacacctcaaggtcaccctagaagttgaaggatttcagggctcacatattttagactcaaacttctagaacactgttctgacccagctgagctattgaagatagttttcacggcactgctatccttgattgacctcctaggggatctgtctctcttgagaataggcctcaactctaatttccttgggcccaagaccaagagtgggcaaggggagcctagcctgcaccttgccacctggtgttggccattatcagggtgccaggagctgaagtggcacatgttagtgtctacagagtgccacgtgggtagtgctaggtcttccaggaggctcagccactgatgactttaaggcatgcaggtctccagcatggctgcaggaaaactaagagaacttgtttctagtagatctacccttaaagaatagctaaaggaacttctccaccagaaagaaaatggtaaaagcccaaagctgagattttcagagcagggagaacaggatgagtaaaaatagaagtaaacatactagactattctttatctcatgagcttctttcatcatatgaaagaaatggtgatgcagaagttataatgacatctgatggtgctggtcagtgcatgtggaagaaatacttaagataattgtattttaaaactggaggggatacagagatctaaatggaggtaaggtctctacacctcactggaagtggtaaaacattgacaccagtaagctgtgataagttacctatgtgtatggcaatacttagaacaacccctaaggaaactgtgtacaaagcagtgtactcagaaacattataagtaaatcaaaatgcaactctaagaaatgttcaaggccagttgcagtgactcatgcctgtaatcccagtgctctgggaggccaaggcaaaagcattgcttgaggccagatgtgtgaggatgtagtgagctatgatcannnnnn

SEQ ID NO: 11108 - DNA, 576 bp, Homo sapiens
acagtgacatgatcatagctcactgcagccttgaactccctgggctcaggtgatcctctcacctcagcctcctgagtagctaggactacaggcatgcaccacgacgcctggctattttttcttcttcttcttctttttttttttttttggtggagagggggctttgccatgttgcccaggctggtaggatctgtcctttttaacaaggaattagaaagggctgcttcgtatatcttcatgacacctaacaagctgttttctctctttgttccttcagaaatgcatgcagtttaatttttctttacctatacaggataactcttatcataacaaacaaacagtaaggaaaacataaatacgaaagcaaacattaccataaattcacccccaggatcacaacttggaccattttggagaccatccttctaaacatttgtctctgctcactgattatggaatagacctgggccgtccaatatggtagccagttaccataggcagctcttgagaagatgaaatgtgggtaacctgaattattttgaaaccaaaaaaaaaaaaaaaaaaaaaaaaaaaagt

SEQ ID NO: 11109 - DNA, 184 bp, Homo sapiens
aggtacacacagtcaaaagttttccgtgactgtgaaatccagtgcaatctgcttcccagcagatgaggagcctgacgtggttatgtctggatttagtccaagaacagagcaaagctttaattgtcaagagacccaggcctcattctccacttaggagagtttgctagggcaggtacctgcccgg

SEQ ID NO: 11110 - DNA, 422 bp, Homo sapiens
acccaacaatttgagtaacgtcacttggcagaaggagacatttttgagtcatgccatagatttgagccctgctccatcatttacttgctgtgggactttggacctgcatccaccctctcagaacttgtgtcttcattgtgtatcacctattttacagattgctgtgagattaaacaaggtaagatacaaaagggtcctaatacactgactgttaaaactgagcagtgacttagaataatctcttgagcagtccagggcacatattgacctcttaagtctcctttagagttataatattagcataataacactgagctttaagaaaagtctttaagccagtgattcctgtgtatataccctccagagggattccaaatccccaggaactgaatgaaagtcatggttgaatgcactcgtatgca

SEQ ID NO: 11111 - DNA, 168 bp, Homo sapiens
ccgggcaggtatatcagtaactattatgagatgttctgctgtgatcacgtggcctgcctgtcatcaggaaagggagaaaatggaggggaggactcttacattccagtcaattcacgtagcctcttgatgccaaaaattagaaaggggaagcatatcagatgtgtacct

SEQ ID NO: 11112 - DNA, 521 bp, Homo sapiens
  misc_feature 1, 2, 3, 4, 5, 6, 7, 8, 9, 10, 11, 12, 13, 14, 15, 16, 17,18, 19, 20, 21, 22, 23, 24, 25, 26, 27, 28: n = A,T,C or G
nnnnnnnnnnnnnnnnnnnnnnnnnnnngggatggagtcttgctgtcacccaggctggagtgcagtggcatgatctcggctcactgcaggcttcgccccctggggttcacgtgtgtttctaatttttaaggccctactttaatttctactgtcactaaataaaaaagaacaaaagctttttcttttaaaaaccctagacatcatgttcctgcttctgctggaaaaagagacaggatatcaccatctcaaaccagcacctttcagcaactgaagcctttttgtcctcaccctgagtgttaagacaatggctccctcacacatcacaggccctggaagtgctacaacagctgaatgggttttcatgggacataaatcactttcccactacctgccacctacaaacctacttctcatgaaccttggatcctgcacaatatggctcgtcatatcctttgtgactgctatgaacaaggggactatttgcatgagtagatagagggcatttttccttttgcccgcgt

SEQ ID NO: 11113 - DNA, 385 bp, Homo sapiens
  misc_feature 382, 383, 384, 385: n = A,T,C or G
acctatagcacaagctgatgatagctggcaactgaacatttggcttcaatgtcagagtaatagagtgtggcaaactgcagagctcatgctccgcctaaaaggggcagctgctgctcagctcctgccaattaccaccatgcaggaatttggcctagtgtgctcagctcctcctgtttttaccagaagctaggaatctgggtttttatgtgaaatggcctaatttttaaatgttagcatccactctgaaaaaaaaacaaaacaccgtgtgggccaaataaaacatttgctggccaaatgcagcctgatttgctctgttttcaacccctggcacagaattttgttcatttctctcttgtggtaccctggccgctctagaactagnnnn

SEQ ID NO: 11114 - DNA, 830 bp, Homo sapiens
acagtcaacatgcatgatgtgtaactccatctccataggctagaggcatcctaagtgctgcagaccagacctggacaataaatgtcaagagtcaccaccaccccgaaaagaactagaagtctgtagatctgctgaggagcccagtcattaaaatacaggatggggttcacagagactcaaggtctgcctctgaagcttttcttggtaggatctgaaaacccagaagatgctttaaatcctcaccctagtgaacagatgcaggttccctggtccttggcctgactgcagtcagagagcccaggagttagctggttttctccctccatttttggtgtgaaaagagccactgccacagcagccatggacttaggatgctagagtgcatggtctggatgcaaaacttttgccctgaaatgtggcatcaacacaaatacagagtccagatttttcatcttcctctggtgatgactcaccattagtgtccatacatgtaggtgcttatgaaataaccctcagccaggacagctcactcttctggaactgtaggaagtgttcttataccttttttttcagattaaactgattaataccttacagtgttcaaatatttggctaatctcagcgtttttctaatttggagcctgaacaaagctaaaattgagctactattggaaacaatctagaagaagaaaagacatttaataagatataggttatattggagggaaaaactgtcaagagaataggttcatgaattagcaacacctcagggtaaaaacttttgcattggtttaatttcaaaataagcacatgtgagaattgtgctgggt

SEQ ID NO: 11115 - DNA, 745 bp, Homo sapiens
  misc_feature 1: n = A,T,C or G
natagggtcgaattgggagctccaccgcggtggcggcgctcgacaccctgtcgatgggcatgtcggccgacttgcgcgccgccgtgctggaaggcgccaccattgtgcgcgtgggcagtgccatcttcggttcccgtaattactctcactgattgaatgaaagaatcaccatgacgacagaattgaacatcgccttcgtgggcggaggcaatatggccgccgccctgatcgccggcctggcaggcaaattgaccctgggcggcaatatccacgtgatcgacccccatgcgccggcgctggaaaaattgcaggcgcagttcggcgtcacgacggcgactgccgccggtgaagcgctgcggggcgtggacgtgatcgtgctggccgtgaaaccgcaaagcatgcgcgaagtggcggcgcaattgctgcccttcctcgatggagaacgggcgccattgatcctgtcgatcgcggccggcatccgcgcgcaagacctgtcgcgatggctcggtgactaccgcgccatcgtgcgctgcatgccgaatacaccagccctgatcggcatgggcatcacgggcatggtggccagcagcggcgtgagcgaggaacagaaaaagacggcggacgccatcctgcgcgccgtcggccagaccgtctggctcgacgacgaggcgaagatcgaccccgtcactgctgtgtcgggcagcggccccgcctacgtgttttacttcatcgaagcgatgcagca

SEQ ID NO: 11116 - DNA, 2054 bp, Homo sapiens
  misc_feature 1, 2046, 2047, 2048, 2049, 2050, 2051, 2052, 2053, 2054: n = A,T,C or G
ncgacttcctgcgtccccggacgccgtatgtggaaaggcgaaccctgagtggaggatgttcccgctgcctaaagaatgattgactgtgactgcacttttgtgagattataaatataccacggagggtaacgaagctacagaagaatggaagaagacagcctggaagactcaaaccttcctccaaaagtttggcattctgagatgacggtgtcagtgacaggcgaaccacctagtgccgtcgaagaagaaggaatacctaaagaaacagacatagaaatcatcccagaaatcccggaaactctagagccactgtcccttccagatgtgctgaggatctcggcagttctggaggacaccacagaccagctctctattctgaactacatcatgcccgttcagtacgatgggagacagagcatctgcgtgaaaagcagagaaatgaatctagaaggaacgaatctagacaaacttccaatgggcctcaacatcacaaaaatacccagtccgttaataactgaggaaggacccaacttgccagaaatcagacacagaggccggttcgctgtggagtttaacaaaatgcaggatcttgtcttcaaaaaacctacaaggcagaccatcatgactacggagacactgaagaaaattcagattgataggcagtttttcagcgatgtgattgcagataccattaaggagttgcaagattcggccacttacaacagtctcctgcaagctttgagcaaagagagggaaaacaaaatgcatttctatgacatcattgccagggaggaaaaaggaagaaaacagataatatcacttcaaaaacagctaattaatgtcaaaaaggaatggcaatttgaagtccagagtcagaatgagtatattgctaacctcaaggaccaactgcaagagatgaaggcaaaatccaacttggagaatcgctacatgaaaaccaataccgagctgcagattgcccagacccagaaaaagtgtaacagaacagaggaactcttggtggaagtcttacagaaactcaggatgaaaaccgaagaagaggcccggactcatacagagattgaaatgttccttagaaaggagcagcagaaacttgaggagaggctggagttctggatggagaaatacgataaggacacagaaatgaaacagaatgaactaaatgctctcaaagccacaaaggccagtgacttagcacaccttcaagacctggcaaagatgataagagagtatgaacaggtcatcattgaagatcgtatagaaaaggagaggagcaagaagaaggtaaaacaggatctcttggaattaaagagcgttataaagctccaggcctggtggcgaggcactatgatacggagagaaattggtggtttcaagatgcctaaagacaaagttgatagcaaggattcaaaaggcaaaggtaaaggcaaggataagaggagaggcaagaagaagtgaccaagttctcttttgtgttttctgctggtattctggaggtgggaaggacttggagagagttaagaaacacctggtacctcaaagatgactcatctacaggttgtttcctattgagactttcccagggaagcctgatttcactttgcctgttaatttcactctgcctgttaggtgggttttcaaaccctgatttaggattacaccattgacttagggcttcctcataccttgctgggaagaagtttctagtagtcctgtgaagattcattcttcttgctctttctcagcagaacaaaggagttcactggcttagctacagtgacgcattgaaacttgagtaattcctgtaatgtcagattttgattttacccaatttgtctgtagtgaaaaaactcttatgagcaaaagtattcagtaggaattacaatatgatgttattagctgtccagcataatatatacacagcaaagttttaataaatgttggttcctgcctgccttttaaaaaaaaaaaaaaaaaaaaaaaaccaaaaaaaaaaaacaacagcaattaacaaaccacatacatacnnnnnnnnn

SEQ ID NO: 11117 - DNA, 795 bp, Homo sapiens
acaccaacaacagccaagctcagagccaaatcaggaaggcaataccattcacaactgccacaaaaagaataaaatacttaggaacacagccagccagagaggtgaaagacccctgcaatgagaatgcaaagcactcttcaaagaaatcagagatgacacaaacaaatggaaaaaaagtccatcctcatggagaagaagatttagaggctactgattaggagtttcagtggaaagtggggtctgaagccaaattgcagaagtctgaggtgtatgcatgcagtaagtaaagagacagcagataatgaatcttctttagaacacagagcaattgttttccatttttttttttttcatggaagggaaagcaagtgtctaatatatcatgacagccccatgttgttctctaaacactactatgcatcctgaattttctttgaattttgcactccacttattttacgtttgggagatactaaatattgtgtatcctggttttgcaaactgagaaaagacttgagtgcaggcagaaaggtcagggaagaaagaaaaggtgttaggagggcatggttgagctgggttgccactatgggcaactggagctgggtctcactgagagctttggaggaacccagcagaacacacttctgaggatcatcccttggaagggctggaaggtgggaaatgtatgctgacgttcagtgggtgctgactcctgcctccaaggaccaagagttgctcctaagggcattaactcccctggcacctccacaatggctaactgctggctgagaaggt

SEQ ID NO: 11118 - DNA, 383 bp, Homo sapiens
tccaccgcggtggcgagcggccgcccgggcaggtacacacactctctccccatatctcatggctctgtgcataaatggagtgggcacaggggtggggcatgtgccctgatggctctttgcaagactgtcactgttctgtcttgggaggtataaggtgaacaggaccttagaaatgctgggagcaagctctagtaacaaaggctctttgtggtcaggacaacagagggtctattgccatcttctcagaacgcaggagctcccgccaacaggtggggaagaaagaggagctgatgtcagcggtgctaagctgtcatcccagggcaaatgtgaggctgaacatggtgaagtctacagcgaaccacccgggctagctgccctatggt

SEQ ID NO: 11119 - DNA, 285 bp, Homo sapiens
  misc_feature 1: n = A,T,C or G
nactcactataggggcgaattgggagctccaccgcggtggcgagcggccgcccgggcaggtacagtggcaaagtttctacgggcaaccgtccatgtttgcccagctgaaaacataactgcttctccctcagcctcaccacccttccccttggggaagaccaacaccccaatattgcctctagaagactcagccggccaaatcctacttcccacctccatcccagaacccttagctcccgctaaaagctacaacccaccgaagcgggcagatcacctgaggtacct

SEQ ID NO: 11120 - DNA, 643 bp, Homo sapiens
  misc_feature 1, 2, 3, 4, 643: n = A,T,C or G
nnnnccgaggtacaaagaaacagcttcaatccttttggggaatggcagggttttgcagaatatgtgttccaaatttggggtcatagcaaaacccctttataaagcaacaagggggccagaaaatgagtcaatggagtgggccctagaaatgaggggaaactttgccaagttaaaacaggctcttaacaaagctcccactcttggcatcccaaacttcattaagcatttttccttgtatatagcaggaaaaaaagggcataactgtgggaatactaacccagaaattgggatcagaacccataccaaccatctacttttcaaagaaattgaacagagtagcctcacagtgaccaagctgcctgcaggcaatagcagccactgttattttagtggaagaagccactaaaatcaccctgggtcaaccactgaaagtgttaactccacatcaggtaaggtcagtcctgggaataaaaggacatatctgaacgatgggagaaaggttaaccaaataacaggctatattcctagataatccagaggttacccttaaaacctgtaacaccctgaatccagcttcattgctgcccacaggcccagtgactgatcactcctgcaggcaggtcatcacatacacatatgtcan

SEQ ID NO: 11121 - DNA, 1512 bp, Homo sapiens
  misc_feature 1510, 1511, 1512: n = A,T,C or G
acgcgggattgctatgttggatgatttggagcatgcagaggcagatacagtagtagaatcagctttctgcctccatcttttactccgctccctgtcgctctttaactcagcagtttttctctctcagtctcccaacttgtgtgagtgttttatattctacataaattgagggtggagggcaacttctggttgtgttgaatgaggagattggcagaattgacaaaagcaaaatgaaacaatctcagcattctggaaaaattgagcaggggcatacaacaatctgagaagtatttatgcctgtaactgctgaatttcaggtgagaacagtgagactgtatggcatttggcctggagctattcctatgccctctcccatctgtttggtaaagaggttctgtccagccactgtcagctgtgaggaccaacagcttcgctgtgtgggtgaaaaggaggactgttcattttagagtggtagcaaccctgcctgtggtcttgtagatgagagtgacagtcttggagatgggcaagtggggagacacagcggctctgttttagcccaaggttggggcaagatagaaaaactatttgaagaaataatgggcaaaaacatacttgaggagaaactcatccaggaatcccaacaaaccctaaatagcataagtacaaagagatcttgacctagatacatcatagtcaaactgtagaaagccaaagaaaagaagaaaatcttgaaagtagcaaaagaaaaacaactcagcacatctggggagcattaataagatgaacagctgacttctgactcgagacaatggaaacaaaaaggagttgaatgatgttaaaagtatccaaagaagaaaactgccaacccagaattctataccagtaaaaacagtccttcaaaaatgaaagcaaaaaagacattgtcaggtaaacaagactgaaggaatccattgctggtagacctgccagttcttcagcctgaaaataaatgacacgttggcagcttgagtctatgagaagaaataaagaacactggaaatggtaaatgcatgggttaactggaaagacctaactagttctgcagtctggaagccaacaaaggtttgaatgatttgtgggtttataatatccacagataaaatatatgtcatattagtaccacaagatggggattaaatggagcatattggagcaaaattctggtcttactgggatcagttagatcaggttatatagatgtgataggaggtagtatgcgataagaggtctgaacaaagaacttaaatggtgtttaaaaattgggggccagggtcccaagggcggtatgggtggcacgggttcgggaaattttgatttaatgggaggatgaggagcaaggcgaaatgacaaaagaggggaaagggaaatcacggggtgaaaagactacaagaggagaaaggagcgggaaaatagaataataggaagtattagagaagaactgtggtaagaggagatagtgatgagtattagnnn

SEQ ID NO: 11122 - DNA, 686 bp, Homo sapiens
  misc_feature 1, 25: n = A,T,C or G
nactcactataggggccgaattggnagctccaccgcggtggccggccgcccgggcaggtactggtttgacaaccacctgtttccagctccacaagctagcatgtaattcccttggtgagagtaattcgttcaaggatgaactatacaactcaattttcatagagttgttggaattaactggcaaaaggctatctttgcaataacacttgttgctgtaagaatgatgtaagcctggaactgctggaggtcaccatattgggtaaatgtgcctggcaataaagtagaaaagaggacctgagaccagctgaatttgggccaccattgagcaacatttgaaaccaggtcaactcacagatttttctcaattatttgaggaaataagttaactttttagccaaagctattttggattgctgccccttgcaatataaagagtcctgaagaatgcactaatttttacatgttattgtcaaccacttttcaacaaaacacccccaaatcaatccatgtgattctagctacaaaggttttgttcacacttcttttctcaatagaacaacctaggttgtgaggctcagctcaattctgttactaaaacaccttctgatcatgctttggtccaaatagaaccagctctcacaaacctaggctttatctctttatttaagaaacaaacccactccagt

SEQ ID NO: 11123 - DNA, 1489 bp, Homo sapiens
acacctgcattagggacaagaaatctctatgttgaacaaatactgcaggtggtgctgatgctaaacttttacaaacattggttatacaattaatcaacagttatttgatgattcagcacacaaataactctttgcaaccaggtttacgttactgggaacaaactaactaggtttccccaggtgtggagagctttcacacaatataccctaacttacataaacaaaattacccaggtaaatatttactaaacagttttaacataaatgatagtgatacacaaatttgagtaataattcaagaaaataagtgcacaattaggctgttaactgctgtttatctgtttaatgtgaaatacccactagcttccctccaccctttaccctaactcccataaaatcctccaaccaagccaccaacatatacccaccatacttgccactctgtcctcaaactcctgtttgggcatttgctcctggttcttgaaacttcattctgacaaagctgaataaaattacctccttagaaaacagtctgttcatgattaaataactaataaatagttgagccagaatctgaacgcaagcctatcaaaagcctgagtgaattgaggcagttcaactggatcttgttctgtcacagttataaatccatacactttttctatggtaggcagaaagcttaatttttgcttgtctccagaattctattgaagagatatgaatggactctgtaaaaattctggacatagagaagttcagcaaaaggcattgtcagccttcagcatcactttgattattttcccaattccttggtctttaaggactttatctaaggacatcactgccagtggcttccaccaccaaggcctaaaggcaaaggaagccaaagtgtcttatatagctagaggtaataaaaagcacaagttcgtctgagtgtttcaattacctaatgctgtaaaataaattactcaaaaaactttgtgacttacatcaaaatcagtttactatttctcacagtgtctgtgagtcaagaaattggactgagcttagctatgtggttttggattgaggttcatcaaactattgcagtcagatgagatggtgagtggagctggaatagtgtgtggtatcggctgggagctcaccaaccatctctctctctcatcataagatctcttgcatacactaatttgggattcttcatagcatggcggactcagggctgtttgactgcttacatagtagctggctttcctgtaagtgagtgtcccaagagagtcaggcagaagacacattatcttttattatctgacctcacagagtatcactcctaccatttctactgattgatgggaagagtgtcaaaacctttatgaacatgattttaaaacacaacattcagccacttacaaaatatcttctgtttatgagctattctgagtgtccatagcaggaaagggaaaggacaaaaatacacggcatgtgatgt

SEQ ID NO: 11124 - DNA, 408 bp, Homo sapiens
  misc_feature 1, 2: n = A,T,C or G
nngatcttgaatatgctgtggctttattgtttcttctgagttaggacagcccaacagaaaaataatggttttacggggtccctgaaaagttttactggttaaatgcatgtcttttaatctacttccttacagtgggatgtgtgcagatgttgagctcttctttgcggtcagtacttctgtcgtcagatgcaggtggttatgaacttggatgcagtcagtagccagagacttggccatctacactcttcagcatgggtccccctgaccctaaaaatcatacagtccctgggccaaaatggcctcatccaatccaatgtcctgtccagggcttgatctcttctattgcagttctaatggttgtccagcatcttcttgagcgtcaacatcacttgtggatcctggacgcgt

SEQ ID NO: 11125 - DNA, 569 bp, Homo sapiens
  misc_feature 1, 568, 569: n = A,T,C or G
nattcaaagatacagacacataaaaaagcaaacacataaacatagggaaaaaacacctgcaactaaaatggaggaaattaacacaaagcacaaaagataaatgaggaacatcccttggaagctttgcactgggaaactacaaatacttttctcgctctcaaggaaattaaagcaaaccgggagcctgtgaaataagaaatgtaaaatgagatgaaaagataaggtgaaacagcagcctgggcaacagagcaagtctctgtcttgcagcagggggaaggacctgtggtactcctacaaacttaacaactttagcttttcggggaacagtggtggtctccacagatagctagaatcttctaagatgaaaataaactgtttcatccagctgctttctgcctgttaacctttgccacttccattccttcaagtgtgtaatccccagggttgtcttgtattacacacatccttgttaagtaaatataccactgttgatttcttcttccagtgcaacatttggattaaataaaaatctttagtttccaaagcaaaaaacacagaatgaaatggnn

SEQ ID NO: 11126 - DNA, 706 bp, Homo sapiens
acctcagttggaaatgcagaaatcacctgcctactgcattgatctcgctgggagctgcagaccggagctgttcctattcagccatcttgccagcaggtatttctttatagcaacacaagaacagcctaatacaatttccagtatcaacgggctgttacaagttccccctaccccttcccagtgggatggagacagtggagtgtctaaactttcaacatcgtccagaagtaaagaggccactcgctccctcttccctctggtgtcaatggaggccatgtggagaacagtaatgagacactcctattctttccaactaggatgggatcagtagaggcctagtggggagccaaaactcctagtcccaccatgcagtaacaaggaggcccccatccctggtgccagtaaaggctgagtgggaacctagacttctacctccagttggtagtaacaggggaagtgcctccctgcgctgcctcttttagagcagcgtcagagaaagccagctaaaacagaaagtcaaagtaatatccagactctcataatatccaaaatgtccaggttttaatagaaaatcactcattatgccaagatccagaaacatctcaatttgaaagaaaaaaaagacaattaatagatgccaaagtcaagatgacagagatgttggaattatctaacaaagattttacagcagttcctctaccaaagt

SEQ ID NO: 11127 - DNA, 295 bp, Homo sapiens
acgcgcaccggcgtgagctggcagtggcaacgcaggcggcggtggccgctgcgctgccgctggaacagcttagttcttgacgtgcagccagcgcgcgtgcgcggcgcgggccaggtagtctaggatgaaaccgagtatgccgatcagcacgatggcggccatcagttccgaatacgcgaggcggtcgcgcgtgtcgaggatgaagtagccgaggccggccgagacgcccagcatttccgccggtaccagcacgatccagatgatgccgatggccaggcgcacgcccgtcagaata

SEQ ID NO: 11128 - DNA, 925 bp, Homo sapiens
  misc_feature 915, 916, 917, 918, 919, 920, 921, 922, 923, 924, 925: n = A,T,C or G
acgcgggagctgtttctcagaggaagcaatggaggcttgctgggataaaggcatttactgagaggctgttacctagtgagagtgatgaattaattaaaatagtcgaatccctttctgactgtctctgaaagcttccgcttttatctttgaagagcagaattgtcactccaaggacatttattaataaaaagaacaactgtccagtgccaatgaaggcaaagtcataggtctcccaagtcttaccccattcctgtgaaatatcaagttcttggcttttctctgtcatgtagcctcaactttctctgaccgggtgcatttctttctctggtttctaaattgccagtggcaaatttggatcacttacttaatatctgttaaattttgtgacccaacaaagtcttttagcactgtggtgtcaaaaagaaaaacacctcccaggcatatacattttatagattcctggagaatgttgctctccagctccatccccacccaatgaaatatgatccagagagtcttgcaaagagacaagcctcattttccacaattagctctaaagtgcctccaggaaatgattttctcagctcatctctctgtattccctgttttggatcacagggcaatctgtttaaatgactaattacagaaatcattaaaggcaccaagcaaatgtcatctctgaatacacacatcccaagctttacaaatcctgcctggcttgacagtgatgaggccacttaacagtccagcgcaggcggatgttaaaaaaaataaaaaggtgaccatctgcggtttagttttttaactttctgatttcacacttaacgtctgtcattctgttactgggcacctgtttaaattctattttaaaatgttaatgtgtgttgtttaaaataaaatcaagaaagagaaaannnnnnnnnnn

SEQ ID NO: 11129 - DNA, 1318 bp, Homo sapiens
cggccgcccgggcaggttccatgcttttcctgtagttgaaaatctaccatcaaacatgctactacctaatgacgaattcagagaaggtaaagaaagtatgtaaacctttccctcactggtggcccttattagcttaaaaatgtagtcttcatataatatagcaagacatttatgcaagtctaacatttttagactaaagaaaaaagtgtaattactatattaatagaaagacttaattatctttctattccagccactgaagttattatgacagaattgttatacaaaggtaacataataacatgtagccaaaatatataggagaagatattatagaaatatattggacaattagttaataaatgttatttttcaaatgttatgacatttgtgacattggtcagctttttatatttttaattatactttttggcattctaaaagacagatttataatcttttttgtgtttataatcagcattctttttcttaaagacaactccccaaactgcttcagaatcacaaaatcttgatttgccccaattgagactgaagttcccaacaagactttagtttcttatcacatcaaatatatattagatgataaccctgctgtcttataccacctggcaactaggaagtaagagacaaaattagttgaaggaagtcattcatatattcattcatcaagtaaatatgtaaggcttctggatgccaggtgccatgtaaagctatgaggatacaacagtgagctcagatgcggcccctgccttcgggaagcttatagttccacagggcagagagataacaatcagataatccccagttacaaactgctgtcgatgccacgaagaaatattatgaagatgaccacaaagtaaaatacaaaaataggctgactttccgtgaaggaatgaatggggggatgtcccaagacagggtgtctctatcagagtaggaggagatgtctggagaaacaagcagagagatgaaggccagcagctctgcccacacccccaggcagaagagattggggcatgcacagcatagcctccaccctgctgaactgcagcactgagcagacctggggaagaaacagcatcgtgctgggagccacagctcagccaggcccatggcaccatcctgcagggcaggcaccagctgctcccgagcagcagcaactggcaattctagcaagacactgttgtcacctgatgattcagagttgtgaggacagccagactgggatagaatcctggttctgccacattccaactgtctttctcttcgtgatttgcaaaaaaaaaaaaaaaaaagt

SEQ ID NO: 11130 - DNA, 876 bp, Homo sapiens
  misc_feature 1, 2, 876: n = A,T,C or G
nnagcggccgcccgggcaggtacatacagcttcatatctgctaatggagaaaataacttaaacttggccctgccaggcaacccattttcttccagtttaaaacttagtctttttcaggttagctaggccaattccaggtgctcgtcctaccttctttctcccatttctacaccacccttcttttttgtctctccctgggagatatctgagcttaaggaaaaattcgttaagagtggggatcggagagacctctgttccactagttgccttctggacattttctggtctccactgttgatgtatccatcccttctggcctttgggtgcactgaggcatcttgctattgtctatggttatgccatagctcctagtcaaaaggctcacattcttttttattattatttttttttgacagagtctcgctctgtcacctaggctagagtgcagtggcgtgatctcagcttactgcaacctccgcctccagggttcaagtgaccccagcctcccaagtagctgggattacaggtgcccgccactgtgcccagctaatttttagaaacggggttttaccatcttagctaggctagtctcgaactcttgaccttgtgatccaccagcctcggcctcccaaagtggtaggattacaggcgtaagccactgcgcccggtcaaggcccatgttcttaatactttcctagtctcactcccatgtgtcttcggatctgctttatcacatttacatgcccttggcaaataggaacttatgaatgtttcccattcacatgtatgctgtagggaactagaatcaagggttatcttgagcccattctttctgcttaaatacgttgcatacatacaggtgttctttgagatggn

SEQ ID NO: 11131 - DNA, 341 bp, Homo sapiens
  misc_feature 1: n = A,T,C or G
nggtacccttaaagagccttttcagagatttcgtttttcctaattgcaaccccacacaatccataacatttgaacgctggtgatgtgctctgtagcagtgctgtgtgttgtggacccctggaagcctacgcaccattgagtatttgatattttttttgccccatcctcaaggagcagttgttgctccttaggggtaagtcgcccctgctgagaatgcatgctctcgataatgctgcttcacattggtcattgtggaatatttttataaaagagaggatccatttccagcttcttttctgcaggaagagaacctgtggttatgtcttactcccccattttgt

SEQ ID NO: 11132 - DNA, 913 bp, Homo sapiens
  misc_feature 913: n = A,T,C or G
actttgtccagccctggtcatcaggaatctgaattaggactagagcatcaaagccttaaggtaataaagcaaagcatttgaacaaccttgtcctctgaccattaacttcgtttgaggacctctgcagaagtggaagtcccaggacagggtcaggtgttgggatcccgtgttcctcttgtttgttctctttctctcattctcacacacccctacgatatccgtcaatacaacttcagaaagaagcctctgaatgcaccaccaaaatataaacctggtgtcactattagaaacaggaaaagaagacaactctggtttgggatcagaagtgaaagaaatgataaaaagtaaaactcagttctgcaacaagattatcttgaggtgctggcatcacagccaagtgaaaatgtgctgctagaacttggaaaacgttactctaaggcatttaatgacttataggaaatcaagcccaagagaagggatagaaataagaacacagaaggaaaaaggtagggaaggaaagagaagcagcacaggaaagactggtgagttgcagttgcgcgttagcctctcaatcagttaatgggagtcctgtagtatttgcattttggggcagaaaaatcaagaagctgaggggaaatgtcacagtgggcaagcactgctgtgccagcaaggcggtcactttgtcatttggctgtttacagcactaagtcaagaaaaacaggcttacctttcactgactacagggtaaaaaataaggtcaccctagaaaaaaataaataaatggatataattcctggaaatatgtatattaatctaggtcctctgaggaaataatatatgtaagcatctagcccaatgtctgggctaggtgcccagtggtgtagtggggtaagactatgcatgtgcacacgtn

SEQ ID NO: 11133 - DNA, 529 bp, Homo sapiens
  misc_feature 475, 485, 527, 528, 529: n = A,T,C or G
acctgggacaccaggcagtagccctggagtaagatcaagtgggagacacatattcctcccctaatgggactgcagtgtgcattctgcctgtcaatccattcctagcatttgtgggcaaagacccaacatccccctttaaacacagattccagggtcaggctggaaggctcagaactaggaagtcacgcttaaaacctttaagttggcctctaaatcaacaaaaattcacaaacaaccttattttaccactctacagtaaaaaacaaacaaaccctgtatagtttgaaaaataataaatataatgcattcatatcgattaatattaacaggccaggaacagtagctcacgcctgtaatcccagcactttgggatgctgaggtgggaggatctcttgagcctaggaattctaggtttccgtgaactatgattgcaccactgcactccagccggggtgacagagggagaccctgtctntaatcacaancaccaacaacaatattagcattttgatggaaatactactgannn

SEQ ID NO: 11134 - DNA, 853 bp, Homo sapiens
  misc_feature 850, 851, 852, 853: n = A,T,C or G
acacttccccctcctcctcccccgaccatgcctgaattcagacctctagcccttggatctgttatctgacccaagaagtcttgtcaattttagaaggctatcaccttttaacagccatttctgctgcttcctgcacactttctaatttctcctctgctttccctggaaatctgatgcttgacttggacacaattcaaccctgtctccttatagagacagctgctgaatgaatgctagaaatttaaattctgcttttagcttagggttctctgccttctttaaaaaagtatttctagaaaacatatacaatatatgctgctgcagattcaccttttttttttgctttaatcctttgacttgcagtagaaaattgcttttaagtaagaagtttccaaaatagttacacttaaaaataatgctccttttatacatttgttgtggaaaggcactaaaaaatgcaaaatcgtgaggacaaaaacttcctttgatttaaacctattggtgactcaaacaacttgcctgaaaggaatttactttctttaaagcaaatcttatgcaatataatgtcccttgacaaattaggggacattaaatatcagtgagggtcctgctcatttttggttcttcctagtgcacgtgctgagtgttcagcacactatattttattgaattctccaagctactatccatggtcctatttatagaggaggaggaagcgggggctctgaggtgggatcaacatgctcatggtcacccagcaagtaagaggggacccattcccagcgaggctgagcattcccaggacagctgccaacgccatcctgtaactggaaagttctgatgtacctcnnnn

SEQ ID NO: 11135 - DNA, 881 bp, Homo sapiens
  misc_feature 853, 854, 855, 856, 857, 858, 859, 860, 861, 862, 863, 864,865, 866, 867, 868, 869, 870, 871, 872, 873, 874, 875, 876,877, 878, 879, 880, 881: n = A,T,C or G
acatgcaggagaagtcattctcaggaaaaggtgagtgtgggaccaggcagggaagccagtttctgtcctttatttggaactataatcaaggcagacaaccacagtaaagagatgcagaggcagggagtagtgtaaaaccaccttacacacagcttcctggctttcccttcactttaggttgtagctcaagttattcttgggctaaaaaataagctctgttggcccaattaaaccagaattaatcaccaattccccatctttatctggtaattttagttcaacattgctcagctgatggctcattaagccaagaactctcccaggtctcagttaccattttcagacaagacacctcctggggtgcctgccctgtggtctgaagctcaagatgtggctctgggtctcccttcctgagggctagctacccagaagggctggtgtgacttcctcttgaatgggtgagctgaaggcatccagggcacctagggcaactagtgcataaatacttgaaggggaaaggactctcatgttctgatttgagtatcatttccttgggttgaataattagagcctggcatgtgagatgtggagggcttcaaagaccatttgattttcaacagaaaacggtctatggttttctaaaacgacacaccctgattcagcccaagggaaacagaatgtctgtgggtgaggccaggaatctgcattttaagtaagtcctccaaatgactccagtgcccaagcagagttgaagtccactgatgtaggtggcccaactttctagttttatacatgaggctacgcaagtccagcaaggttcatttcagttgagaagaaaaaccattgattaaannnnnnnnnnnnnnnnnnnnnnnnnnnnn

SEQ ID NO: 11136 - DNA, 295 bp, Homo sapiens
  misc_feature 1, 2, 3, 4, 5, 6, 7, 8, 9, 10, 11, 12, 13, 14: n = A,T,C or G
nnnnnnnnnnnnnnccgagggcttgtggtttttttttttttaaaaaaccaattgagacagagtcttgctctgtcacccaggctggagtgcagtggcatgatgaatgagtgaatgacttgagtcagtgaacgtgaaaatgtttggtagattgtaatacgccgatattgtgtaatacgtaaaatactattaggaactacagcaatgtcttatattcccagctaggccatgcacaggaggcagtgtgccacagcacactgaaaaggtggccagccctcactcagagcctgccttcacc

SEQ ID NO: 11137 - DNA, 581 bp, Homo sapiens
actcaataaaataagagatactatagtaaaactcttacaggaaaaattattagaatttgtgctataccaaatcaatttcacaaaaatgaactgcctgtccactgtttttccacaaaaaatccaggccatctacaccttgctggaaggatggaacctcaactgctatactccttagattgctatacagcaatctaagtggccccatcacagctcctctccttgaacatttgttgagatcaagttgcagctgggccaggcacaatcggtcacagttagacagctgagggcattccaaagagtagtgttccttcctccacattatctgccaaagtagtcatctaccttcaggcagagctaacccaaggcctgtccctgaaaaaactgcctgagacttggcttctttgcactacagtcttagatcactggaaagtcagatcacctgaaaattcaagtgagatcaggtcacagggctattcccgcctggaggatattcccacccccaggcctttctacccaaatctagagagctagagccctcagctgtcagcaggctcatgtttctggactaaaaagttttgagt

SEQ ID NO: 11138 - DNA, 425 bp, Homo sapiens
caagactgtaatgagctatgattgcaccactgcactccagcctaggcgacagagctagattccatttcaaaaaaaaaaggtggtgatggtggggcccggcatggtggtttacacctgtaatcccagcactttgggagtgctgaggtgggagaattgcttgatcccaggagttcgagaccagcctgggcaacattgaaagaccccgtctcttaaaaaaaaaaaaaaagagaggtaatggtggctccctttctctcatcaacacactctgggggatgaaaaggatgataatgtctatgtgtgtgatagattgtagaacgactgccactgtgttgagcgaagaaaaggagtatgtctgctgaacagattagcttctggtctccaatcagtatgtgtggtggcgtagggggactgcatgactttaactt

SEQ ID NO: 11139 - DNA, 929 bp, Homo sapiens
  misc_feature 1: n = A,T,C or G
ncgaccacgcgtccgaaagccgaaaggcggcttgatgccagactgtaaaggctctcagttccttgctgaagtatggagccagattcatgagtcaggccaggttgatggttggggaacagtgagcccccaggctggatagggaaggaatccctgggctgggtatagaggttcttgatgtccagatctggagttttactggaaggataggaacaggagccagttgtcaggataaagaggcaatagacaacgggtattgagaccacaagtgtagattattcattgtagaagcttaactggagaataactgaagggatcaaagaaagggactcttctagaaatagacctttgggttttgaaagcaagaagaaaggaaatagtgtaaggaattataaatggcatagaattggagggggaaatcatttaaaaaatgtgtttgaattgaaggccctttgggaatggggaagtgataactctaggggagttgaaagactttgttttagagtagaggaactatgaggcagtgtacttgatcgaacacctctgatagtccgagtatggttacctcaataagtaaccattcctcttgctccaagcctgatgggaaggtaaacataagaatagaaatttcttgagctgaagtgaagtgaaggaactccctcccgaaaaccatggcatgtcacgaggaacgtttattgtaggttaggcggtctggtgcctctaggggggacaatcaaatgatacaggacctcgaagagtcttactttggatttctgtggctttataatgtagtatattatgtagttcattgctgtggctttatgcttttttattatttacaagtgatttactgatttgtgagctcttgaaactgtgtcattgcatgttatgtttaccctgatagttgcatttgcttataattctttttgctt

SEQ ID NO: 11140 - DNA, 2078 bp, Homo sapiens
acctccatcattctgcatttttttagtagttgcctagatttggaagtagtaatgtcaggcttttgtttggtaatatcagactatgattttgcaactgactggggcttcccaaaacacttttattctagcattatagaaaatgaagaattaagcaggtctcattagtctcaactgacctcttcattagatctctgaaaagcaccatgaagaaaatgtttttaattatcatttcaattctttgtttctaaaataaactccaccattaaaactcagtagaacttgttcttcaatgtttacaatttacagtaatacactataataatgaatttctttaaaatttgtgattttcaaaatttgaaatattgaacctttgtgtaatgagaggtttttatagatgaaaattaaatgatcagctatcttcctaatgccttttctggaaataacaaatatgttagtgttataaagacaatacttagtcagtgtaggcctttttaaaagttgtagtagtttacctttattaatatatttcatacttaaaattttgtctatttataattttataattgatcattgagatttttaaaaattgaagaaagtttgttagcttatgtgatattaagattataaataagccgcatttttatttatcaggaatgtagattcttgatacactatccaatgaactacaacttttcctagcatattaataaagaacaatacattttatcatggtcgatattcagatcagctctgaatatataaaattaaagtatatttcctgttaattccatgataccaaatatgaagtcatattaaatacagcatatcactttcaaaatcttattaaatgctatgacagggacagagtaaatctcactgtccctttgaaattaataatattcttttggttaattactaagaaaataatgaaattgtaattcttatattggaaaaagtaatacatagtgtctcttttataagatggaaaataagtaaatagatgaaatgtgaaaatacatagtctattataaacctttttcagtttaaataactagttccttaaaatctaaaaacttttgaaatataagcatcataagtatcatattatgatctccctctaaacgtttatactgaatagagaaggtctgttgtgaatctaaccaaccaaaattttaaacttattataagtctggcagattaaaagaaacattatcaattccttatttcttagcttttaatcatatgactctggtttgttgttgtcggtgttttgttttgtttgtgtgtttccaccctcagtcctattgcactgatcctgatcttgttctggagctgaagaatcttattgtaatatttgcagatactttacaggtgggtgataacctaacaattaatggttattctgatcacttaaaaacatacaaaatataggctatactcatttatgttattgtagattagtggcagtaaattagtagtaataaatgtttacctacatattgatattctgctattacccaggactattcataccacttccttttcaattatgaagcttagacagaactcagggatgctaccatcttttaaaatattgatcattcagttagaataaagtatttttatagttgaaaaaaagaatacagagtataatggaaggaaccgtgaactagaaattagaagatataaattctgccttagggcagtgagaagtgggttctagaatcacatagactcagagtttctgttctgcctgtgctgttgactaattgtatgcctgcaggttctttaagctttagatccttatttgtgaaaatgggtttattactaatttcagaattgtttttagttttaaatacgatactttgtatgaaaacacatgatttgaaaactgtatgttcattttcttcctggtttctggttttccatgtgttctatgagcaaatccctttacttttttgaggtggtttttctctttttaaaaataaggaggattgtttgaacccaggaggtggaggttgcagtgagccgagatcgcgccactgcgctcccctgggcaacagagcgagactccatct

SEQ ID NO: 11141 - DNA, 507 bp, Homo sapiens
aggtactgaactgggagggttttagtctgatagccacaattttgacctaggcaggaagctttacagcttgaggcagtttcatggtctgaagacaaacttcttgtgacttgctgccggtgttggactgcaggagagagcctcactgggtcaggagcacgagaacaaagtggatcccactaccacatcccacccctcctgtttcagaggcagatcatgggaccaggactactgagagttccatggccctacccatcatctgaaatgcccaagaacttctcccgattaacaaaggtcaagcataaactctattgccaccaccacagctggtcctcacttttaggtgctacctcctgtcctaaaggttgatctacacagtcccttacaacatctgccgactcaagagcacagagctcaagaaggagacaagctttgcattgcctctgttaccatcattgcccacgccacccaggctactcaggaggccttgagcccactcacccacccagt

SEQ ID NO: 11142 - DNA, 319 bp, Homo sapiens
aggtacagctcccaccagatactcacttggtgaattgaaagaggagctgtagtgaaaatactgtcttaggaaaaacacagctcttgattgaggctatcagcaggttaatgaataactgttttcagacaacatttcacccctagtttgagctgctcttagaatgaatgtggccaggttaatgtgaccagcagacataatgcaaaaccaaactaaggtggtaaattggcatcttggctttgttgcacatgcaggaaagatccaggactggtgtcagaggtatactgtctttggcagaagagtgcttgtccataaccagagt

SEQ ID NO: 11143 - DNA, 921 bp, Homo sapiens
acgcgggaatttagggaagaatcatcccactttttgtattgagaacagatttggggaagtagtggcaggaaagtgtagaagttggaagatcctttagtaggaatatcctcttgcaataatacgatgttgatccaggatcttaattatggaagcattaagtagaacagatttgaagatgcacttaacacaatttgcggtgcactctgaaaaaaaaatgaaatgagagaaattaaaatgactccacagttgctgtcctgagtatctagaagaacgaagttgtaatttacttgaatggagaagacaattcggggagcacgtctgcatgaaaaatgaatcatctggtttgaataagttaggttgaagatctaagagagacaagtactcataacatattagtttaaagttcaagggacaggcaggggtagagaccccaaactgaaaatcctttacatcatgtcacgaggagaccaaattcagattacaaaaaattagatgtaagtgagctgaagagaaaccagcaaagaaaacaagaaaaagaaaatacaaaagaacaggagaagtaaaattgtggcagaacaaaattttcttcattttacataaaaggggatataacgaggcaaaagttaatctgcaattctcatatgaaatatttgaattaatgtagaataatagctcatattacatgaaataatttataggtgattgccaataaatattactcatattctgaaagaaatattaggtccagccctcattgagcatcatcttcattgactagaaactggatttttaaaaattaaataatcttatagtaaatatctcaaattgtaattatgagaagtagcatcaataatactaacaattgtaaatattaaatggcatgaaacattatttttagtataaattatatgatttctaaag

SEQ ID NO: 11144 - DNA, 1651 bp, Homo sapiens
  misc_feature 1, 2, 1633, 1644, 1648, 1649, 1650, 1651: n = A,T,C or G
nncactataggggacgaattggaagctccaccgcggtggcggccgtggcgataccgtaggcgccgtgttgagcgcccatcccgacatcgcaaaagtctccttcaccggctcaacggctgtcggcaaaatgatcctgcgtaccggctctgagaccttgaagcgcgtcactctggaactgggcggcaaatcaccggtgctgattctcgatgatgcggatctcaagaccgctgtgcccatggctctccaggccggcttcatgaacagtggccaggcgtgcattgccggcacccgaatcctggtacctgaaaatcgcctttatgaagttgaagcgctgatgatccaggaggcggccaaagtacaagtcggtaatccccgtgagccagccaccgctgtcggccccatggtcagtcataaacagtgggagcgggtgcagcgctacattcagatcgggattgaggagggcgcgaatttattggcaggaggccccggtttgcctgaaggcatcacggctggctggttcgtaagaccgaccatattcagccgtgtgaccaatcaaatgaccatcgcccgcgaagagattttcggtccggtgctatcgatcattacctacgcgaccgaggaggaggcactgacgatagccaacgacaccccctacggccttcaggcgtacatcctgtcctcaaatcccgaacgcgcccgcaggctggccagccgtatagaggctggccgagtgctgatcaataccctggcccatgaacctcttgcgccgtttggcggcttcaagcaatcgggtattggtcgcgagtacggcacatttggtctggaagccttcctggagcccaagtccatcctaagctgattcctcagcatgaaaacgtatgaataaggtcaacgccccaaaccaaagtgcatgaacaggccctataagcacaccgttcagggaaatcgatgcaaagtgtttccgcatttttggtatggtgcagcacattttcacagggactgattattctccgcaggaagcggcgtcgaccttatttcaacgagatgctggagaaatgcctgaaccgataccgatcaaggaccacgaaaaagaaaaccgcttggtcaacaagcggctgctggcctgcgcgctgctggtcatcggcatcacctgcgccctggtaggccggatgtacttcctgcaggtggtgcagtacgactaccactccaccatttccgaaaacaatcgcgtccacgtcctaccgattacaccgacgcgcggcctgatctatgaccgcaatggtgtagtacttgccgacaaccgtcccagttacaacctgaccatcacccgcgaacgtacgaccgatctcaagggtgagctggacgccatcgtcagcctcctgcatttgcctgccgaggaccgtggcgtatttgataaagcgctcaagcaagcgcgtcatcccttcgtccccgtcacgctgttttatgagctgaccgaagaacagatcgccgtgctggccgtcaacgaattccgcctgcctggcgtggatgtcgagccgcaattcgtccgccattacccgctgggtgcgcactttgcccactccattggctacgtaggccggatcaacgaaaaagaatccaaggccctcgattncagtggaaatnaccnnnn

SEQ ID NO: 11145 - DNA, 1025 bp, Homo sapiens
  misc_feature 1, 2, 3, 4, 5, 6, 7, 8, 9, 10, 11, 12, 1025: n = A,T,C or G
nnnnnnnnnnnnccgaggtacttgtgacccaaggaccagcccaaacgcagatgcagacagattccagactcttcagcaatccttcccttatctggggcaaaggctgtgatgcctacacagtctctgtcatttcatccctgatgctccagtttttaggagaaaccacctcgtcatgttcaaacttccagaaatggtggtcctgtggaaagaatcctaggccagcagctaggagacctgctgtgagtcccagccctgcccatcacagctatgtcaggtggttcagacatgttgggcttcaggtccccatctataatcaaaaagtttgtttctagcttcaacaatctatgactattatttccgtttactgatagagtaactaattacttcattataggttttcaagaccagttacctcctgtttggttcaattagcaaaatgccaacatgattgtcattgattttggtggttgggcttccaggagagaagcccaatgggaaatagttcaggatcttaagcagattttgtatttattattccaaggtagtatatgcaggagcagggtttgtcatgcatttctcaaagttcttgcctaggaaaagctcactcccatcgttctcttccattctagtgatgccttaggactcttcgatttagagtctagagccagaggagaaggaataatcatggttaagactggctataatgaagacttttttttttcccccctgaatagagaatcatagagtatcagacagaaggtgaatttcaaagatgattcaacccaatccttttggattagaggcaacattttctgagtatcttcatgtatattctacagaaagaacatatggtgcagagttgaacagaatgtggtttgaatccttacatatgtgtgacctttggagagcttcctactttttctgagtcatatttttattattatatattttaaccttgaaagtagaaatgttgataatacccatctagtagctggtgtggatatagtaggcagaataatgacctn

SEQ ID NO: 11146 - DNA, 1021 bp, Homo sapiens
tacactgatcttaaaacagctctggctgtaaaatcactttgctggagtcaatgaggtaagaggctagaacacaatactagggatctgacccctgcaggctggccatgatccatccctcaggcagccttcccagagcagaaaaatccagggagccacttaatgagacgttttctttaatgttttctttaactctgacaattgcaactgaaatttagcaggagcttgtagccctccaaaattctttctctttctttctctctccctctctccctcttgctgctactctttttactgcttttatgcaccaaacttcatggttttttttttaatggaatgatgttcttggggaagaaaagatttaaagatatcatggtaacaccaatgaaaattgtaaaaaagtccaaatttaaaagttaaaatcttggtatctacttttaacattgatttatttcctttataaaatgaataatgttacaaccactacaaccatgcctttcttccgccagcggtttttgaacgcttattgcacgtcaacctcttgtttacttctcagagacacaaatatgaagaaagcacagtccccaaagcttactgataggcacaggctctacacatctgacagaatgggatgtgtatctgagactagtgattcatttatacacacacccttatgggtgcacaggaggattcaccagcacaccctgcaatcactccaaacttccaacagaagttttccaaatcataaacactttcaaatttagtctaaaatcaaccctcactttctcccccttttccctaatacttcctattttcatcaatgacacactgccctcaggcataagtgaaaggtgggtcttggtttcagtttctactctcttctatccataccccttcctgggtattcccacatatattatttcaaaacccttgcaatagagatactaattattcccatttcacagatgaagcaaataaggctcaggggttcaatccaatgtcatatagtaaagggcccccgcgc

SEQ ID NO: 11147 - DNA, 247 bp, Homo sapiens
accctaatcccacggaacttcccttgaaccaatacattgccacctccccactgagagatgccagactcttctcccaactctcccaaccaccttaaccaagtcagcccctcccacatagtccctagttaagatcagaatgagctttatctgcttcttaaactttgttgttcctacctctgcaatccctcttaggctatggaactactgcgggatgaattcaccaagccgcagctgggactgcctttgt

SEQ ID NO: 11148 - DNA, 678 bp, Homo sapiens
acgcttcatttcctccagcaccttgaagacagcttggcatagaaataattgttgaatcaacatgtgcataaataaatgactgatgcaatgggcaaaccctttgcagtgctcttccctgccttacctgtataccataacctccactgtggcagggactgtggtgacctcacttgccatggcctcccagcttattcttagtgtctgatacacagttggatgattaataaatatttgccatctcagtgagtgtatggacatggtgagtcctctgccaatcctcccaaatccatgcctgccacacctccacattgcaaacctgtcctcccacactgcagcaagagccaggcagggttctaccatgcaaaatggaccttcatgtctcctccacggctaccctaaggcttcagaatcttctttagatggtgggccccagaaaaatagctttagctttagttacagactcacagattttacttataatcttagggcattcacaggtctcttgaagtccatgaatgtcccacccaaaagacttcagagtaagacccactggcctacaggataaacacagtctccttagcctcagcgcattgtaacctggccacagtctgcctctccagccctacccttccctgtgatggttaattttatgtgtcaccctgccctgaccaagttagt

SEQ ID NO: 11149 - DNA, 871 bp, Homo sapiens
acacttctagattgctcaatgaaaagaactctcaatccaaaatttatgtctagcaaagatatccttccagagtgaaagagtaataaaaagagtctcagatgaagcaaagctgctttaaaagaattgctttaagagagttagctagaagagaaatgataccagaagaaaacttgatatattaggaattatagaacagcaataatgtatatacctgggtaaacataatagatgatgagttcttctaagtaactttgaaaattgaaagcagaaattttaacatcattttaaaacaatttatttcaaaataatagaagaaaagcatgaaactggcagattggaggcatcgttagcatggccccccccacttggaaagaaaatattaatagtgtgtagagattcaccctgaactttttccaagaagcaccacagtagcttaacaggacaactgaaagaacccacagaccctttgaaatatgtggtgggctgccacctacattgtgagccaggcagaaaactgtaagtccacagagtgtgagtgggggataaactgcctctgggatacacacacctactgggcaacctggcagtccaggcctcaggaaaaagccttatccctgcccagagctggggctgatttagtaagtgatgggaagcatatgagggggagaaacataggggtgtgctctgcatgcactcccagtctccagtggggatagagggaagccattcctgaccttacttcacagtggacctcacagaagtctgccagctaactcaggtggcagtcactggttgagagaaacccctaactgtgagagaggttctggccaagggggactgtgagagaggttctggccaagagggattcaac

SEQ ID NO: 11150 - DNA, 1478 bp, Homo sapiens
  misc_feature 1, 2, 1455, 1456, 1457, 1458, 1459, 1460, 1461, 1462, 1463,1464, 1465, 1466, 1467, 1468, 1469, 1470, 1471, 1472, 1473,1474, 1475, 1476, 1477, 1478: n = A,T,C or G
nnaaatgcttttggcaatgagcgctatgagggctactgtgttgacctggctgcagaaatcgccaaacattgtgggttcaagtacaagttgacaattgttggtgatggcaagtatggggccagggatgcagacacgaaaatttggaatgggatggttggagaacttgtatatggggtaagtatagctcttctcatagataaagtcattcaatttgaattgttgttgacagactgcttcctctccctgtgaagtatctatatctgaggttgttgatttcccacattactctagaaacattatcttgttgatttgtgaacatctgaaagattaagattgaagccagaagtagacatgtagattaactgagacaagcatttcatctctcttgaagcatatgggccatatgtattgtcaaaaggctgcaaatgcatggatgcagtgcagatgtgtaatgatcatagtcaagccagctgggtatactgtgtattcataaagaggaggggcattcggggaataattcctttttgtttatcctttactgggactataccaaggaaaaaattattgtcatttttctgatttcctctcctttttctttgatccagtgacataaccacgattcctttttcaccatgactccaggtactattactttcctttttttcccttacagaaagctgatattgcaattgctccattaactattacccttgtgagagaagaggtgattgacttctcaaagcccttcatgagcctcgggatatctatcatgatcaagaagcctcagaagtccaaaccaggagtgttttcctttcttgatcctttagcctatgagatctggatgtgcattgtttttgcctacattggggtcagtgtagttttattcctggtcagcagatttagcccctacgagtggcacactgaggagtttgaagatggaagagaaacacaaagtagtgaatcaactaatgaatttgggatttttaatagtctctggttttccttgggtgcctttatgcggcacaggatgcgatatttcgccaaggtttggttactcacctgcttcaactttgtgcatttcgggtctcaagtggacattcatggtgtttatggattcacctctaaagaagttaccagcttgccgacttcctgtccaagccgtttaagactcttgaaggaccatcctcttagcttccgcataagtctgtgaaatatttgaacaatgttctttgaatggtgctcatctatttctctggtggaattttacacaccatgaagaggctatagaatgcataaggttcctatcattccatgccttcttggaggggtaccgtgtttttgctgcatattctcattttacagtcatctgtgtgttgatccacagacctgtatatgggaaaatgggcaacattatttattaactgcaaagtaacaccttgttagataaaacttcgnnnnnnnnnnnnnnnnnnnnnnnn

SEQ ID NO: 11151 - DNA, 569 bp, Homo sapiens
actttgtgggttgagggtaggaggctaagactgccagggaggaggtcccggcttcctgctcctaccggggagcagcaggtgaaactctgaccacgttactgcaatcctgacatgctccagtggagtggcgacatttttcttctcgaggcagcttttggggatctgtattactttcatgtggaccacttgctagttttgatttcaatgataatttcttccttcctttttttttttttcaagcctgtcttcatagtgatgacaacacatttaacatttgttttgattttaccctctcctctctccccactctcagtctgcagccaggagagcagggacgtcctgtgcgaactgtcagaccaccacaaccacactctggaggaggaatgccaatggggaccctgtctgcaatgcctgtgggctctactacaagcttcacaatattaacagacccctgactatgaagaaggaaggcatccagaccagaaaccgaaaaatgtctagcaaatccaaaaagtgcaaaaaagtgcatgactcactggaggacttccccaagaacagctcgtttaacc

SEQ ID NO: 11152 - DNA, 1305 bp, Homo sapiens
  misc_feature 1277, 1278, 1279, 1280, 1281, 1282, 1283, 1284, 1285, 1286,1287, 1288, 1289, 1290, 1291, 1292, 1293, 1294, 1295, 1296,1297, 1298, 1299, 1300, 1301, 1302, 1303, 1304, 1305: n = A,T,C or G
acgcggggaagctaaagaggagatcgtttttatttcatagcgagaaatggcttccgggtgctgagtagaaggggcaggcatgtttggtagtgggctctccagccctagaagcatgcacgcagagcctctgtaggactttttttttcttttttttaagacagagtcttgctctgtcgcccaggctggagtgcaatggcgcaatctcggctcacttcagcctccacctctcgggttcaggcggttctcctgcctcagcctcccgagtggctgggattactaggcacctgccaccacacctggctaattttttttttgtatttttagtagagacagtgtttcgccatgttggccaggctggcctcgaactcctgacctcgggtggtccgcctgtctcggcctcccaaagtgctgggattacaactgtgagccaccgcagcagcctataggatgtaaaaggagggatgcctggattggctgggggagttggagtgaatgaccccagggttgcttcctgcatgggacagctccgcttgctaggaggtgctacagaggcttgggcctgtttctcgtgttcttttttaatagttttgccatttgatgttattgaatttacttttctagacactctgacctggtcacagccagagacacttggaaatcctccatctccccggcatggtcatgtgatggtggcagcagggacaaagctcttcatccacggaggcttggcgggggacagattctatgatgacctccactgcattgatataagtgacatgaaatggcagaagctaaatcccactggggctgctccagcaggctgtgctgcccactcagctgtggccatgggaaaacatgtgtacatctttggtggaatgactcctgcaggagcactggacacaatgtaccagtatcacacagaagagcagcattggaccttgcttaaatttgatactcttctaccccctggacgattggaccattccatgtgtatcattccatggccagtgacgtgtgcttctgagaaagaagattccaactctctcactctgaaccatgaagctgagaaagaggattcagctgacaaagtaatgagccacagtggtgactcacatgaggaaagccagactgctacactgctctgtttggtgtttggtgggatgaatacagaaggggaaatctatgacgattgtattgtgactgtagtggactaataaaacccacatttttattacctgtcagttactttcagaatagttaagtaaaacattagctgnnnnnnnnnnnnnnnnnnnnnnnnnnnnn

SEQ ID NO: 11153 - DNA, 265 bp, Homo sapiens
acgcgggagactcattaaagctcctaaatgtatacatatgtatcagaaaggaatgtgaactattaaggaaacttggtagacaatgaaagaatttggaaatctgaaggctttaagaggcagagttgtagatcaacccctcataccaaataatcaactccaaagtaaaactttgaatataaactaactgcaaaagaaaccttcgcgatatgtaataagatggcacacgctgtgcttctgaggacatgtgtggatgcctcccccacgt

SEQ ID NO: 11154 - DNA, 632 bp, Homo sapiens
  misc_feature 1, 2, 3, 4: n = A,T,C or G
nnnncaggtacatggcaactgaggcaaagagctcttaagttacttatcgaagaatatccaataagtaggtggtagagctaggatttacacccagcagtcagctttattttcaaccatgcaatgcctccttaacaaaggagataggttaggaaaggcagatctgggcaagtgttgtattatacaacaataaaaaggctgtggggtcaaaagctatggctgttaaaaggttagggtaacagccagaagaatcacccttaggaaggttaaaatttaggacaacatctatgatccttcccaaaccttaaatcttcatgcttttaaaaagaatttcctgcccaggcgtggtggctcacgcctgtaatcccagcactttgggagggggaggcgggcggatcacctgaggtcaggaattccagaccaacctggccaacatggtgaaaacctatctctactaaaactacaaaaaaaaaattagccagatgtggtggcacttgcctgtaatcccagctactcagcaggctgaggcacatttgagcccgggaggtagaggttgctgtgggctgaacagcaccactgcactccagcctgggtaacaaagcgagattctatctcaaaaaaaaaaaaaaaaaagt

SEQ ID NO: 11155 - DNA, 580 bp, Homo sapiens
  misc_feature 1, 2, 3, 4, 5, 6, 7, 8, 9: n = A,T,C or G
nnnnnnnnncatgtaccacatccctgtcattcaacaacttccccttccaagagggtgctgatcacagactttttactgtaatggggccaagaagagacagttacttaaactaatagagttctttttataacaagagactgcagatatcgctacagaaagaataccggttgtatgtttcctgaattattactaaaaacatttgtttaaatgtctcatatataaaggtgatggccttatctctgacaatgaattagggcctaaggagaaagcaaattggaacactgttaacattaaaaagtcagctagtctttgaaatactattataatactaccttggaagatacagcaactcaaatcttgttcacccaccagataagaaacaaagtagagggagcctcagctcttagggccaggctgcctggactgaaatcctgactctgctacttgctacctgttgtagcctaggcaatttattatactttcctgagacccagttctctccattctataaaataaagatgacagcagtttctatctcaagtgaagacaacatacagcacactgctcaaccagtgtgaat

SEQ ID NO: 11156 - DNA, 852 bp, Homo sapiens
  misc_feature 1, 2, 3, 4, 5, 6, 7, 8, 9, 10, 11, 12, 13, 14, 15, 16, 17,18, 19, 20, 21, 22, 23, 24, 25, 26, 27: n = A,T,C or G
nnnnnnnnnnnnnnnnnnnnnnnnnnnggggtggagtcttgctctgtctcccaggctggagtgcagtgctgctatcttggctcactgcaagctccacctcctgggttcacaccattctcctgtctcagcctcccgagtagctgggactacaggtgcccgccaccacacccgactaattttttgtatttttagtagagacggggtttcaccatgttagccaggatggtgttgatctcctgacctcatgatctgcctgtttcagcctcccaaagtgctgggattacaggcgtgagccaccatgcctggcctctcacatgccttttactcctttgtggttgctgctcatctttcaactttcctttctaatttgtcaaatgttttcctatttccagcttcattagaagctgtagcatctttgcatatttcctgttaacaattggcttggtctatttctctgtagaacacccagagtcctgaaagtagtaaagaccttggccttgaagcaggagaccagggttcaagtttcatttctgtcatttatgagatgggtagcacaggaaagttgcatctctattttaggcttcagttttcttacctgtaaaataggaataacaatatgtttcctcccctatcatagaatttttgtaaatatcaaatgagattggtgtgaaagcattttgcatattacataatgccccaccaatatgtgctgttttttttaatacctcatctttctgttccttaacctccccaactaattttcccctcttacctccttgtggccatagaaccagtgcgcagggggtgcaggaaacaggtgcatggctctgatcgtccatctcctcctctggt

SEQ ID NO: 11157 - DNA, 384 bp, Homo sapiens
tgtagcaaagtacttccgtgagatataaggctgatgataaggattggggtaaagagttgattcggtcacacttgactgccttgaaatctgtcttggcatcgggtcctcttcctccatcgataggtggtcagtctcagagggttggtcatctccctcttgcttcagagacgcagcctggaatccttcaaaactcccaattgttgacatttcttcagcctgactaggctggtcctcaaggctcttctttctctttctgcacaaagggggctagaccacagatagtggccaggagaggtgtgattggctcagataaagccaggcaagacagtgccctgtgctgtgaccccactcagtctcccgcgtacctgcccgggcggccgctcg

SEQ ID NO: 11158 - DNA, 701 bp, Homo sapiens
acagagggtctgcaatcatggtgcggccacaagtaaaatatgagtagtatttatgcttttctacactctcatatgtattgcccagcttatttacttatttacctgtttacttattaaaaccaacccccaccttcagtggatgaatatttgccaactcaaatgacagtaaaaaacggtgcagtggctcacgcctgtaatcccagcactttgggaggctgagacaggcagatggcttggggccgggagtttgcgaccagcctggccaacatggtgaaaaccagtctctactgaaattacaaaaagtagccgggcatggtgccacatgcctgtaatcccagctacctcggaaggctggggcacgagaattgcttgaacccaggaggcagaggttgcaatgagctgagattgcaccactgcactccagcctgggtgacagagtatgactctgccaaaaaaaaaaaaaaaaaaagagtagaaggaattatagccacagaattttccagggcaattccagaggagacccaacaactgttagggactatgcccctattgttaaaatgtctatataacctctgaggctgatgactttgagaacacctacactgacttgaaaattcacattctggtgtgtttctttctttctttgagacagagtatgactctgccaaaaaaaaaaaaaaaaaaaaaaaagtaccttgccc

SEQ ID NO: 11159 - DNA, 600 bp, Homo sapiens
  misc_feature 595, 596, 597, 598, 599, 600: n = A,T,C or G
acgcggggcaccgggcactgttctaagccctggagatacatcagtgagccagatagacacatttcttgctttcatggaacttaaatagtatatgtaatcaacctgtttttccattttttagaacaatgaagagtagggcaggagtggaatgagggtcaaaagtaagccttggagtcctgccccaaagttttctaattagattatgaaggaaagaccttatgcaactaaattacccatttgggtcaggtgtagtggctcatgcctgtaatctcagcactttgggaggtcaaggcaggagatcacttgaggccaggagttcaagaccagcctggcaaacatagggagacctcatctctataacaaatttaaaaattggtagggcataatgatgtgcacctgtggtcccagctactcaggaggctgaggtaggaggatcatttgagactgggaagtcgaggctgcagtgagctgtgatcgcgccaccgcactccagcctgagagacaaagggtcatttgtgtcctattgatatttgtaataattaatggtcttgttgcccctttaggttgctttctttttcttttccctcactctcannnnnn

SEQ ID NO: 11160 - DNA, 386 bp, Homo sapiens
ccgggcaggtaccttgccctgaggaacctacaagttagcctccctctaatcctggcattcaaagtcctccaccttccgaattacacctgttttttcaggcattgtctcccactttcctagcaagcctttggctccaggaaactgttctgttcattgacgacagaatgtattttgtcccgtatgcctcccttcaatctgaagttcatttttagtaattttttttattagcagtgactttccccatttactaatgcctttctctttagctcatttagaattccctggaagtcatcatgttttccttctgaattgctatcatattctgtctctgtgtctaatcagaaagttaggtgagctgctgtctcagctcctgtgttaatccaggt

SEQ ID NO: 11161 - DNA, 814 bp, Homo sapiens
  misc_feature 810, 811, 812, 813, 814: n = A,T,C or G
acttagcacatgccaggaactgttctaaaccccttctgtgcgttagcccatttaatcctcatagtaactcagtgctatctctgatatccctgtgttacagttgagggaactgaagtatagagaaggttgagcaatggcatgcagggcatagagaagggtaaggacgactgtaaacaggtcaagaagtggaaggtcagataatttaccctgattgcacaactggtaagtagtggtaccagattgaggctcaagtcttcactctcacagcagggtactttctgcaacttcagtttcttattaccatttctgccactagcatgcagaagacgctagatgattattgaatcagtgagtttctcataggtaagatggaaatgattcttagtagggttttgtgagaataaaattggaaattgtacatttctttaacatattttgggtagtaatagctattatgatgctagtggataacacaagagttcaaaggtgaccagttagatgtggaggagggaaagagttgtgtaaaagatgatgagtgttctagcctgatggtgagaggacagtattaatggaaataattaatttggaaagagaagccagtttgaagacaggcattcatgagtttagcttaggaatcattgttttcagttttatgctaagaaaacaaaattaaccaagatctggaaccaaaccattttacattatgggcatctttttggtccatactttatttgatgtaaggcaacaatgcctgacagaatcacttgacttacctatgaagctggctggaccttgaccagaggcctgcannnnn

SEQ ID NO: 11162 - DNA, 135 bp, Homo sapiens
cgggcaggtaccatctctgtttctgaggaagcagcagaggagcctatgtgatccagagaacttgttcttggcttccgcattagctaatcttgtgcagtgaggaggtgcaattccctctagtctccccgcgtacct

SEQ ID NO: 11163 - DNA, 547 bp, Homo sapiens
tgccttgtagcggcagccgggtcgggaacaaggtgtagttctggttgccgtcgccagccacgccgtccgccgtgccgccggctgtgcccgcgccggcgggctggccgtacagcgcgggcggcccggccgcgtagatgccgtccgcgcccgtgatctggtccacgccgtacaccaccacggcgccagcggcaaaggccggccccagggtggtcagcagctgctgtcgcatggtggcggccgcgctgaagcgcgtggcttcgtccgccgcgctgctgctgagcacgggactgaccgtggcgctgatggcgtcggccagcgtctgtttcgccttgagtacgaggcccagctggccgctctgcagcggatcggcgatgccgttgaggcgatcgaggatgtaggcgggcggcgcataggtggccgagaggaacttgtcgatggcgtcgagacagctttgcagccacaggttcaggtcgacgctattgagcgtcagcgcatgcggcgtattggtcggataggcgtcgatgctgaccatgcggctttccagcga

SEQ ID NO: 11164 - DNA, 309 bp, Homo sapiens
ccgggcaggtacacagcaccccctggagttggcaatgcggaggctctggctgttgatcccaaagaagatttaaattgcagtccattatatttttctctcagacttctgtttctttgaatattccaaatagattaaaatataatctggaatcttaagtgccttagtcctatttaggtaacaatactatctaagaaaaactctagaagaattcacaacaaattgctaactatagttatctctggcagaggaagtagcatgggaaaggcgtgggaaaattttttactttgacttttttttcacctgtgtcct

SEQ ID NO: 11165 - DNA, 1118 bp, Homo sapiens
  misc_feature 704, 1116, 1117, 1118: n = A,T,C or G
ccttggcgccaagccgcgccagaccttcatgcaagtgattttgccgctgtcggtgccggggattgcggcgggttcgatctttacgttctcgctgaccctgggggacttcatcgtgccgcagctggtgggcccgccgggttacttcgtcggcggtatggtctacgcgcaacaaggcgctatcggcaacatgcccatggccgctgcattcaccttggtgccaatcgtgctgatcgcggtttacctgtccatcgtcaaacgtctgggggccttcgatgcactctgaaaaagcttcgtggagtctaaaaatcgcggcctggggcgggttggttttcctgcacttcccgatcctgatcatcttcctctacgccttcaacaccgaagaagcggcgttcagctttccaccccagggcttcaccctgaagtggttcagcgtggccttctcgcggccggacgtgctggaagccatcaagctgtcgctgcaaatcgccgccatcgccacgctgattgcgatggtactcggcaccctggcgtcggcggcgttgtatcgccgggagttcttcggcaagcaaggcatctcgctgatgctgatcctgccgattgcactgccggggatcatcaccggtctcgcgttgctcgcgaccttcaagaccctggggattgaaccggggatgttcaccatcatctttcggctttttttaccttcngcgtggtgatcgtctacaacaacccgatcgcccgtttgcgccgcacttcccacagcctgatcgaagcctcgatggacctcggtgccgacggctggcagaccttccgctacatcatcatgcccaacctcggctcggcgttgctggccggcggcatgctggcgtttgcgctgtcgttcgacgaaatcatcgtcaccaccttcaccgccggccacgaacgcaccttgccgctgtggctgctcaaccagttgagccgaccacgggatgtgccggtgaccaacgtggtggcgatgctggtgatgatcgtgacgatgttcccgattctcggtgcctattacctgacccgcggcggcgaaagcgtggccggtagtggcggtaaataactgacaacacattgtgcctgacggaatgagannn

SEQ ID NO: 11166 - DNA, 860 bp, Homo sapiens
  misc_feature 1, 2, 3, 4, 5, 6, 859, 860: n = A,T,C or G
nnnnnncggtggcggccgaggtaccagtaaatgctgcctcatcacctacacccttggtttacttctcagataaactcaggaagtttaaatggcattctgagaatctgtagctgcaacatagtgagcccaggagtcccggtccagcagctagtattaaattctctgttgctagcttggacctctctcgatatctaggaattgtctgcagtgtgcggtggcacagtaacaaccatttgtttctcaacaagaatctgataatgttgcttgaacctcctgaaccagtgctgcatgctctgcttcttcatatgtttgtccttagatttgaccaaaaacaataactgataatgtaatacagattccccagctccctgtgagctgggttgagcccaggaagtctgtacaagagagcatgtctactgggatttaaatagcccagaaacaggcagccggaatttcttacactcttgtgctctaaaaaaaaaaaaaaaaaggaagaaagaaatagctctttggtgccccctcagggatacccagcaagcaggtcccacataaataatgtgtaaatagtctgtgagatactggggtttctctcattctggaattggaattgataacttttgacagaaaaaaaaaagtaaaattctaatctcaaaaaattttgtgttgacatgggtttaccccatcttccctcaatttgtaagtagaaatatttcaccaatactttctgtacatcctaccagatatttctgtgggcaaaggatatgcaccatataacatgtgcctaagaattaacagcctattcttcaaattttatgcttagcattctcatgtatactgtgtgtatgttttttttagacann

SEQ ID NO: 11167 - DNA, 550 bp, Homo sapiens
accttgagtaacattgggaaggaccactcattgaatgaaccatcaatcaaatgatacatactgcatccttccagaaaacatctcaaagcactttgcagatgttaacattaaagttaaactgagtgtaagggagccttacaaaataggccagcttgaatgccttatccaaaaatgtagaactgcttcaaggcaggtgtcagtgttttaaagaaattgaagcatcttgggttgaaagaaaaataagaaaatctctatggatgtaaagatcattcccagttcaaaagctaaggatgggcagcaaggtcgtgtcctggaaaatgtaaactctgtcaaatttgtaaccaagatccaggcatcctccctgctggaagtaacttacattctgttgaaacaagcaggctgagcacagagagaattggaccagaggaggttcttcataaaatgaaaacttggagggaggtgacaagtggatgcacaaataatgaatgacagacacagctgagacatgataaaagcacgcacaggggctctccacatctctgcaagacgt

SEQ ID NO: 11168 - DNA, 1473 bp, Homo sapiens
  misc_feature 1, 1472, 1473: n = A,T,C or G
naggtgtggtgtccatagcaggggtgggtgatgggggcttccagaggggggtggaacaagatttgagaagatgtcagtttcatacatgttaaaaaaccaaaaacaaaaaaccaacactccctcctccacccagggatgacggcacccccttttgtgaacccaaactgcagagatgggcacggaatcctgcttcctggtgtttttgtcttactctgtctgcagcaaggcgcctgggaattttgccctacagggaccctgtagcttttccaagaaacagggaggcggggagaactaaaccatccacaacatgctgcctggtatgggcttttgcctgctgtactcagccaaggtgccaagtgagccaaggaggcaagctcggggtgagaagggtggcgtccagcccaggactctgggcccccgggtgtgggctgtgcagggacgcgatggtcccaatagtgatggggccacccactccctttgcctccggttgctcctagttccttggcaagacagatttgctcaggagtggggcagaaaaaaaaaaaaagctagaaatcagctacatgaatgctgtgcacagccagcccgggctctctggccaatgcatattacttaagggcaatgtcgtggccagctgtggtggtctgggctctccctctgtatcgcctggggaggctgctgaggtgactttttggaagaaaacacgggatgagtgtatgatggtggctgtggagaccacccaaaatcccggggttgggggcaatagtgaatgaatgggaccatctgcgtgggtccctacacgagatgcttggaggggctggaggtggtgagggctgcaggaatggcctaaggttggagaatcccagccctgggtcctccctgcctggctgccccactaaccatctggctattgtcttagctttggtcaagtaaaaagcaaaggaagctggagttaaaaacaaaaagaaaagaaaaaaaaaaagaacaaaagaaaataaaatcaaggacaagacaacagcatgctcagccaccggaccacagcctgtgactcggtgccacctggctgtccctgtgccctgccggaccctcggctgggcctccaatggctgagccaggcccatgggtacagacagacagacagatattgcatatatcaggttttgtttttgtatcatacaggatacccttcatattcacagctggaagcaacagacaggggatgggggacaaaggagaaggtgggagagaatgccacctggggtggtctttggataggggaaaagaggtcctttggcaagaagggtggggatgcacggggcaggggagagggggtgcctttgaggtgggtgtggaacagcatttgaccctgagccaggggtatgccagcctgcatgaaaagtggggagcggggagtctggctgcgggtggagtggccaccccaggttggaggacagcctgcaggggtcggtgcnn

SEQ ID NO: 11169 - DNA, 509 bp, Homo sapiens
  misc_feature 1, 2, 3, 4: n = A,T,C or G
nnnncaggtacctagcaccaaaacgtgttttgccacattatgaggagaaattaagacacatgcaaatggcccagagtttggtggtttggcagtcacaaggaggaaagaaatgtgtgactccaataagagtccctctatagtcatttggttccctcggcccagaaagacaaaggggagtttattcagagtgacataaaagaagggtcgcacaagcaaatcagtgacggggcaaagcattgatggtttgaaggaaaacatgcattatcttttcttaacggtgttcaatgaatttcctttattattcattacattggccaaccagcctctaaggactttgggcagcccaatggaaggctctcaaaggcctttgagtttagcttttgggcttacgatggttttaattagccacagggagaaaaaaagccatcctgatgtgggactcctgaagtgcgtcctactgaaagccaaatggagaactgaggaatgtcatcctctccacccagtcatgt

SEQ ID NO: 11170 - DNA, 1505 bp, Homo sapiens
  misc_feature 1485, 1486, 1487, 1488, 1489, 1490, 1491, 1492, 1493, 1494,1495, 1496, 1497, 1498, 1499, 1500, 1501, 1502, 1503, 1504,1505: n = A,T,C or G
acacactgaggacctttcatccagcacgtgtggaggctcctcgaggggactcggagtgaagacagacttggtctctgccccctcgggtcttacagtcaagctccagttgaagtgtggtcattactacagtaaatgaagcacaacccattattatctctgcctcaggggatcaagaggaagtttctagagtaggagacatttcaatcagggcttggggagcctgccaaagggaatgagggcacgtcccacatgaagcaaaggcatctgagttcatggccccgctggggattggcaggcatgagttgcagctgcagggcaataagcgtaggggagtgagtggagaaacccaggtggggccagaccacgtgaggcactgatgggttccatcagggtggccatgggctccatactccacagaaggctgttcagatggggaagcaggtagtgagggttccatttggggggcatcactgacaaccgcgtggaagagagaaatgcccagaggcaggaggccactaaaaggctatctcagttatccaggcaaaaaggctgacaggtgcagatctcagcagccctatgctggcaggcggtcgagcctggtggtcaagaatatgaatcctgaagtaacagtgcctagtttcaaaccgctgctcctccattcccagctgggccactctgaattcacagtgccaactatctggctcattataagtcctaacaatggttaaactcccaggaggtagagtgggcacagattagttcctggagaaaagcaagagaaaaagaagtctaatgactgcaaagcttctagcttgggtatccttggctggtggtgagtccactgagaaagctatggaacacgagagggcaaatagaatggaggaagggagatgacagtgtcatggggtcctgctaacttatagctaacacaagtggagatgcccatcagggatttgagcagaaatctagaaatcggcagagaggtgggaccgagagctgtatctttgggaggtgttggcataaatggctgctggaggcctgggcagtagatgagattacccaaggggatcggtagaaaaagaaggcaaacaggctggagatggggcctcaaaacatttcagatgttttaaggtcaaccgtatatgccctgagaagtccctgtgtttaccactaggaaaacgtttgtaggaggcacagaaatagcacagcattaagccataagggagtgactaacctgaaaccatgatgctttggggtaggatggtcagagggggctcacagatccaaagtctgtaatcgcaggtgtctggactctcaggctacatatacaatttcctaaggaatgtcctgctttgtctgcgtcccgaatctgtgttgaaagatagtaaactggggtgatggagtacatcctggcagaggctatgtggggagagcagagatgactctagggaggaaaacgtcttttaaaaaacaaccctgtctgcnnnnnnnnnnnnnnnnnnnnn

SEQ ID NO: 11171 - DNA, 322 bp, Homo sapiens
  misc_feature 1, 2, 36: n = A,T,C or G
nncgcgttatacgacttcctataggggcgaattggnagctccaccgcggtggcggccgaggtaccttgcctttggttaccccttctctttacaagggcagggtaaaatatggggctcagctaggctgtgggaatagggaatggtgtgggagaagcttgggcctaggagcaacatctgtgggactcttccttctatgcccttctgaatctattgagaaggatcagctaactctttggtgctatgctattagaaacccggaattaaaatagaatatttcttaaaatggaagggcttgcagttaactcaggtctgtacctgcccg

SEQ ID NO: 11172 - DNA, 1635 bp, Homo sapiens
  misc_feature 1, 1635: n = A,T,C or G
naacatttcaattgcttttaccacccacagacaaccattattggatgatttttctcaaatgtttctccattttatttatttatacagtggagatcaaatatgtaaaattttgtttcctacatgtttttttgatttttacctaacaagcatttttccactctatggcaaatcttcatatgcattattttaatagctgcataatattctgttttgcaggtaaattatcttttaggccattttccatgactggacaatatgtggatatactctaatagtaacacacattcgtggcctttctcataaaaaatcattacaaatttccaatttctacaattgctcatggaggacaactaaagccttggctaaaaacttagcgacttaagtgtgaaacacagacacctccccagtaaattgtttacttgtccagaacgcccacctccagccatgtcacagaaccatgtacaactcttccttagagaagcggctctccgccttcattttcttgtctctgttgtaggtaatatatttgacaccaggagagaaaacacggaggacacagaaccaggtttcattgcctagactttgattttagtgacattgttgagtggcatatgtaacttccgtttgaatttccacaaagatccacgtagcatttcaggttcctgcaaagtgtgggtgttctgtcaagcttacctgtcatgtttgaatagtttcatatactttctttgtaatgtgtgataaccaagcctccaatctggtataagattttttaaatcatttttagggttgatttgttaccctttaaaagtccagcacatgattcagtgagttcattgtccattataaagaagtggttctctcttccctgttttcattcaaaacctcagtatgaatatagagctttgaaacgtatttattttaatgtaaattgcttagatgcagtataaaggagaatggctctttccagtgctgagagagcagttgtgaaggccaagattaattagaccttcatcatcttagaagatgaaaaagttgttttgggagataggatagctctgacctgtaagatgaaatcattcatgacgtcagtgccccccaaatagccatttgtaactgagtaagtgcaaatgacctatgagttcttaggaaagaaaaacctttcacctaagttgcgtcaacacaatgacaaaataactaattaaaaggtgagaaaaccagtaaattatctacatgatacctgacagccattttaacagatggtcttaacggagtgctacagggttttggcaccatgtggtaactagctaaaaatgtacttaatattatgtcatttatttggttcctagtatacttgccctccactttatataaaactaatttatgaaaatctggatttattttaaaaagatatcttgccatgaaggtatttgttttatagaaatatttacctccagatttctttctctaataagatggtgaatttaaaacactgtgttatttagaaacactgcatttacacttcatttattgtataaagcaaattgcattgaatcttcgccacttgacccaaaggccaaaaattgacatgagaacaatttggactacacatcaccaaaacccggggttcacacctgn

SEQ ID NO: 11173 - DNA, 359 bp, Homo sapiens
  misc_feature 1, 2, 3, 355, 356, 357, 358, 359: n = A,T,C or G
nnnacaagtctgaagccaaccttgatttttttgaagggatatacactaaattatagaaaattattttaatatcaagaacaaatggctaaggggacaggatttactgcatgagttttagcactgagtttttctgagtcatctaggggaagggagatgggtaaaattgtaacaaatggcaaaatacacacacaaaaggttttcttaaataacaatagcactgaaaaagaggtagtccggaagccccagtcattgccttatgtctctttaaatcattcttcaagtggagatttatttcgacgccattctcctgcctcagtctcccgagtagctgtgactacaggcgcccgccacgacnnnnn

SEQ ID NO: 11174 - DNA, 1059 bp, Homo sapiens
  misc_feature 1, 2, 3, 1056, 1057, 1058, 1059: n = A,T,C or G
nnnacgcgtccggttacccatctacctgtagtaatattttggatgatcttgatttactagccaagatggaccttgaggataacccctgggactgctcctgtgacctggttggactgcagcaatggatacaaaagttaagcaagaacacagtgacagatgacatcctctgcacttcccccgggcatctcgacaaaaaggaattgaaagccctaaatagtgaaattctctgtccaggtttagtaaataacccatccatgccaacacagactagttaccttatggtcaccactcctgcaacaacaacaaatacggctgatactattttacgatctcttacggacgctgtgccactgtctgttctaatattgggacttctgattatgttcatcactattgttttctgtgctgcagggatagtggttcttgttcttcaccgcaggagaagatacaaaaagaaacaagtagatgagcaaatgagagacaacagtcctgtgcatcttcagtacagcatgtatggccataaaaccactcatcacactactgaaagaccctctgcctcactctatgaacagcacatggtgagccccatggttcatgtctatagaagtccatcctttggtccaaagcatctggaagaggaagaagagaggaatgagaaagaaggaagtgatgcaaacattctccaaagagtctttgggaacggaaattattcacaatcacggtccactttgaagttcaaaaccaggaaccagctcacagagatttaatccttcaggaggcaggcaatggtcgaacatttttgaaaagaaggggcgttcccatggtgtccaagaatactttgggaaaacattttacgctacccgtaatagggacaattgtggggacaaaacagtgtttgtaaaaattcacccacagggtttggcaaccaaaaggttgttccatatagcatcgctaagttaggacaacgacgagtgaggactaaaataggaacaactaataagtagcagactatatatttacttatttttattttttcttgtgttccttatctctcannnn

SEQ ID NO: 11175 - DNA, 340 bp, Homo sapiens
actacgctcttgatacgaaaaaatcttatcacgtgcccagcctctctcacagtcagaaataaccatgtgacacagttctagccaacgataacatggatcagctacatgaaagagggatgatggtattggaagcttttgttttacttttaatagggaataaaaattacaagtttcattttgatatgaacaggggatggaaatactgggtagaagagcgtggttccctggcaaaggctaccccctcaagcctggaaacccacaaccttaaatgagaagaggcaattcctgttttttgcaccttgaaagttgccttttggcctcccatgccctcccatcctgt

SEQ ID NO: 11176 - DNA, 1327 bp, Homo sapiens
  misc_feature 1313, 1314, 1315, 1316, 1317, 1318, 1319, 1320, 1321, 1322,1323, 1324, 1325, 1326, 1327: n = A,T,C or G
cacgcgtagccctggacctggcccattcttcatgtccccttcccaagcctccaagcccacatgggcacttgccaagatcagagctccaggggcctccagggacggggttttcagtcctttgggaccatgatccacagagagaaattgatcctacttgagacacaggaagcaacacatgtaatgcaacagccaagcacccaacgatcatctaatgcaacagccaaacacccagtgatcatctaatgcaacagccaaacagacaagtgattatctaaggcaacagccaaacacccagcgatcatctaatgcaacagccaaacacccagcgatcatctaatgcaacagccaaacacccagcgatcatctaatgcaacagccaaacgcccagtgatcatctaatgcaacagccagtcagtgatcacgggaagggccaggtcctatttcaggggctccacccaaagtccccacccacaccaattgaaggacaggacttcaattatcctcatttgcaaaatgaggaaacagaggaactgagagcaaagtgacttgtcccacgcagccgttagaggtagagttggaggtccaccttgaggtgaccaagctgcaaagtctggccactgaacaccagacctaggcaaagatttcccaacccagtttcatctttctgcatgaaatacacacagacgttttttctcttctctacttttatttttatttaattttaaatgctggttgagagccacttcttaacctggggtctgtggacaaaaatcagaaatcaaaattcagagaatccatgaactgggatggggggcggaaattacctctttttttttttattgcccttgactgaaaatttcatgtttccttcgggtatgaatgtgacctcacatgcaacacccatgaaatgaccacatcaaatactgttgtcacagacaccttgaaatttacagccgtcaccacttcaaaattatggtgatcagacttgccattcaacgtgttgataatccaagcccaggcacagaacacatttaagaaaacattttgggctgggcacagtggctcacgcctgtaatcccagtacgcggatctccacttttctatataactcctttctcctcttctgtttcatgtcctgcaaattctgtatttttattacactttggaaaaaaaaagaaatgataaacttaatgatgattcttataattaagaaataattttcgtagataaagaagggtatgttgctagctatcaccctaagagatgaagaagagaagaatgtttctaatgaacttcccatttagaaacatcannnnnnnnnnnnnnn

SEQ ID NO: 11177 - DNA, 1040 bp, Homo sapiens
acccaatgaagtgaatgtgcccccacaacatttaacagtcacatcagcaggaaagggaaaacgactgcgaaaatgtaaacaattccttgcttcagctacttgttaactatggctgcagctgtctgagccagctgtccagtggtagcctgattcccagcgtgcatctggaagcagtggaagaatgccaataaagaataagaaaggaccaaatatgctagtggaaaccaactaaccatgctaaggcttccacctccatatgtgtggagggaaagccctaactctgcctcctgggaatgccagtgtctccttcttagtcagttaattttacaacctttccttgttgcttccagtcatcctgtcttcttaagtcttgctgtgtttccaaaacttattttttttcataattcattatattgctttcccactatagctctcctcaccacttagaatttcttttgtttctagtcctgtttctttagttgctaatatctgaaaatattatgagtgagtatttattgtgttatttaacattcttgaatcttcagagtggccaacacttttgttgactcttcacaataacctattaaaaatgcgccttatagttgatgctcaaatctggccaagatggagaaaaagcaatcagatttaccttctggggccttaaaagattagaaaactaggtgaattacaagaaaacagctcacaagtcacatgacatgagggaacaaaaaccagttattcctgaaaaatgggaaacaactgaagtgaactccagtttactgactgcagaaagtttccaggacatagtgcagacagtggcaactcacacagaggccagcctctcagagttgaggaggtggaactggaagtgtagggggcaaggtggctggagttcacagaagagtgcgagagggaagagaactgcaggaagaacagactccaagtatcttcagaggaactctgcggctgggctgtctgagccagctgtccaggggtagcctattcccagcatgcatctgtagatggtgttcattttgagt

SEQ ID NO: 11178 - DNA, 521 bp, Homo sapiens
  misc_feature 519, 520, 521: n = A,T,C or G
acagaagaatttgaaaaacacagctgctgaagaacatgttgctcaaggagatgccactcttgaacattccacaaatttagactcctcaccatccttaagttcagtgactgttgtgcctctgagggaatcgtatgatccagatgtaattcctctgtttgacaaaagaactgttttggaaggtagcacagccagcacctcccctgcggatcactctgctctccctaaccaaagtctgactgttagggaatcagaagtccttaagacaagtgacagcaaagaaggtggtgaaggtttcacagtagatacaccagcaaaagcaagcatcactagcaaaagacacattccagaagctcaccaggctactttattggatggtaaacaaggaaaggtaatcatgcctcttggaagtaagttaacgggcgtgattgtggaaaatgagcatattaccaaagaaggtggcttagtggacatggccacgaaagaaaatgacttaaatgcagagcccaatttaaagcagannn

SEQ ID NO: 11179 - DNA, 903 bp, Homo sapiens
  misc_feature 1, 2, 3, 903: n = A,T,C or G
nnncagttatacagactcaattatggggactgaagattactgcatgacttgtatgatctgttgctaactcaggtgtctaaatcagccagcctttcggatatattaataagctactaatcgtgtctgtgtctgtgtcagtgtctctctgtaacatgacctctcttctcttcctcctcctgctttcctttgttcagagaagccaccgaaaactcacccattctggatgggtctgagtctccacctcacccaagtactgatgaatagaggtaccgtaaggggagttttattcctactgcccatgagtctgtggtcccacatgtgttgcttttgtccatgtcatcatttccacaaggatacatctgaatgctgtatttatgccttatttctagatacatggggaactggaactatgtttttagctgaaggttcttacatcaaaattatgatattcctaacactgcttcccagaaaagacccccagagtatgttttgttttgagacagagtcttgttctgttgcccaggctggagtgcagtggcatgatctcggctcactgcaacctctgcctcccaggttcaagcgattctcctggctccctagtagctacaggtgcatgcgtggctaatttttgtatttttagtagacacggggttttgccatgttggccaggatagtctcaaactcctgactttaagctgtaagtgatctgtgcgcctggccccaaagtatattttagactcaccatgttctatctacattcaaagatttgtagacattttactgtgagtaatcagtgtccccgaaaagaacagcatcactgcaatgtaagtttcaaagcaccaagggccgactcagtggctccagaagcacccccagcattcttgagtaacagctgtgctgagn

SEQ ID NO: 11180 - DNA, 3080 bp, Homo sapiens
  misc_feature 1, 2, 3, 4, 5, 10, 12, 18, 20, 22, 23, 24, 26, 27, 29, 31,46, 48, 51, 55, 60, 64, 65, 66, 70, 75, 76, 78, 80, 87,92, 93, 109, 112, 113, 120, 121, 131, 132, 135, 140, 143,150, 152, 163, 164, 166, 167, 169, 171, 172, 173, 174, 181: n = A,T,C or G
  misc_feature 183, 188, 195, 196, 201, 202, 210, 214, 215, 220, 236, 242,252, 253, 256, 261, 267, 268, 272, 275, 277, 280, 281, 286,287, 290, 291, 295, 302, 306, 310, 316, 330, 333, 347, 351,383, 400, 417, 435, 447, 452, 466, 513: n = A,T,C or G
nnnnncccantngggccnantnnnannangncccaccccaaacacntntcngggnagggncctnnnggcnccccnnananagggttnccccnntccgtgggccccgccnttnnaggggcnnttggcccaannggnaaacnccnacccatntngggccaacccnntnnantnnnnagggatntnccaanttagccnntgggnnaaaaaagncctnnttttnaaaaaattaccccggnatttanccaaaatttnnccncttanaaattnncaanccncnaannaaggnnccnnaacntgttggnaaangccnaacggntcaggcccccatcnccnattaccccaagatngccnaaaagggggatgtcccttcaaaggccgattanaggtggggtaacccccnaggggtttccccaaggncaccaccgtttgtaaaancgacgggccaantgaantggaaatacggccncactatagggccaaattggggtaccgggcccccccacgagtttttantttatggcgttttttaatgctgaacgtttatctaaggctgacacttttgagatcgtttttgcaagtgatgcattctcactatatcatcaaagcataaaatattcacaaactgatcaaatctcaaagacaggaggaatttgtgaaattgggaattgtgtgccatgtcttatggccacctctctcaagagatacagtgttcaatgaagaagctgtaaatggccttgtgggtgcctctcttgcccagtagtcacatctttgaggcaggcacaggtaacaaagtgatgctgatgtgaatggaccaatctttcaagacacttgatgatttcataatcaggaagagcaaggctggtcacgttcacgcctgccgtctgcgacaccacctccctgaagtctgccagctgcttttctctcttttctgcttcttccagagatttttttagtgtcttcatttcactggttaccacttctatcatgtttctggccctttctttattctccttagcctcatgttctgtggtatccagttctgacttgacagacatgagctttttctcagctttctccttcatcttctccagttggtctctggatttgtttagatcttcaatggctttagtctgttccaaagttttaatcttcagttcattggtgtcggccagtttggctttgagctcggtgtgcaagtctcgacacgtgttcagctctttctgcagcctctccaccttcttctgcaagttcctgatggtaagatgcgcgttgtccctctcaaccaccaaggccgtgcgtgcctgcttctcctcctccagctgggctattttctgccggaggaggctcatgtgtaattctttgctctccagtctctctttctgtgtctttagctttctctgcaaattgtgggcaatggtcttgttctcaatgactgcattgctctcaagacgaaccagctgctctgttcgagctaaaaccacgtccagccgcgtgtcaaagccaagttcggcagccatctggtccaacttcattttctgagaaagctgatccagaaatttaagatatttttgtttctcaaaattcaagttgtctcgcaaaacacctccagaaaccagctctgcctccaggtgtgtcagctgaccctgaagagtctccaacatattctctgctttctgggccctctggagagctttctggtgaaacccagactcctttcccaactgttcaacaagctcagatatttgggcttcaagctgggagaccatccggtccctgctttcttcccggctgtccatttctcgaatcttctccaaaatggtgtcctcagtggacccagtcatgctcaatctgcccctaaggagggctgcgattttctccctaaatgaggagtactggctttgtgaggttgtgactgcatcctgactggccttcaaactcttctccaactcagaagagcttttcttcaggaggctcacttcctgctttgaggcatcccagacctgctggccagcaagcagcctttcttggaagatcttaacttccctttcaagagcttcttttgcttctacagcactgagcaggtcctggttcagcttctctttctcttcagtacaggaggcagcttttttctgctctctgttgacttctgaagccagcctcatgatcgtttctctgctagcttttgcttccatctcatggacatttatagtctcttcaagaataacaatttgtcctttcacgaattcattttctttgcgcaggtctctaagctttaaaattaaatcttcatctgatgccttgtcattcctctcatctggatccaagcagtcacgcagttgagtcagaaattcctcatgtttcctgcaattctttgaaacttgtttcttattctcctcattttcttttgaacacttttgtaatttttcatttaactctacaactttcttctttaattcctggttctccttgattgcagcgtgagctgtgatttctgttctgattttagaagtggaaagtgctgctgattcttcttctagttcctgaactctgtctctcaaagaggtaaggagagatgattttctggcattgttttccttgtagctctccatttcagctttcagttcttgacaggagacttctttagaaagcatcttggatcggaggtcttgaagctcagactgagcacattcaaatttgaccaaagttgctgcaagttcacttcgagcattttgagccacattccgatagtggtttaactgctcccgcgtgaccgggacttccgaaagatgatcgtaagtttcctcgggcgctggcgaagcggcacccagcgcgatatggctggtgcagtccaggctcatgacgacccgagcccgggggcgcgctcggacccggaaccggccctgaggaagcggcggcgccgggagccggcgggtggcgcgggtgtctcctcgggcaacgggtaaacaccgcggggacgcggcggcgcgcggctgcgcgcgagtagggtggcccgcccgcaggaggccggggtggaccccgaacccccgagcgtggcctccgtgcggacgcgtgggcggacg

SEQ ID NO: 11181 - DNA, 433 bp, Homo sapiens
  misc_feature 432, 433: n = A,T,C or G
acccattaagtagtttttcgacccataaactctcctgtcccagtagttcacagtatctgttgttcccatgtttatgtctgtgggtgctcaatgtttaggtcccactgataagggaaaacgtggtatttggttttctgttcctgcattaatttgcttaggaaggaggattttcttaaacatcagtctgccttttctctaaggctttatgatatgaggcatccgtattcattgaatatggagcttagaaatataggtattgaggggccaccacaccaggctgacttcttgatcttgaattttataaggattctaaagggcattgggtagttccaggacatctgagaccttgagggagggtgcattcctctgatttttgtgcctctgccagcagtctggcttctaacaaagtggtcaagggatgctgacttacann

SEQ ID NO: 11182 - DNA, 373 bp, Homo sapiens
ggccgcccgggcaggtacgcgggatttgtgtgaccttccaccttaattttcatcacatgtggactctagtatcacctggattattcagattgattttcttacttaaattcagtagaaaaattgtgaatctgactatgaggggaggcagtatgaactcattaaatatgtattcctgtttggagaaatattcgctggatagctagaattttagattgggaaatcaggttttacatcagcaatcaaatgaatagtagtttagaagttttattttttaacttctcattttgaaataatttcagatttacaaaaaaattgcaaaaatagaacaagcaatttcagctttcccagtgttagcatttcatataaccacagt

SEQ ID NO: 11183 - DNA, 1170 bp, Homo sapiens
  misc_feature 1, 2, 3, 4, 5, 6, 7, 8, 9, 11, 1168, 1169, 1170: n = A,T,C or G
nnnnnnnnnancaaatcactgaagggaacccaagttcccaaaagtttacttgtagctgaacaaaaaagaacagacagttctgaaagtggaaaatgatgtccccgagagaacacagagtaccaacggagtatctgatttctcagggccttccccaggacaagggagctgccactgccaagtgctccctagcggccagcaagcgagcttgcaggtgatgggacctgcagtgacactgccatgtggataatcaggtgtcttgtctgtattcttttatcacaaattattgttcgttacttcaagaaagaaacaagaaataaaataggaaaaaagccagagacaagtcttttttttttgccctgctcctcaaaaacgagaatgagaatttattctaacacatcatcttttcagcagacagtaataaatgaaccgtgatggaaggtttgagtagtgagaggtctaaagggccaatataaaattggaaaagataattaaaatacttagaaaaacactgcataaaacccaacgtgcaaggccaaatcccacacctccgcaggcagatgccaaaaggtgctgtctgcaggagggtttttgttaacgggttagaaaataggagagatggagcgagaaaccgctctgcattataaatggcaggttgtgacatctttaaaagggaggcagagtggaaaacaatcatgtatatagcctagtccgtttggaatttcattttcaacttaaggagacacatgttagccatagagaaatgacgcatgatttatatccatttgttaaaaatattctgatttcattccacagacagttgtaacaaataatctatgacaatgaaaaggaaaacagaatgaagagctgctagtcttccagcggcagcctaggaggacgaatctgaggtgcactgaaaccaggtattactgcatcgcggtttagagtgtgggatccagagttagactgtgtatggatatgggctgcaccaggtactgggtaaggttaggctggtcactaactgctctgagtcttagaatggagacaaccatacttcctaccatcagagggttgatgagagtgattggaaagtaaactccatgtgaagctcataacaggtagtgctcacttaatgtcacctgcatttgtgatgattcagaatgataatgannn

SEQ ID NO: 11184 - DNA, 1150 bp, Homo sapiens
  misc_feature 1143, 1144, 1145, 1146, 1147, 1148, 1149, 1150: n = A,T,C or G
actaaagaatgtgcatttatttgtggggaggagaggaggtctaaatagacaataaacatataaatattaatattgtgaaagtggtatgaagaaaaataaagcatgataaggagagagaggtgttccctggctctccagagggctgaggtggaagaaaaggactcctgttttaggtaagatatcagagaagacctctctgattgactgaaatgtatgcaaaggcctgcatgaagccagggaccatgccgtgctgacatctgggggaggattatcctcacagaggggaaaggaagtgcaaatgccgtgaggtgggaggaccatgtttggtatgttcagggaggaacagggaggccagtggggctggagcaggttcagccatgggaaggccaaagatgagatcaaagagaatagtgggagatcacgtagagatttatgggccattgtgaggattgtggcagcattgagaagactggttgatgcttaaaacaacagccattttatttaatatctcatgattttgtggtcaggaatgtggacagagctcagctgggagattgttccactccatgtagcatcagaagacaggtctcttggtgatattcagctggagaataagttaatatgcagagttcaagatggtttcactcacattgacaccttggcagggatggctggagggctgggctcagccagatcagttaactggcgtgcctgcatatgcactctccaccatggtggtctctagaattgactcaaatctagaattggctggaagacatagtgggagaaataaacttagcagccacatttagtctaccacatggagtaagagagaaagaaaggagtcaaaggggcctagtttatttcaatgtgatttaaaattgtgacaacatagaaataaccaaaatatccaactgagaaaatggctaaatatattatataggtttacattcacataatagaatagatttacatttacataatagaatatttgcgaatgtaaatctgtgtaataagccatttgagaatatcgatgaatgagagaagataatgcatgatatgcctctgtgtgtgtccatgtatgtgtgtgtgtgggggagtgcatgtttgtatttgtgtacccatgaacatagtttttatgcnnnnnnnn

SEQ ID NO: 11185 - DNA, 6474 bp, Homo sapiens
  misc_feature 1, 2, 3, 4, 6473, 6474: n = A,T,C or G
nnnnggcaagtcagtgcaagaggctgacttctgagaggcttccaggagcccgaagagaggacctccacgggagaagggagtgcgtgtgctcggttttttttttttctctcttttttttttttttttctgaatgaacagctttgcccaagtgactgaaaaatacagcttcttcctgaatctaccggcgtagttgctgaagagcgctctagacaggacatggctctgaagactcactctttggaatgtcctcttgctcccggcttataaacaactgtcccgaggaaagaaaggttttacatagccaaatacagcctgacaaatggcacttcggaactgtgctttctgatgacaacgcgttcgatttctgacaaagcctctcgcacgctgcccctggagggaagtcctaagtaaaactcagaccctccttaaagtgaggagcgagggcttggacggtgaacacggcagcatggcatccgcggggcacattatcaccttgctcctgtggggttacttactggagctttggacaggaggtcatacagctgatactacccacccccggttacgcctgtcacataaagagctcttgaatctgaacagaacatcaatatttcatagcccttttggatttcttgatctccatacaatgctgctggatgaatatcaagagaggctcttcgtgggaggcagggaccttgtatattccctcagcttggagagaatcagtgacggctataaagagatacactggccgagtacagctctaaaaatggaagaatgcataatgaagggaaaagatgcgggtgaatgtgcaaattatgttcgggttttgcatcactataacaggacacaccttctgacctgtggtactggagcttttgatccagtttgtgccttcatcagagttggatatcatttggaggatcctctgtttcacctggaatcacccagatctgagagaggaaggggcagatgtccttttgaccccagctcctccttcatctccactttaattggtagtgaattgtttgctggactctacagtgactactggagcagagacgctgcgatcttccgcagcatggggcgactggcccatatccgcactgagcatgacgatgagcgtctgttgaaagaaccaaaatttgtaggttcatacatgattcctgacaatgaagacagagatgacaacaaagtatatttcttttttactgagaaggcactggaggcagaaaacaatgctcacgcaatttacaccagggtcgggcgactctgtgtgaatgatgtaggagggcagagaatactggtgaataagtggagcactttcctaaaagcgagactcgtttgctcagtaccaggaatgaatggaattgacacatattttgatgaattagaggacgtttttttgctacctaccagagatcataagaatccagtgatatttggactctttaacactaccagtaatatttttcgagggcatgctatatgtgtctatcacatgtctagcattcgggcagccttcaacggaccatatgcacataaggaaggacctgaataccactggtcagtctatgaaggaaaagtcccttatccaaggcctggttcttgtgccagcaaagtaaatggagggagatacggaaccaccaaggactatcctgatgatgccatccgatttgcaagaagtcatccactaatgtaccaggccataaaacctgcccataaaaaaccaatattggtaaaaacagatggaaaatataacctgaaacaaatagcagtagatcgagtggaagctgaggatggccaatatgacgtcttgtttattgggacagataatggaattgtgctgaaagtaatcacaatttacaaccaagaaatggaatcaatggaagaagtaattctagaagaacttcagatattcaaggatccagttcctattatttctatggagatttcttcaaaacggcaacagctgtatattggatctgcttctgctgtggctcaagtcagattccatcactgtgacatgtatggaagtgcttgtgctgactgctgcctggctcgagacccttactgtgcctgggatggcatatcctgctcccggtattacccaacaggcacacatgcaaaaaggcgtttccggagacaagatgttcgacatggaaatgcagctcagcagtgctttggacaacagtttgttggggatgctttggataagactgaagaacatctggcttatggcatagagaacaacagtactttgctggaatgtaccccacgatctttacaagcgaaagttatctggtttgtacagaaaggacgtgagacaagaaaagaggaggtgaagacagatgacagagtggttaagatggaccttggtttactcttcctaaggttacacaaatcagatgctgggacctatttttgccagacagtagagcatagctttgtccatacggtccgtaaaatcaccttggaggtagtggaagaggagaaagtcgaggatatgtttaacaaggacgatgaggaggacaggcatcacaggatgccttgtcctgctcagagtagcatctcgcagggagcaaaaccatggtacaaggaattcttgcagctgatcggttatagcaacttccagagagtggaagaatactgcgagaaagtatggtgcacagatagaaagaggaaaaagcttaaaatgtcaccctccaagtggaagtatgccaaccctcaggaaaagaagctccgttccaaacctgagcattaccgcctgcccaggcacacgctggactcctgatggggtgagactatctactgtcttttgaagaatttatatttggaaagtaaaaaagtaaaaaaataaatcatccaacttctttgcattacttaaaagagatttctgtaatacaggaatgactatgaaggtgttataataaattattctacatactcatttgactggataaactttacataaaattaactaattttttaaataaatgcattgcttaatggtttctcattatgtttatcaaaaaacaactgtagctgttattttcagtacttggctgcttttctgtgaaaattattattttacttttggaagacaagattattagaatattgaagaaaaattggagacttataatcatggtaaatataaaactaaatatgttttaatatttctgaatttttcttttccatcacaatgtaagatatgcagaatacaagatactttggcattctcatgtgaactttctgtactctttaaggattattttattagtgttgtttaagccatgagtgttaagtagcaggtgtgttgtgagtgctgtaacccatgaaaggaaaaatgtcattctgaggcttgtgcccttcgtaaaatattcattaaagtacattcacactatttttgctttataacacagtctttaattttcactcactgtggaaataaaaactaaggtaacttctcagaaagatatcaaatctcagaaagaatgtcaaatcagatgaagttatagttaggattctaactactgtaaaagatttttgcttccctcttgtggtaaaaaaaattatattctcacacatttcttttttctctacagacggatatctgtttaggaaagatttgaaagcagattatcagtaggtacatggatacatcaagttcatttgcagaaacaaataactgaaataaaaaacatgttaatccttgtatcatactttaatatgaaagtattgtttatagataatttatctcacaagtcaaaaatgaagattttgcagcactgaaaatctattaaagctccaaattttaagtttctaaataatcttcgctgaaatctaaaatatactataacaaccgtgttttatttgtgaaaaaaatattaaagtgatttgctctcaaatatcaaattttcttctctcttttatattaagagacagaaaattgtttcatgagttcacttaactactgagatattcagagcatttttacctctctcttaaatgttataaaaaacaattgtatttttaagaatgtttatttatcaaagtctttccttcttctattaaatatttagcaattacctttctaaaatatgaaattttgtaagatgttttcacctaaataaaaattgaaagcaagtggattacacaggagaaccattatgaacatttatttagatattaatcttaaacagtgtttatttcagttttcaaagttagcttataggttatacatttaagttaaagtgctcataatcacttgcaatttcattgtaaaatgaacaaatacataaatattttaagaaaaatttaagtttattcagataagtcaccatgcttcaaaagatctaagaaatgcaaatatactgaaaattgacatcctctgaaaattccacttgctatttacccaagaatccactggaggtcattactgccattaaataataactgaaaagactatgtagtgaaatgtatttttaaaaactatattcagtaaaagcctgctcaatttggagaaatagaaccacaaacacagatcacaggggccttacaaagtttatgtctgaacaaataagtcaattaagtacactttattgaaaattgccttccattaacacacaagaaagaaagcaggattttctcctgtatctgaattttaaaattaaaaaggcagataagacataaatagttatcattttaattgcaataacacagacaagtagttaatgatgataacaatggtgtaacttgtaaactaaatatttggtaactgaagcaataggcagaggaaaatagcttttctatgacacaagtcataagaagtccatatactgaagagcgtttgattaaaataaagtgactattaaccagaaaagaaacattttacataaaatgctaaaatttattataggaaaataaatcaaacccaaagaaagtttattcaatgctaatttgaaagaaaattgataagaaaactttgagggcccaagtccacaatttggtgagaccactaaattttacatataattatacacacacatatgtacatatatatgtatataatcttgcttcccgcctgtttatggcagtactgaagagaaatgggaaagaagagggagggagagagaaagacgaagggagagagaaagcagtttccaaggatatgtttcatgtcccaccattttctcagtttctccctctctctcccaacacacacacacacacacccctcacatactataaaataaatcttcactgccctatcaaaatacaaataaatcaatctatgctgttctgtccttcttgagaatctaaaacataccacaaaaatacatccccagtcttttgttctgtctgaggttagaattaattcaaattcagaatctgttgtgagaaatgcccaggctttaaaaattaaaaatggatggatcttctctgaactcagggagggcacatacttagatacctacaagacttggaggaattaagagttcacccttcatctcaccaaattttccccatttttctctttcttgtagaaggagagaaaccatgctctctagcaacattgagcaaaaatcataaccactcatctaatttctaagaggcacctccatcgagggccggtctcctgcttctttagacctcttctatctttgttacaggagaggacctgtggatagacttagttttgacataaaacaatgcccattcacctcctccttcagcacaacgtcacccattgggcaagagatccagatttgttaacaaaaaagattttacttcgtgattccacgtctataattctatattgctaattttttcttttgtgtgaattactgaatatttcagagcaaagctatcaacttggagaaacagggattaaaaataaggataaacactaataagagctctagaaaaaagggaacagaaagtctgcctgtttagtaagtggcaattccatacatattttagagttttttctatctaaaattagttaaatacttagaatgtttgtaatgagtgttcgatatttgctataggttttagggttttgtaaatcttcatagtaattataaacatttgtaaaatttgtaaaatactataagtcattttgagtgttggtgttaagcatgaaacaaacagcagctgttgtccttaaaaatgaattgacctggccgggcgcggtggctcacgcctgtaatcccagcactttgggaggccgaggcgggtggatcatgaggtcaggagatggagaccatcctggctaacaaggtgaaaccccgtctctactaaaaatacaaaaaattagccgggcgcggtggcgggcgcctgtagtcccagctacttgggaggctgaggcaggagaatggcgtgaacccgggaagcggagcttgcagtgagccgagattgcgccactgcagtccgcagtccggcctgggcgacagagcgagactccgtcnn

SEQ ID NO: 11186 - DNA, 621 bp, Homo sapiens
  misc_feature 1, 2, 3, 4, 593, 614, 615, 616, 617, 618, 619, 620, 621: n = A,T,C or G
nnnnagagaggagctgagagggtagaatggaggatgcgggtcctgcctttcagtgcacaccctggatgtaactgagaaccctgacatatctgaagtagggtaaggtgcagaagaggtcaagacagacgcacaccaacctcatcactcctccgtgtgttcattcctggccccatggacagatcggctgggaaggaaactgccgcgtgtgagctctaattactagagatggagacgctcaggtgcaagctgcctaattacaaaagcccagaacacacatgctctcagggggcccaccagggttaaagagactgaaaaaataattttgggctgcgaatttaagtgaggatgaacaccacgaggagcttcatatgcagaaatgaagtcctggctttcttaaaaaaaataaaaacactaatgcctcaacaacaactacaacagaaaccctttgggtttattatttcaagccaggtcatgctagtttcacaagagtttgtgaaaatggatgcacatgaatagagcctttaaaaactcgtgattaaagagaaagatttcacagttgatggtttggtagatggcagtcataaaaacaattngctctttgtatatgtattggnnnnnnnn

SEQ ID NO: 11187 - DNA, 623 bp, Homo sapiens
  misc_feature 595, 596, 597, 598, 599, 600, 601, 602, 603, 604, 605, 606,607, 608, 609, 610, 611, 612, 613, 614, 615, 616, 617, 618,619, 620, 621, 622, 623: n = A,T,C or G
actttctctcccagctccaggcacttcttccctacttcaccaggctggaatggtcagcatggcatggtcagctggaatggtcaacatggcatcctatgttttggagtctaactggcgtgggtgtcctgcctcttccatccactttgcacaagttacttatcctctctaagcttcagtttccttttcctcatctaaagaatggaaacacgtctgttaggattctttgattgcaagcaacagaaacagattcacttttgccagaaagggtaatgtattggaataatcttagttctctgccagaaacaaaggaaaaggccttgcaaagaatggaaactaggcaactccatggatcgagatgacagaagaagtatattctcctcagcattctgacaccagaatgactccaccctaaccatttgtcatcctgggttctcacagggtaagcttgattggcttaccttgagtcatgtgtctccactttggtaggaaggaggggtaggggattttgactgacaggctccggaaccacaaggactggggcagaggcaactacttaaagaaaaattggagtgctgctttgaaaaaagaggaagannnnnnnnnnnnnnnnnnnnnnnnnnnnn

SEQ ID NO: 11188 - DNA, 615 bp, Homo sapiens
acacaggtaaccacatttagatggactgggatgttgccacacatacaagcattgataactggcttctcattacctgaatacattcttctgtcagagcaacagactcagctatgcttctggcaaaattgttcttaattctctattgattaatttattcggtaagtatttattgggtattttctgtctgaaaagtgcgattccaggtgctttatgtgtctctgtgtgtgggtgttatataaatacttataatactgtatccatactcttgaaaagcttagttgggaaggcaaggcatgcaataaggaacacagaattttagtcattccacaaccatctgttgaatggctgctattgttagtatcgtggtggaaactgagaagcaaagatgactataataggatctcttttctggagatgcacagtggacacgtagttatatgatgatgataaggactccagaatagttctatacatgatgctctggggccacatgcagattctgatgagaaacaattaactctttttggctgctacctgagaaggggtaattgtcactcaggaggtttttgccttttgaccaacatagaaaggagtgtgagtgaaggctagaggtgt

SEQ ID NO: 11189 - DNA, 500 bp, Homo sapiens
aggtacagaaggcatgaaaggcttggggcagacctattacattcctcatcttcttacagcccaagagaatatagactcaaagataatgatgcagaatctagagttctcaaatctgggagaaaacctcaggctctgggatttcctgtaagccctgcaacttctttctctccactccccagcccagaaaagctaaacctcatgaaacttcatttaatgagaagacttgagaaatgaaacactcggacttggaagtatatcgtgaagattatttggtcttctttggttcaaaatcatacgatgcttcactattaccattcagagcatcacagaagatttccaagtatcttaggccaagtgtggtggttcacacctataatcccagcactttgggaggccgaggtggacagactgcctgagctcaggagttcaagaccagcctgggcaacatggtgagatctgttatacctacagcctttgtacctgcccgggcggccgctcga

SEQ ID NO: 11190 - DNA, 1061 bp, Homo sapiens
  misc_feature 261: n = A,T,C or G
acgcggggctctcggccttagcgccatttttttggaaacctctgcgccatgagagccaaggtgagcggttcctggtagtaagcttgggaggtaggagttggcgagtagtagcgaggagacaaagtggaggaagaagcgaatgcgcaggctgaagcgcaaaagaagaaagatgaggcagaggtccaagtaaaccgctagcttgttgcaccgtggaggccacaggagcagaaacatggaatgccagacgctggggatgctggnactttttttttttttttttttttttttccaaatggtagcagttctgttcggcctactgccactggactgccatgtatgtaagtcccctcgataaactctgtgttttggttgccggctctgggtcccttctttggcctctcaaacatggtgccatccctattgaagtcaataggttctggcatgacactcattaacatggataactctaatgatacactatctttggtcaacattcacagaaaaatttaaatcttacactaattcaactattacattctctacttctgggttgctaagttttgttggataaaattatgctttctcccactgataatactatgatttctagtctccaatccccaatcttcaaaatttcatagtaaactttctacattttcttaatccatgttctcttcaatactccctggtagcaacttcaaaccatttccacttttctcaagaattctaccctactactagcctccttgttcatgcacgaaacagaatatgttaaactccctaagcattctggagtgagtagcactatccacagccagttgtataagcccgaaatacagacaccgtccttgatatctcctcttttcaccatggctctcatcttcttcttcaataggctctgttgcttttgtttctctaatctgtcttgaatctgtccctttccatctccaccaccactagtgtagtttcatccaggtactcattgctcagagtgaaatctcaggacaagaatcgccagcatcactgagggcttgttagaaaggcagattctcaggctcgga

SEQ ID NO: 11191 - DNA, 429 bp, Homo sapiens
  misc_feature 1, 2, 3, 4, 5, 6, 7, 8, 9, 10, 11, 12, 13, 14, 15, 16, 425,426, 427, 428, 429: n = A,T,C or G
nnnnnnnnnnnnnnnnccgcagtcccgggggcttaaaactcttcagaggttcaccaaatagaactttggggaatccttttaaaaatcaaacgcatacttggtaggggaactgacaatggcaaccagttgctcagagttatttgctcaaaggcctacctgcctcctaagcctcactgttcttcatcaactgtcaggggttaaactttcaagagctactcccaaaagagctgcaggaaaattctgtctaaacagccatgcaaaagtgtctggggatcactacggacagaggatgatgacagagggcccatgacattgggccttgtcatggctgaatactgaccttccactgtcatggctgaacactgaccttccagtgcctacagcttttaaaaagagtaaaaactatgttcatgggtacctgcccnnnnn

SEQ ID NO: 11192 - DNA, 3091 bp, Homo sapiens
  misc_feature 1, 2, 2978, 2979, 2980, 2981, 2982, 2983, 3085, 3086, 3087,3088, 3089, 3090, 3091: n = A,T,C or G
nncgacccacgcgtccgatgactgtttgaatattccaggcaattatcgttgcacttgttttgatggcttcatgttggctcatgacggtcataattgtcttgatgtggacgagtgcctggagaacaatggcggctgccagcatacctgtgtcaacgtcatggggagctatgagtgctgctgcaaggaggggtttttcctgagtgacaatcagcacacctgcattcaccgctcggaagagggcctgagctgcatgaataaggatcacggctgtagtcacatctgcaaggaggccccaaggggcagcgtcgcctgtgagtgcaggcctggttttgagctggccaagaaccagagagactgcatcttgacctgtaaccatgggaacggtgggtgccagcactcctgtgacgatacagccgatggcccagagtgcagctgccatccacagtacaagatgcacacagatgggaggagctgccttgagcgagaggacactgtcctggaggtgacagagagcaacaccacatcagtggtggatggggataaacgggtgaaacggcggctgctcatggaaacgtgtgctgtcaacaatggaggctgtgaccgcacctgtaaggatacttcgacaggtgtccactgcagttgtcctgttggattcactctccagttggatgggaagacatgtaaagatattgatgagtgccagacccgcaatggaggttgtgatcatttctgcaaaaacatcgtgggcagttttgactgcggctgcaagaaaggatttaaattattaacagatgagaagtcttgccaagatgtggatgagtgctctttggataggacctgtgaccacagctgcatcaaccaccctggcacatttgcttgtgcttgcaaccgagggtacaccctgtatggcttcacccactgtggagacaccaatgagtgcagcatcaacaacggaggctgtcagcaggtctgtgtgaacacagtgggcagctatgaatgccagtgccaccctgggtacaagctccactggaataaaaaagactgtgtggaagtgaaggggctcctgcccacaagtgtgtcaccccgtgtgtccctgcactgcggtaagagtggtggaggagacgggtgcttcctcagatgtcactctggcattcacctctcttcaggactgcaaggggcctactctgtcacctgtggctcttcctctcctctcaggaacaaacaacaaaaatcaaatgactctgcttttggggatgtcaccaccatcaggacaagtgtaacctttaagctaaatgaaggcaagtgtagtttgaaaaatgctgagctgtttcccgagggtctgcgaccagcactaccagagaagcacagctcagtaaaagagagcttccgctacgtaaaccttacatgcagctctggcaagcaagtcccaggagcccctggccgaccaagcacccctaaggaaatgtttatcactgttgagtttgagcttgaaactaaccaaaaggaggtgacagcttcttgtgacctgagctgcatcgtaaagcgaaccgagaagcggctccgtaaagccatccgcacgctcagaaaggccgtccacagggagcagtttcacctccagctctcaggcatgaacctcgacgtggctaaaaagcctcccagaacatctgaacgccaggcagagtcctgtggagtgggccagggtcatgcagaaaaccaatgtgtcagttgcagggctgggacctattatgatggagcacgagaacgctgcattttatgtccaaatggaaccttccaaaatgaggaaggacaaatgacttgtgaaccatgcccaagaccaggaaattctggggccctgaagaccccagaagcttggaatatgtctgaatgtggaggtctgtgtcaacctggtgaatattctgcagatggctttgcaccttgccagctctgtgccctgggcacgttccagcctgaagctggtcgaacttcctgcttcccctgtggaggaggccttgccaccaaacatcagggagctacttcctttcaggactgtgaaaccagagttcaatgttcacctggacatttctacaacaccaccactcaccgatgtattcgttgcccagtgggaacataccagcctgaatttggaaaaaataattgtgtttcttgcccaggaaatactacgactgactttgatggctccacaaacataacccagtgtaaaaacagaagatgtggaggggagctgggagatttcactgggtacattgaatccccaaactacccaggcaattacccagccaacaccgagtgtacgtggaccatcaacccaccccccaagcgccgcatcctgatcgtggtccctgagatcttcctgcccatagaggacgactgtggggactatctggtgatgcggaaaacctcttcatccaattctgtgacaacatatgaaacctgccagacctacgaacgccccatcgccttcacctccaggtcaaagaagctgtggattcagttcaagtccaatgaagggaacagcgctagagggttccaggtcccatacgtgacatatgatgaggactaccaggaactcattgaagacatagttcgagatggcaggctctatgcatctgagaaccatcaggaaatacttaaggataagaaacttatcaaggctctgtttgatgtcctggcccatccccagaactatttcaagtacacagcccaggagtcccgagagatgtttccaagatcgttcatccgattgctacgttccaaagtgtccaggtttttgagaccttacaaatgactcagcccacgtgccactcaatacaaatgttctgctatagggttggtgggacagagctgtcttccttctgcatgtcagcacagtcgggtattgctgcctcccgtatcagtgactcattagagttcaatttttatagataatacagatattttggtaaaaaaaaaaaaaaaannnnnngtcccccgcgcccctttaaaaaaaaggggaccccccgggggggggaaatttattttaactttttttaaccccccccccccggggggggggcccggccccccnnnnnnn

SEQ ID NO: 11193 - DNA, 634 bp, Homo sapiens
  misc_feature 634: n = A,T,C or G
acgcgggcaaggcttcctctttaaaaatcatacatttaattcgggtagggaacgacttggcttctttgttcctgtgaaagaagtatataaaaatgcccccttagtaactatgcagtcagcttactatctcagcaaagtcattgtgaacttcttccctgtctcaggttggaaataggaaccaattcaaggtagattaaagacttagggccgggcgcagtggctcatatctgtaatcccaacactttgggaggccgaggtgggtggatcacgaggtcaagagatcaataccatcctggccaacatggcccgtctctactaaaaatacaaaaattagctgtgcatggtggtgggtgcctgtagtcccagctactcgggaggcaggagaaccacttgaacccgggcggcggaggttgcagtgagctgagattgcgccactgcactccaatctggtgacagagccagactccgtctcaaaaaaagaaaaaaagacttaaatgtcagacctgaaactataaaactactagaaaaaacattagagaaaactcttcagaacatcggcttaagcagataatttatggatgaaatctcaaaagcacaagcaccaaaagcaaaaatagttgagtgggctataacn

SEQ ID NO: 11194 - DNA, 291 bp, Homo sapiens
aggtacagacattccctcattttactccattagaattctggacctcttctgtatttctttctgggccctgctacctcctaatctgcatctggtgctgggaacccaataagcccagcacaatgccagtgtgaggcattctgagatccgggattgggttgtgagactcctgactgaattactagccttctgagcaaggctacctctttagacccttctccagtataagctgcataagctctggctcattccacaaactcctgcacctaatcatgttcctggacctcagactgt

SEQ ID NO: 11195 - DNA, 1253 bp, Homo sapiens
accatgctggagttttgcaaaagcttcccaggtgattttaatgagtgtcaagagttgagaatcctgcccaagacttactaaggggtggcaaaaccagcccatttttaaccctcactttgaaacccttcccactattatcaaaagattggggacgggaacaagggagggcatcactgggagaggtttgttctctgccttgttgggaataagcgaaccgggatttctgtctctctgcacattgatctcccttcctcggaacacccctcttccactgtgtctatgggtgaattctcaggcatttttcaaggtggaactcagtgtcaccctttcagaaagtccttccctaccttataggcagaatcgcctcacccctggtaaagcgaccagtccactgtgaggcttgttatccccgtgtattccatctcatggggtcttcaccttatgtgtgcgtcctcgtttagaccacagctacctgaacataagcagggccgtgtcctatgtgtcttttattcttcaagcctagcatagtccctctataaaaagtgctcaataaatgcttattgtgatagaaaattcataatgtgactaaaatatgaattaataaatgcttaagactaccagctatgaagaaaggattgagtcttgttctgattaggtagtatacaacagaccattccaaatgcagtggctttatacaacaatggactatcatcctccccagcctgtgggttgactgggttcagttcctatgtggttcctgcctggagtctggttacagtcagctggaggcccaggaagggatcatctaaagactcaactgggatgggcgtgaaaaatggcctcttcccccacatgcgtgggccacagtcgcaatggctggaagaactgaggcctgaataggtggccatccacatgtgactcatttaggagtcctcacaccatgacagtctcagggtagccatacttcttacatgacagtggttttcctcaaacaagcattcctgaagacccaggccacactgcaaggcttcctatgacccgctcagaagtcacacggcatcacttctgcagcatgctggtggtcaaaagcaagtcacagagcagggcaggttcaggaggaggagacttcacaaggacatggacccatgtccaatcagaaacctgctgggattctccagaggaatcctttttcttccgtctgagttcagcaaacttcctgcttcctctacccagcgcagcgagcccctctctgt

SEQ ID NO: 11196 - DNA, 675 bp, Homo sapiens
  misc_feature 653, 654, 655, 656, 657, 658, 659, 660, 661, 662, 663, 664,665, 666, 667, 668, 669, 670, 671, 672, 673, 674, 675: n = A,T,C or G
acgcgggctttgaccaaagagtgctctgacacactgcattccctttcccctaggggtagcccatgttgagggcaagacctccagaaatcctgcagcacctccgggtcttgacagttcccctgtagttgccacggtctcagtgggttctaccgggttgtttgcaggaaatcaactcacgtggagacattaagggctgagattctctgggcagaatggcagcacacagccaataaagtgcccacctcctcagcttgggtttgacgtgagggtgaatgaaactttgcgaactggcctcctgatgctctgctcccaaggactcctcaaatggccaccagcagcagttcctgggcttgggggtgcagaggagctcaccaccattttggcagtcagcaatctggggcaggtggaaggggagcaaagaaacacccaacctactcttttcatgggattacaagttcctcagggggcattagcttccaaactcttgctgccttctttttctgcgccccagattcatcccatgggttctctgacaggttcggaaactcttccttcagtattctactctggccatgatcatttacctgtaactttggtttttatttctgagaagaaccagtagctagtgtctgcagtcagccatcttggaagcnnnnnnnnnnnnnnnnnnnnnnn

SEQ ID NO: 11197 - DNA, 644 bp, Homo sapiens
  misc_feature 1, 616, 617, 618, 619, 620, 621, 622, 623, 624, 625, 626,627, 628, 629, 630, 631, 632, 633, 634, 635, 636, 637, 638,639, 640, 641, 642, 643, 644: n = A,T,C or G
ncgattgggactccacccggtggcggcccgagtacagtttagtcaggaagcaggcattaaacacacatatacactcacaatgctaaaataaaataaagctgttaatttgatcaatgccaagaagaaaaagaatggggcttataagagaatacaacaagcggtgcaacttaaatgagggggcaggggagtatctgagaagccctctgtgagtgagtgactttttttttttttttttttgagatggtgtcacactttgtctccaggctggagtgcagaggtgcgatccagctcactgcaatatcctcctcaagcaattcccctgcctcagcctcccgagtaactgggacttcaggcacatgccaccacgcctggctaaatttttttgtatttttaatagagacggggtttcaccatgttggccaggatggtctcgatctcttgacctcgtggtccacctgcctcggcgtccgaaagtgctgggattacaggcgtgagccaccgcgccaggccgagggagtgacatttaatctcaaactaaataactagcaattagccaggaaaaaagttgggaagagtgtgccaagaagagagacatgcgtttgggtcttggaaaccnnnnnnnnnnnnnnnnnnnnnnnnnnnnn

SEQ ID NO: 11198 - DNA, 2730 bp, Homo sapiens
ttctagaattaattaacgcggggtccaatagattattaataaacattttagatagctgtaaaaaaattgtgttctctagagttcataaaaattatgagcttaatttcaatccaacagaaataattctgaaaactctaatgttgtgatgctaataattgggctaagaattttcaaactattgactggcaaaaacatggataaattgtaatatatgaacttcaaagaataaatgcacaattacaaaacttgatatagcaatttatttttaaaagccatttgaggaatcaccaaataatttcaaaatcatgactagaaaaccagcaatgaaatttgagactactggtatgacaaatcctgtttcaggccttgttgatctagagttacttgcacaaccagaatttgccaaaacaggaaataggtgtttcatatatacggctctaaccttctctctctgcaccttccttctgtcaatagatgaaacaaatacttcatcctgctctggaaaccactgcaatgacattattcccagtgctgttgttcctggttgctgggctgcttccatcttttccagcaaatgaagataaggatcccgcttttactgctttgttaaccacccaaacacaagtgcaaagggagattgtgaataagcacaatgaactgaggagagcagtatctccccctgccagaaacatgctgaagatggaatggaacaaagaggctgcagcaaatgcccaaaagtgggcaaaccagtgcaattacagacacagtaacccaaaggatcgaatgacaagtctaaaatgtggtgagaatctctacatgtcaagtgcctccagctcatggtcacaagcaatccaaagctggtttgatgagtacaatgattttgactttggtgtagggccaaagactcccaactcagtggttggacattatacacaggttgtttggtactcttcatacctcgttggatgtggaaatgcctactgtcccaatcaaaaagttctaaaatactactatgtttgccaatattgtcctgctggtaattgggctaatagactatatgtcccttatgaacaaggagcaccttgtgccagttgcccagataactgtgacgatggactatgcaccaatggttgcaagtacgaagatctctatagtaactgtaaaagtttgaagctcacattaacctgtaaacatcagttggtcagggacagttgcaaggcctcctgcaattgttcaaacagcatttattaaatacgcattacacaccgagtagggctatgtagagaggagtcagattatctacttagatttggcatctacttagatttaacatatactagctgagaaattgtaggcatgtttgatacacatttgatttcaaatgtttttcttctggatctgctttttattttacaaaaatatttttcatacaaatggttaaaaagaaacaaaatctataacaacaactttggatttttatatataaactttgtgatttaaatttactgaatttaattagggtgaaaattttgaaagttgtattctcatatgactaagttcactaaaaccctggattgaaagtgaaaattatgttcctagaacaaaatgtacaaaaagaacaatataattttcacatgaacccttggctgtagttgcctttcctagctccactctaaggctaagcatcttcaaagacgttttcccatatgctgtcttaattcttttcactcattcacccttcttcccaatcatctggctggcatcctcacaattgagttgaagctgttcctcctaaaacaatcctgacttttattttgccaaaatcaatacaatcctttgaattttttatctgcataaattttacagtagaatatgatcaaaccttcatttttaaacctctcttctctttgacaaaacttccttaaaaaagaatacaagataatataggtaaataccctccactcaaggaggtagaactcagtcctctcccttgtgagtcttcactaaaatcagtgactcacttccaaagagtggagtatggaaagggaaacatagtaactttacaggggagaaaaatgacaaatgacgtcttcaccaagtgatcaaaattaacgtcaccagtgataagtcattcagatttgttctagataatctttctaaaaattcataatcccaatctaattatgagctaaaacatccagcaaactcaagttgaaggacattctacaaaatatccctggggtattttagagtattcctcaaaactgtaaaaatcatggaaaataagggaatcctgagaaacaatcacagaccacatgagactaaggagacatgtgagccaaatgcaatgtgcttcttggatcagatcctggaacagaaaaagatcagtaatgaaaaaactgatgaagtctgaatagaatctggagtatttttaacagtagtgttgatttcttaatcttgacaaatatagcagggtaatgtaagatgataacgttagagaaactgaaactgggtgagggctatctaggaattctctgtactatcttaccaaattttcggtaagtctaagaaagcaacactactgttaaaaatactccagattctattcagacttcatcagttttttcattactgatctttttctgttccaggatctgatccaagaagcacattgcatttggctcacatgtctccttagtctcatgtggtctgtgattgtttctcaggatt

SEQ ID NO: 11199 - DNA, 504 bp, Homo sapiens
  misc_feature 1, 2, 3, 4, 5, 6, 7, 8, 9, 504: n = A,T,C or G
nnnnnnnnnctttttttttttttcttttggacagtgagagtggtcttatttcttcccctagtttaggtcacagcagttgagtcagggtatcatgctatcgcagggcacaaatttctatcatcatccatagatcactggattagttgaaaaagtcactcaaatgctgaccaggagcacatgaacttctgtttatttcggactttctgataaatggtggccaggtacacaaggttgaatctgttaaaattcactctaaaacacaatttgtcaaaaggaattaaaaatagcagaaaaaaaagtccatttaaaccacacacccaaatcgactgttagtgtggactctcagttctaaatagtaaagaaaaaataactgccattcccgcaggtttctgtgttcccatctttcctaatgacctttcctatgacatccttcatgcaataaatacagctcaacctttcagccaaaaccctgtagttctaggctctttcatgataatgatgaan

SEQ ID NO: 11200 - DNA, 446 bp, Homo sapiens
  misc_feature 419, 420, 421, 422, 423, 424, 425, 426, 427, 428, 429, 430,431, 432, 433, 434, 435, 436, 437, 438, 439, 440, 441, 442,443, 444, 445, 446: n = A,T,C or G
acgcggggaagtttgatttttagaactcatgtttatatgggtacatcccattttttttgatatacatttaaaataatttcttatgttgatttacgtaacagtattctaatgtttgagcatatatcttagactataaattttaattgttatagtttgttccatttttgttgaacgggaaaaactgatacatatctttaaaattgtatatttaaattaccttacatatgaggaatttttatacttgaaagttattgttattaacttgttttcataatgtgagatattctgtcataaagcacttatgttttaagttgtaatttaaaatacctttctttttaacatgcacacaggaaacctcgacctgtcccccagttggttgcacagcaggttactcagcagtttgtgcctcctacacagtnnnnnnnnnnnnnnnnnnnnnnnnnnnn

SEQ ID NO: 11201 - DNA, 792 bp, Homo sapiens
  misc_feature 783, 784, 785, 786, 787, 788, 789, 790, 791, 792: n = A,T,C or G
acccaccttgtattagctgagtgactttggttaaggacagttacttaattatcctgggcctcagtttctctctttgaaaaacagattcattcactaaaataatatttatgaagtattcattttgtgataagcactagtctagctaccggggatatacatttacaaaacagattttaaaatatcctgtcctggtggacctcacattacgttcattactaaccgggataatttcagtgcctctctcataggattgttgcaagaattaaattgatgaatacatacgtaacacttataacagtgtcacaaaatgagagctcagtaaaagccatcatcaccataatcaaatattgaattttcataaaaagttttcctttatgttttcccattccttgtttccttggaacttagaaataatagatttaagttataaaataatagtgttaatgtagtatcactaggcctcaatttccttacctataaaatggtgatatccccctctacagtgttggtataaaaataaaatgaaacaatttaaatgaaagtgctttgtaaactatcaagagctccacagactaaatatgtcattatgtagcaagtgccttggcttaagtccttgcactcagaagtccttcaatacacgttaattgaattaatttatggcctaagcaattgcatagatactatttgagcagttctgaaatacttgagacccaagacactaacctattataagtaggtaacaagctactataatcaacttcccgataatttaataaagcctannnnnnnnnn

SEQ ID NO: 11202 - DNA, 392 bp, Homo sapiens
  misc_feature 388, 389, 390, 391, 392: n = A,T,C or G
acaggttagccaacaggccaacaaacaactatgtcaattactccctagggtagtccactgcaactgcaagagtccacacacataattattagtgacacaagcatttgctttggccaacttgatgtaacttcccacctgaaatagtaaactatatggacaaataagcccccttttttgcatttttatcaaacaggattcagttagggtatttaatctaatcaaacaattcacaaatagttaatacatttttaaaatgtaggtaaagtaaatatttttatttagattcaaataaaagcatggatatttgaattttatttcaaccaataattgcaggtatagggctgcaacattcaacaatcggtacctgcccgggcggccggccaccgcnnnnn

SEQ ID NO: 11203 - DNA, 935 bp, Homo sapiens
  misc_feature 1, 2, 3, 4, 5, 934, 935: n = A,T,C or G
nnnnncgacttttgggggtccccccaagctttatagggcccaaaaaaaaaaaaaaaaaaaaagacaatgctatctgtgtcattggtttttaggggagctcatattgatgtacgtaacaagaaggggaacactccattgtggctagcagcaaatggtggacacctcgatgtggttcagttactggtgcaagcaggtgcagatgtggatgcagcagataaccgcaagataactcctcttatggcagcatttagaaagggtcatgtgaaggtggtgcgctacttagtcaaagaagtcaatcagtttccatcagattctgaatgtatgagatacatagcaaccatcactgataaggtagtatgctgttcacgtgtcatctttgtatggagtcaatagtacctgcccgggcggccgctcgacccgggcaggtacccacagaatgtggccccaaatgattcaattacagctagaagttgttctcttcccaaagcacgagtcttttgcattcacaggatattttttctttcataaacattcctgcgagaatgtaagtgcggatgaagattgtgttctgtcttcttcttgtcttttttctgtttactctgattttataaaatgcagtgtcatgtcttaggacaaattatcctcagtttgccagcaagtgagtttataaattattttattcaaatgagaaaattttccgctagaaccaatagtaaaggatggtgagtttccagctgacccacaatgacgtatttaactcacagtgaaactcagctctgcggttttaatagtttccttttatttctaagagcaagggagcctatgtttctaataattggacatgtctggaactgtccctaacatttgacagttttttcctccttgccagtgttaaggagattctttcttcctcacttcagagacagcttaatgnn

SEQ ID NO: 11204 - DNA, 256 bp, Homo sapiens
  misc_feature 1, 2, 3, 4, 5, 6: n = A,T,C or G
nnnnnngcggtggcggccgagtacttgatcggaacccggctgcctctaagacttggtcttgggcaaccgtgggtgggcaggaagggaaattatttattttattttgttaaggggagtgaagaaaagaagacgtgaggaccgcagttcactgtaatgtagagtaattgcaaaagtgggctgcctgcccctagcttttcccgctgtggttgcggaggtggtcttggttgagggggttgtggcgtgaagtacctgcccg

SEQ ID NO: 11205 - DNA, 827 bp, Homo sapiens
  misc_feature 1, 2, 3, 4, 5, 6, 7, 8, 9, 10, 11, 12, 13, 14, 15, 16, 17,18, 19, 20, 21, 22, 23: n = A,T,C or G
nnnnnnnnnnnnnnnnnnnnnnnggtagagacagggtttcaccatgttggccaggatggccttgatctcccagcctcatgatctgcccaccttggcttcccaaattgctaggattacaggcgtgaaccaccgcgcctggcctatttttaattactttctgccattacttttagtggcaaaaattgtgattatttttgcatcaacccaataaatttcaaaatgacaaaactgcagatccagcaccacccacactgccttattatatttctacaaaagagtgttttttcctggattagacaatgcccagtaatcaccaagacaactacatttgggtctggcttcagagacgacgactgtggagcatttgagacgtctgacaaacttgaggccattgctgcgccatgttttcccaaatgataaaggcagcacaagtgtccaagccgtgatgcgtgaatgagagtcaggatagacatggagtggaagaacagggaaggtcacagagaaaagtgggtagctatgatagaaggctgtccacaagccgctgattagggcctctctgtgtgtctgcaggcatgtgtaaacagagatcaagtgttttttgcagttcctgcaggagagtgatgattcttccaacaaaagtctctgaaatttcccgctctatgtctaacattctctgccactatttatgtctttcagattagtgtagaaaggagcatttcacaatgcctggtttccttaataagcaaaatctgatgctgggagataattctaagattggttaagaggattccaagaaatggcagactgcagagggttcacccgggagt

SEQ ID NO: 11206 - DNA, 854 bp, Homo sapiens
  misc_feature 854: n = A,T,C or G
acgcggaaatgttagacaaatgtagccaaaccaaaaaatacacatgttctatgaatccatatatgcaaggttcacaataggtgatagtagctactcttttgggaaggagtgaggaaaggactgaagagttttgcagagggggcttcgggtgtttgtgatttttaatttcccagggcagtttgggtttggttagcccggtcactttttgggaaaatttattgctgtggctttaaatacccaaatttttttgtgagggaaaggtttatatattcagggggaactctgggggttggggggggggatttatctctttaataaatggggggcgtaattttaaaaaggatttgattctgttatcattagtacttgggagttattaaacgtattccgctattgttaaactttaagttggtgttattttataaaggggggttttattatataatggagggttgttgtgtatatataaattcggttggcggtttttgataataatgtgtggtgggtttattttaataatgattggtagtgtgtattttataaatagtcggtgtgtgacatgtaaataataacctcggttgttaattaaaaaagactgtggggtgtacatatttaaatcaggggcggggtgtttttaatatcttatacagggtggtgtttatttatatatataaaaggcgggctgcgttatataatatatatatgcgaggcggcgttttattatttaattgaagactagcggtgtctttaatagtaaaatttggatcggagttgttacttaatataatgaggtttctgctatgtcgctattttattctacaatgctgtgggttgttctttatatatctgactcn

SEQ ID NO: 11207 - DNA, 984 bp, Homo sapiens
  misc_feature 983, 984: n = A,T,C or G
tcggtgccggcaaggacaagatcgacaacacggaaccggccctgtactcgcagtacatggattggatcaacctgatgacctacgacttccacggcggctgggaaacgagcaccaacttcaatgcccagctgtttgccgaccctgccgatccgtcgacgggcatggcgcgcgaatacgtgggcgacaaggcggtgcaatacatgattgccgccggcgtgccgcgcgacaagctgctgctgggcatcccgttctatggccgcggctggacgggcgtggcgccaggaccgaacggcgatggcctgtaccaggcggccacgggcacggcgccgggcacctacgagtcgggcatcgaggactataaaatcctcgtcgccaagaccggcacgcgctactaccatcccgtgaccaagcagctgtacctgtacacgggcgcgggtggccagtggtggagctatgacgacccgaccgtcatcggcaccaaggtgaagtacgtgaaggaccagggcttgcgcggcgcgttctcgtgggagcttgatggcgatgccaacggcgtgctggcgacggaggtgtggaaagtacggtaatgcgtcgttagggtagggcgcggccggacggtgcatgctgttcggccgctgatgcatataaaaaggagacagataatggcagccgtagcgacattgggagcaaagcagctggagcaggagctgagccgcgagtggcgcagctggatcgcggaaaacctcatgctgggcagtcatccgtcggcgctgatgccggtgctgcaacaggccggcatcgcggagcccctggcgcgccgcgaaatcgaactggcgttgcatagcccgtatcttgccggcgccgtgcgcctgtcgaaccgcctggccaagcgcgactgggtgatcgacatccagcgcaagctgaaccagttgcgcccgcccgagattccccgccgcgagagactgtccgcgcaggaatcctcgacnn

SEQ ID NO: 11208 - DNA, 358 bp, Homo sapiens
aggtactaggttttggttgggtaggagagaccaaaaccagggaaaagcttagaaatcctttattggggtttctgcaggaaatgcaaggcaggtcacagttaacagcttattattggctagtttgaataattccagtgggccctggggcacaggtatctagttgtctggtcccagctctgagatgatttaaaacagggaaatactggcttagtgtgtgagagtgagaaaaggagctgattgtggctttatacttgggattcattggtatgtatatgaaagacatattctcagtggaacccctcactaagactgcccaggaaggggcaatcttttcccaggtctgtaaggccccccaggt

SEQ ID NO: 11209 - DNA, 324 bp, Homo sapiens
  misc_feature 324: n = A,T,C or G
actgtgttgaaactgtagatcagttggggaatattgccatctttacaatattttcttccgatctattaacatgaggagtctttctattcatttagttttaaaataacttctttcagtgttttttcacttttgaagtataaaatttgcacttgttaaatttattcctgtgtaatttatcatttttaattctgttgtaaagctgctaatggaaatgctttcttaatttcatatttgaattgttcattgatagtgtatagaagtaaaactgatatttgtatgtggaacttgtattttacaaccttgctgaactacgttatttcctcn

SEQ ID NO: 11210 - DNA, 568 bp, Homo sapiens
  misc_feature 1, 2, 3: n = A,T,C or G
nnnactatagggcaattgagctccccgcggtggcggccgaggtgccaggattcattctcatcaaatatcatgaagtggagaacacggtgaactatgttggggttgatgtctttgcggcatacagagagagggcctaccagtccactgtgaaggtccttagccacagatacagttgaatagtaaaaccaaggtatgcattcaaagtccagtgaggtaggaccagttctatcaggtatctgccaagtatatatttgaatctctcctggctgagttggaacaacagtggaattatttgttttcactccatgagcatgaatagaatacggtcttgcggctttatttttaaagataatttgaattatttgaccagggttgagcaatattaatggacctagtatatcgagatgtttttcaccttcattcctttttgtttgatttgtgaacgtgttatcatcatattgacgatataagactttcttgtatttggacccaagaagtgttccacttctgtccacatacatgctcgtttggctttaagaaaatataagcaaaagcaaaaaaaaaaagt

SEQ ID NO: 11211 - DNA, 572 bp, Homo sapiens
ccacgcgtccggtcaggtctacctgaagaatatgtccagaagccagtcatatcttgtacatctgagccaccgtcatctgtagtctagatgagtgtcatagacttggaattgatagtcctggtttttaaaaacttccccttttgtcaattcttaactcagtggatgtatttaaaacataagtcaaattgtgtcattcctctgccccagcccttctgattgcctcccatttcactctgagtatgtgccagagttcctcctaataactgaaaggcagtaaaccatctggcatgttacctctcctgcttaaacttctgtttcttatgtcttttgctctgtttcagccacactgaacttgttgctattccttacctaccctactgcttaaagattccaggcacacctctgcacttagcagttccatgtgtctgggatgctttttccccagatattcttctagcttactctttccattacttcagttctttacttaaaatcccctttccaagaagaagaaaaagggtaaaaagaaacacattaaggaattaccactttttgaggaagaaccatgtacc

SEQ ID NO: 11212 - DNA, 1482 bp, Homo sapiens
  misc_feature 1478, 1479, 1480, 1481, 1482: n = A,T,C or G
cgattgaagactccttataaagagcataattggctagataagttgtattatttccacattatgcttgtgaaatattagtgagataattttaacaacagatacagtgtcatttatcttactagatataggactgaggaagggaaaagagtctatggtagctcatagggaacatagtgacatgaaaatctaggtgaacagactagctttagcttttgtgaggcatctgggcctctaatattaggtactttttgtgtggcactaaaatggcctccagaaattatttacaatttttctctagttctaacagttttaactttttcttaacttctaggaggatcagctgatttattcggaggatttgctgactttggctcagctgctgcatcaggcagtttcccttcccaaggtatgattcaatttgattggccagaagtctagggtggtaaaaaggttattaaaaacaactcccattccccccaagtcagcttctttctgtcatttttctccttgtagtattcataattcctaaagaatttattcacaaggtattttattgggcagatgccttaaatgtgccaaatgaattattttggttacagactactcaggtacatctaaagaaaattgcccatattcataggtgactcttgtttagcttttttgaaagggaaaggaggatgtgagtatctctgtatcatctcattttatttaatagcagcaagaatattatagtttgtgtttagtttagcttatgattttcatgaatgaaaggaacactgggatcaggccaactatcttactaaaatgcattcctttttaatttagatatcttaaaagcatttatgtgaaaaataactgaacttcattttgacatatcctaaaatgagcagttgaacctcatgcaaaactttctcattctttattagaatagaattttaaaacataaaaaccattcaacagaatatgggcttaaacatcaaggattgaggtgaaaggcctatttttttttttaattaatatttttatcttattacccctgccatatggtagctgtttaactttatgaaagccttcgagccttcaactttctaaaactgggaacggtgtcgcttgtcatggttctttttgaggatagtgtctatagaggtatgtattaggtgcaattgtcccagttactcttgcaccaacctaatagaataggggctacattcagtattaagtgtcttttttatttttttttaaggttgtgaagaggttgtggtatttgttttataaaatctggtcagtctgaagtttgagacaatatttttaaaatttagctatgagaatcttaaacatgaggtgaggcagggagaaaagatgtaatttgactgagttagtgttgttactcatcacaagtcacataatctattgctgttatattaaactggattaaaatttatatttagtaatatttggttaggtttgtgaggagttannnnn

SEQ ID NO: 11213 - DNA, 565 bp, Homo sapiens
  misc_feature 1, 10: n = A,T,C or G
ncttgttccntatgccctcagcctgtgaccaaggtatagctcactcggactgagtgcttccttgttcaggatgaattaagcacttgatgtgcacatgctgttaactcatctcccccaactcctttgaattctctacccatcatgtacttggccactttcctgagccaagcacttcattatcttcttgtcctgtgagtcctaatagatatatttagaaacacttctatgaaatatggaatccaggcttaaccagctgtttgaaatcacaacccacaaccactttgctggtgtgtgctcacacacacacacacactgacacatgcttgctatacatacatacacacagtttccatctttttttttttttttttttgagacagagtcttgctctttcgcccaggctggagtgcacttggctcactgcaacctctgcctcccaggttcaagcaattctcctgcctcagcctcccaagtagctgggactacaggcacgtgccactacacccggctaatttttgtatttttagtagagactgagttttgccgtgttggccaggctgatctt

SEQ ID NO: 11214 - DNA, 1143 bp, Homo sapiens
  misc_feature 1, 2, 3, 4, 5, 6, 7, 8, 9, 10, 11, 1141, 1142, 1143: n = A,T,C or G
nnnnnnnnnnnccgcccgggcatggacgcgggggagtcaacacacccgtgggtaattaacctggtcatccccaccctggagagccatcctgcccatgggtgatcaaagaaggaacatctgcaggaacacctgatgaggctgcacccttggcggaaagaacacctgacacagctgaaagcttggtggaaaaaacacctgatgaggctgcacccttggtggaaagaacacctgacacggctgaaagcttggtggaaaaaacacctgatgaggctgcatccttggtggagggaacatctgacaaaattcaatgtttggagaaagcgacatctggaaagttcgaacagtcagcagaagaaacacctagggaaattacgagtcctgcaaaagaaacatctgagaaatttacgtggccagcaaaaggaagacctaggaagatcgcatgggagaaaaaagaagacacacctagggaaattatgagtcccgcaaaagaaacatctgagaaatttacgtgggcagcaaaaggaagacctaggaagatcgcatgggagaaaaaagaaacacctgtaaagactggatgcgtggcaagagtaacatctaataaaactaaagttttggaaaaaggaagatctaagatgattgcatgtcctacaaaagaatcatctacaaaagcaagtgccaatgatcagaggttcccatcagaatccaaacaagaggaagatgaagaatattcttgtgattctcggagtctctttgagagttctgcaaagattcaagtgtgtatacctgagtctatatatcaaaaagtaatggagataaatagagaagtagaagagcctcctaagaagccatctgccttcaagcctgccattgaaatgcaaaactctgttccaaataaagcctttgaattgaagaatgaacaaacattgagagcagatccgatgttcccaccagaatccaaacaaaaggactatgaagaaaattcttgggattctgagagtctctgtgagactgtttcacagaaggatgtgtgtttacccaaggctacacatcaaaaagaaatagataaaataaatggaaaattagaaggtaagaaccgttttttatttaaaaatcagttgaccgaatatttctctaaactgannn

SEQ ID NO: 11215 - DNA, 1598 bp, Homo sapiens
  misc_feature 1594, 1595, 1596, 1597, 1598: n = A,T,C or G
attgctgatcacacctttatcttgcttaatatgtgtccagattcacaaaaatatctacatccttctgatgtatcattttagggtatgatctcagtaatcaggcagtgaattttctatagatttgtaggaagtctaggacaagatgcatattgttggcatgctgtatacttcagaatgcttagtttattaatcaacaaaggagtcatatctttttgtcactaatgtcctcaaaacaatcccaaccaatcttaccgctaaaattgtattttattattttatttttattttttactttgtaagcaatcaaagacaatatgtatcttatatagtataaggttttctatctctgaactaaagacaaactacatgttatatccagttcagatatgcagccagtaactgaagtaggaaaatcaatatcgcttttcattttccagtggaaactggaaccaatacaaactttttcttgcccagaacatcatgagtaatcattgttaaactgctaggaaatgctgtgtgacattgttagctagagtcagtatgtatgtaatcatgttttaaggaattaactcacagtatatctagctacaaataaagctagtatactgtcctataaatttttctaaaaactaatctgtagttctaaaaacttaaatgtcactcttattttcccttacttttttttaaaggtacctgaaatgctgcacaatgatgctagtgaccatggatgtagccgctgggggtatttctttttacagaatgctgggatgctttgggtttggaattatgttacttatttccatatttgaacataaaatcgtgtttcgtataaatttctagttaaggtttaaatgctagagtagcttaaaaagttgtcatagtttcagtaggtcatagggagatgagttgtatgctgtactatgcagcgtttaaagttagtgggtttgtgattttgtattgaatattgctgtctgttacaaagtcagttaaaggtacgttttaatatttaagttattctatcttggagataaaatctgtatgtgcaattcaccggtattaccagtttattatgtaaacaagagatttggatgacatgttctgtatgtttcagggaaaaatgtctttaatgctttttcaagaactaacacagttattcctatactggattttaggtctctgaagaactgtggtgtttaggaataagaatgtgcatgaagcctaaaataccaagaaagcttatactgaatttaagcaaagaaataaaggagaaaagagaagaatctgagaatggggagggatagatcttataaaaatcacaaaattcgtgtaattagaggggagaattcagaacttacgtattacaacgggcgaattagtcttgaagtccatcctcacaccttcttgtcggattattttccgttaaaacgttgtgggcctttctatctaatttcgtgtctttacttgtttatacgagactccttttttggagtccgctttttttcccgcctggtcccgtgggggttccagcaccgcgggttttccgcggggccctttcccgggggggcggcgcgcgtttgttcctctctcgtggtannnnn

SEQ ID NO: 11216 - DNA, 1017 bp, Homo sapiens
  misc_feature 1017: n = A,T,C or G
acgcgggggcttagacctgacgctgggaggagatgctgccacctaggttacttgtaggaccctatacggcaacctcctttgccaggaactatttataaacatcctgcaggaaaatgagtcaaggaagcttttcttttgagctatttacagcttttagcaattgagtaaagtatactcctgtgaacaaaatttggaacatatttgtttctctctaactgatttctccagaatttggaactagttaaccaggaaccctctcttggggtgtggatcgagacccctttctggtaacgagagcacagcttggttttatacattttaaggagacatgagacatcaatcaacgtatataagatgaacatttgatctgaaaaggcctctttaaatatacacttctctgtagtgtatgctagaaatggagtggctggaataaaagtggctgaatcatcttcaactctagtagctgagaccaatgatgctgacctccctcaaaagctgcatttctgaatttctgaaggcaaactgtctgcctatattgtacagcaaaataatttcctgtattaaaacgtttttattgctctaaatttctagattaaactctgcttaggtattgctaagagggtagccaagtatagaaacttaaatttactgacagaaaatctagagaaatgcttaatttttttttcccagccaggggaaaggtagaagacgaccacgggatatcccacgaaacggtactgccacaaccttcacgagaaagatgccgacggtacaggtcatcacctgggctattgacacaagcccaaagcgggttggggtggctacaacaccgggcatagggggggacttcaagctcacagtcaccaaaaccctatttgtgtccctggggcctcacacccatgcgggcgagcgacgacgtcaaatagcacccaaacgctatcgacaaacgcgggcacacagagaacacgctcacgaaaacaaccaacgcagtcgcagaaatgttactcagaacaacgn

SEQ ID NO: 11217 - DNA, 2736 bp, Homo sapiens
  misc_feature 2735, 2736: n = A,T,C or G
acgcggggtggctggcgagcagcggcctccccgcagggccaggcaggtgggccagagcttttggtttgctgaggtttgtcagattttccagctcagggcccagccagctggcaggaagcaggacagaggtcacttgaattcagaccacatgtccctgttaaatacattagcttttaaatcaatctttgttcaaagtccagtgagttgcaagcctaatgctcacctgcagagacagaattcctgagtgaacgaacagagcagctcctcttccatctccagaaatgacctccaccttcaacccccgagaatgtaaactgtccaagcaagaagggcaaaactatggcttcttcctgcgaattgagaaggacaccgagggccacctggtccgggtggttgagaagtgtagcccagcagagaaggctggccttcaagatggagacagagttcttaggatcaatggtgtctttgtggacaaagaagaacatatgcaggttgtggatctggtcagaaagagtgggaattcagtgactttactagttctggatggggattcctatgagaaagcagtgaaaacacgggtggacttgaaagagttgggtcaaagtcagaaggagcaaggtttgagtgataatatactttcccctgtgatgaatggaggtgtgcaaacttggacccagccccggctctgctatctcgtgaaggaaggaggcagctatggcttctctctgaaaactgtccaaggtaaaaagggggtgtacatgactgatattacacctcaaggtgtggctatgagagctggagttctggctgatgatcacttgattgaagtgaatggagagaatgtagaggatgccagccatgaggaagtggttgaaaaggtgaagaagtcaggaagccgtgtcatgttcctgctggtggacaaagaaactgacaagcgtcatgttgagcagaagatacaattcaaaagagaaacagccagtttgaaactgttaccccaccagccccgaattgtggagatgaagaaaggaagcaatggctatggtttctatctgagggcaggctcagaacagaaaggtcaaatcatcaaggacatagattctggaagtccagcagaggaggctggcttgaagaacaatgatctggtagttgctgtcaacggcgagtctgtggaaaccctggatcatgacagtgtggtagaaatgattagaaagggtggagatcagacttcactgttggtggtagacaaagagacggacaacatgtacagactggctcatttttctccatttctctactatcaaagtcaagaactgcccaatggctctgtcaaggaggctccagctcctactcccacttctctggaagtctcaagtccaccagatactacagaggaagtagatcataagcctaaactctgcaggctggctaaaggtgaaaatggctatggctttcacttaaatgcgattcggggtctgccaggctcattcatcaaagaggtacagaagggcggtcctgctgacttggctgggctagaggatgaggatgtcatcattgaagtgaatggggtgaatgtgctagatgaaccctatgagaaggtggtggatagaatccagagcagtgggaagaatgtcacacttctagtctgtggaaagaaggcctatgattatttccaagctaagaaaatccctattgtttcctccctggctgatccacttgacacccctccagattctaaagaaggaatagtggtggagtcaaaccatgactcgcacatggcaaaagaacgggcccacagtacagcctcacattcttcttccaattctgaagatacagagatgtgatgaaaacaagtaatagctttggctgtttatttgatagctgtttctgggtatttaataggaatcctttctcaaggaatgagttgtgacctgtttactgtctctttagaagaaaaactccactggaaaccattcaccatgtgtgattgtcttctgttatcatttgtcttacaggcggctattgcagacggctaatttatgcttaacttaggaagagataaggcaagagctagatttttttcatgtgatcttttccaagcttcaacttaacttaactacatttctctgtatgatgatgtctcttacttctacaggttccttgagcaccaaagatgattcataactctgtataggtgacagctgcttataaaagcatcttagcagataagcctattaaaattgtgcttttgtaacaatgttgtggttgctagaataaataccattaacaaatgccttttgagtatgcttgatagtgcttttgttttggattcactttttatgctttaaccttcatttgcctctagaaacccaaaacacaataaagtacagaataagaccttagtaataaaattcagaattttcttaaattgcatgtctgagtgttctaaaaatttttcaacatttccctttcacaagtgacttattcccccagttaagttattcacggtttcaccccacagcgtgaggggcagatagaaaaaaaaaaaaaggaaacatcactaccgaattgaaagtagggtataatactaagttcacaggaaatcaagaaaaaatgacatacctgaaatctctcttttggtaaaatctatttcaggtgcataccacccctttcccggaaaagaacagataacctcttggttattttaatggggcaggatcagaagaggaggtgtggann

SEQ ID NO: 11218 - DNA, 1449 bp, Homo sapiens
acaactcctgctggacagacgatgtcaacttaatgtccttgacaacaaaaaaaggacagctctgataaaggccatacaatgccaggaagatgaatgtgcgttaatgttgctggaacatggcactgatccaaacattccagatgagtatggaaataccactctacactacgctatctacaatgaagataaattaatggccaaagcactgctcttatacggtgctgatatcgaatcaaaaaacaagcatggcctcacaccactgctacttggtatacatgagcaaaaacagcaagtggtgaaatttttaatcaagaaaaaagcgaatttaaatgcgctggatagatatggaagaactgctctcatacttgctgtatgttgtggatcagcaagtatagtcagccttctacttgagcaaaatattgatgtatcttctcaagatctatctggacagacggccagagagtatgctgtttctagtcatcatcatgtaatttgccagttactttctgactacaaagaaaaacagatgctaaaaatctcttctgaaaacagcaatccagaaaatgtctcaagaaccagaaataaataaggatggtgatagagaggttgaagaagaaatgaagaagcatgaaagtaataatgtgggattactagaaaacctgactaatggtgtcactgctggcaatggtgatgatggattaattcctcaaaggaagagcagaacacctgaaaatcagcaatttcctgacaacgaaagtgaagagtatcacagaatttgtgaattagtttctgactacaaagaaaaacagatgccaaaatactcttctgaaaacagcaacccagaacaagacttaaagctgacatcagaggaagagtcacaaaggcttaaaggcagtgaaaatggccagccagagaaaagatctcaagaaccagaaataaataaggatggtgatagagagctagaaaattttatggctatcgaagaaatgaagaagcacagaagtactcacgtcggattcccagaaaacctgactaatggtgccactgctggcaatggtgatgatggattaattcctccaaagaagagcagaacacatgaaagccagcaatttcctgacactgagaatgaagggtatcacagtgacgaacaaaatgatactcagaagcaattttgtgaagaacagaacactggaatattacacgatgagattctgattcatgaagaaaagcagatagaagtggttgaaaaaatgaattctgagctttctcttagttgtaagaaaaaaagagacttcttgcatgaaaatagtatgttgtgggaagaaattgccatgctaagactggagctagacacaatgaaacatcagagccagctaacaaaaaaaaaaaaaaaaattccttgccgggggggccgttaaattttaaaattagggatcccccggggcgggg

SEQ ID NO: 11219 - DNA, 325 bp, Homo sapiens
  misc_feature 300, 301, 302, 303, 304, 305, 306, 307, 308, 309, 310, 311,312, 313, 314, 315, 316, 317, 318, 319, 320, 321, 322, 323,324, 325: n = A,T,C or G
gctccaccgcggtggcggccgcccgggcaggtacgcggggtcagttacatgaaaatcccctttggtcactgagatccaaaccttgccggtgtgtcattgagccaggtcaagtcttcgatatgactgtgctcctaccctcaacccagcctttggcgtttgtgccttagtgactgcagaagcctcttagtcttcccatctccaccttgctctatacccctgccttgaccctagctggccaatagtaaaaatcccctcccaaaatatttttaagtaaacaaacaaacaatacaaaataacgtnnnnnnnnnnnnnnnnnnnnnnnnnn

SEQ ID NO: 11220 - DNA, 371 bp, Homo sapiens
  misc_feature 370, 371: n = A,T,C or G
accgggcagcttgacctccattgcttttggcttttgtctctttctccttttgaagctcaaaagggcatagagtggactctgatcctaggatttttttttccctgctttggctgcctctgttttggttcatgtgtcaagcagagacggggaaagccaaacgacacaatgagtgttctcagaaaggaaacttcttcggaatgaaaagctttggccacattggaaagggtagaagtctgagagaaactttttcatcagggagacttaggtcggtgtcttagtcctttcaggctcgctgtaacaaagtaacctcggcccgctctagaaactagttggattcccccgggcctgcaaggaattcgatatcaaagcnn

SEQ ID NO: 11221 - DNA, 396 bp, Homo sapiens
acgcgggatttgaggtttgaatagagaatgggtagaggggagtgtcaagggtaggctaagtttggagttacctaacctcaaagttccaaactgggagactggtgttataattgggagctactgcttttacagtcccctcctaagtgccgtgtgttcccgggacattgggaagcaggagaaaatgggtggtgaaagccaggtggcttctaagatccatgtcagttctaacacttttgacatctacgaatgattcagcatggttgtctctgaagcatgctgcaaatcacctctcgtagcctgcaagtacctgtaggggctaagctttgtagatgccacaggtgctcttagaaagcaaggaaagaaagaagagagagaagaaaaaaaaaaaaggaaaaa

SEQ ID NO: 11222 - DNA, 224 bp, Homo sapiens
  misc_feature 1, 2, 3, 223, 224: n = A,T,C or G
nnnccgcccgggcaggtacgcgggtgacccaaggaggaccattttaaacttctaagttttcaccgagattaacatgcatttgttgaaagacaaacctcttttaccctactcccccagctgcaaatgctttcagggttcacatcatgttggaacatttggttacagtgtttcctaaactttgcgggtaaaaattgttcaagtaggtaaaaatggagcacatacnn

SEQ ID NO: 11223 - DNA, 266 bp, Homo sapiens
  misc_feature 266: n = A,T,C or G
ggtgacactccctcccaagaccaacagaattggggaaaggtcccaaagagaggaatccaacttttaaaaacggcctcattccatacctgagtcaggctgctctctggctcgctcgctctcctctctaacaagagttatgtgttctttctgttctagtatcaaaaaaggtgataacaagggagtcatttacaagccagccaccaagatggagactgaggcccacgcttgaggtccccggaactcccgggcacatccaggaaggaccn

SEQ ID NO: 11224 - DNA, 1157 bp, Homo sapiens
  misc_feature 1, 2, 3, 1157: n = A,T,C or G
nnngtcgacccacgcgtccgtttttatttctttattatagtgtttcattgggtacccggtccttcacttggatgtgtaggttcctaatgagccatggagttatggatgtataacaatctgttctccctttacccttttaatgtatatgggcaataattttaaagtagtttggatttttttaagttttgaggggtgggaggggtctaaggcagaatatatcctttttaaaaatgtatatatacttttcattaactatattgtattatttcatgctgtacccagtccattgcttggacttacgggtacctaatgaaacgtggaggtccggatgtatgaaaatctcctcttttcccctttccttattgcctctgtaggcaataattatagagtagtatagatggtttttcttttttatccatctgcctatctccaggaggatggggtgtgcacttttagaaatgtatataaatgttcttgctcctttttcctgttacttcattgtgtgccaaggcctttccatggatacttaggtacgtaatgaaaattgaggttcattctatgaaaaaatctccccttctccccttcccttattgcctgtcttggcaatggccagtagagtagttatttaagggattttgtttttttgttttttttttttttttttggtaggggaggtggggaatttctgggtttgtcttttttttaatgtatataaaagtttgctagttgttgttattgttgttctttcactctcaacacagttttttgtttggagttgtaggaatcaaatgtaatgagggacccagacccgagagtgtggtaaatattctttgccttcctcagagcctgtatacacaagcaagtagtatgtgagcactacagggcttgggttttggttttttgcttttgagggttttaatgaggagtgggattgttgagaggaaaaggcaagatatataatttttttaatgtatataaatgttttgctcctttttgatgttaacttcattttgaatctggtcctttgtatgaccacttaggtacttaatagtaataaagttgagattgactctatgaaaaatatcccatactccccatccctcattgcctagggggcaatggtagatagatgtttggtttctttgggggtgtctgan

SEQ ID NO: 11225 - DNA, 512 bp, Homo sapiens
acctcagttgtaaatgcagaaatcagccatcttctgtgtcaatcatggtgggagctgcagaccggagctggaactattcagccatcttggaacgggagccctctaggtgatatattttgaagtcagaaatggaaaatgttgtccagagttcaggggaagaggatattgggttcttttctctgaggtcactgtttcaaaacgttacagaagaaaaggctaatattgcttcagcccttgcccagatcccacagaaggtcagtaaaacctccattcctgataagcagctattcacatagtgagaaagtatggcttttgccctactcagtcttgctgttattggaaacaactctcttgattgtcgttcgtttataataaaatagaaataaaaaaataagcccctacatcatattttagaatttgaaatttaaaggcatgtgccaactattccaaaaaaagttctgacatgtattatttccaagggccaaaaaaaaaaaaaaaaaaaaaaaaaaagt

SEQ ID NO: 11226 - DNA, 743 bp, Homo sapiens
atagggcgaagctccaccgcggtggccggccgcccgggcaggtaccaggtgaacaaagtttaccagaaagcagttgagacaagaaaataagagctcaggatgagggaaaagaaaaagattgagagaatttgtgcccccaaccatttcctcagactctaagaaagaacacgctctctccaggcaggtctgaagctcaactctcttattgcctcacttcaggtatacctcactttacacaatagaattataactggaaagaagttggggacacatgtatttggtgattacattttaaacacattaggaaaagttgctatttgaactttttattgatttttggggggagtaaagaattattttgtgatgcaaataaatatcctttaattgatcgacttgccaaatttagatttgtgtgcatcaggctttcttttttttctttttttagagaagttcaatataagcttttcttttctttgtttctttctttctttattttgagatggagtcttgctctgtcgcccatgctggagtgcagtggcgcgatctcggctcactgcaacctccacctcctgggttcaagcgattctcttgcctcaacctcccaagcagttgggactacaggcgtgagccaccatgcccggctaatttttgtatttttagtagagacagggtttcaccatgttagccaggctggtctcaaactcctgacctcaggcaatctgcccgcctgggtctcctaaagt

SEQ ID NO: 11227 - DNA, 439 bp, Homo sapiens
actttacagtttatatgatctcatttgattcttaacatgagcctgtgagtgaaaaattccttcccctcttctacagattaggacgttgagattcagggaggttcagagggattcagggaaagtcaagtggcacctggagtcccgtggctaatttgaggccggtaggggattcgaacccaggatttgtgcttcttatgcctgggcttctgctctctggggcatggtcttccccctagctttcccattcactactttagcctaggggtcctaccctttattaaactgccagtgcctcactgcttttctcccccaaagacaaaaaaaaagtgtttttgcttttgttttgtttttcatgggcagagacctggaatttcagcttgagaatttgtgccatatgataaataaatcaacagatggctttttccccaaaaaaaaaaaa

SEQ ID NO: 11228 - DNA, 928 bp, Homo sapiens
  misc_feature 1, 2, 3, 928: n = A,T,C or G
nnngtcaaggaattatccaaaacagacagaatgggcacccagctgaatgtagcctgtaaactctcaaataatcgcatttcaaaaagagaacactttaggccaactcagtcttacagccacaattctgatgacctttccagagagggaaatgctaggcccattttcttcactccaaaggacaatatgagtattccccttgtcagcaaagaagccttaaacagtaaaaatcctcaactccataaagaagatgaaccagcatggaaacctgtgaagttagctgggccaggccaaagagaggttgccagaccggcccataaaaagaaagctcgaatggcgcggacgcgctccgatttcttgactagaggtacttttgccgatggggagggggatacagaggaagatgattacgatgacattattgagccccttctctcccttgaccaagcttctcactgtgagctagggcctgcacccagcctgggtcaggcctctcacagtgactccgaaatgacatcacagcgattttcgtcagttgatgaacaagcaaaacttcataagactatgtctcaaggagagattaccaagttggcagtgagacagaaggcttcggattcagatataagacctcagagagctaagatgagattctgggccaaagggaaacaaggggagaagaagactaccagagtgaaacctactacccagtcagaggtttcgccactctttgcaggcacagatgtgattccagctcatcagtttccagatgaattagctgcatatcacccaacacctcctttgagcccagaactgcccggcagttgccggaaggaattcaaagagaacaaagaaccttctccaaaggctaagcgcaagcgaagtgtgaagattagcaacgtggccttggattctatgcattggcaaaatgacn

SEQ ID NO: 11229 - DNA, 1736 bp, Homo sapiens
  misc_feature 1, 2, 3, 4, 5, 6, 7, 8, 9, 1736: n = A,T,C or G
nnnnnnnnnagagggaggatactcaaagacaggacagtaagaaacaaccactaaagtctctagacagatcctctgattctttttactattttttcaccctggaggatatttataattattgttttttaaatgctcatgatgtcacagataaagaacaccaattgctcccaatagaactctaactacagtatgtgtttacaagagcaaattactgtttatacacggacaggattgtgaatgaggcaaagaacattacaaattatatgttactaaagaaaagccaaaacatttccttttttttttttttttatgagaagacatcattacctgtatatgccccctcttctcagttccctcaatggacattggcattgatgagcccataagtacatgataagcctacaaggacaatagtgagtttatatttttatgtaatgattttagaacatgggataatatccagagtgatggaggtaaaactattcacatttccatattccaaactacttcaagaatcactagagtgcagaagttataactctaaatgctgaatggagaaatcatctgtcccaagaactacacccatatgactttccaataaatctatctcaaaaggcctaccatttaacaacaacagcaacaacaaaactttaaaagaacccaaatgaagttttgtataagttggtgtctttttttctatacattttgaatgacaaaaagctgctgtgagctacactgtttttattttattataaaccattcttattttataaaacacagccctactcccagaaaaaatatttttgtgaactaatgggggtcaagacatatatctgaggctaccatatgaccctaagaagaacccaaggaatgcagtattaggactgcctcattgtttgaaatattgttttaaggattaaatgagtaaagcccatgtacagtgctcagaacagggcatggcccataataaaagtgttggaagcatgttaggtgttcaaaatcagtgtttgcattccaatggagttccaggaaaagtgaattccaggaatttatgtttgggtagacctaaggtagttttgcaccaaaagaagactttgaaaacggagggtttcctgtccacttttcgccaccatcaattgcatcttttcttaactctctgtagaaaagaagctgagaaagagcagacagtgcatgtctgcactgaagtacaactggccaagggccggacatggtctctcttctcttgcttctgtgctgtaaacggctcctctgagcagttccttgagattcgtaagccaaaggcttttgttagattgtgaggcaaggtagagggcagggcgcaggtataccatttgtcacaacaagcttccttaccactcctgttttatttaaaactccgctcctgttttatttaaaaccaaaacactcaatccaccatgtgggatccttagtagcacacatctcaaaagcttgcactcattcagggttggaatgggcagtgaagcttatctaggcacatttcttcacagccctgtcatcggggttcaaattctcaaatggcatgaactgcctagcaatagtgccactgtttttactgtagggctgtgacttgcctccacctaagggagtttcagtgatatgggcttagggaatacagggaaatagacttgtgcagagcccacgcgtccgcggacgcgaattcgcatctcaatgaatcacgtacccgaccggacgcn

SEQ ID NO: 11230 - DNA, 683 bp, Homo sapiens
acagtggatttgccagatcatagcgagactgcttctttaagtgggaccctgatacatttctgctcactgggtgaaacctcccagccaggccccccagccatgtccacctgcacttattagggacagagctctgatctctccctgggaaggagtgcctgggggcagggagggtggccacctgggttggttggatgactcagttcttccaaccaacctcctccccaacaggggcagaggcagttccccaccatgacacggttcccccaccacaatacagctcttttcttgaggcatggacagactgctcctttaagtgatttactccttctcgtggattggtttctcccggccaggtcctcccagtcggggcttccagccacctgacctgtattctgtggggcagacagagctcgtgtttctctctgggatgaagcatttgaggagcagggaaggccacctcctggaccacttgggcttttcaacctgttaagcctgtgggccttggagaatccaaactgatggggagatgaaggaatccccaaaacagtaaagccgctctaccaaaaaactgccagaatacctttttaagtgggttacagatcctgttcttccaaagtaagccctctaaaccagggtctccggccacctactgcaggtgcaattcaggcaggcaataggtcagt

SEQ ID NO: 11231 - DNA, 1748 bp, Homo sapiens
  misc_feature 1, 2, 3, 4: n = A,T,C or G
nnnnagtagctggttgcgttgtgggtcagtggtcttttggctgctgcgtgtgtatctgcgatcttgttgtgtcggttgggtgttatccgagtagatgtggtgtcgtctgatgtgtgaggttgctgggtgtggttggtcgtggcgtaagggaggggtttgtgacaacaaaaataaaaaaaataaataaaagggtgatgtgctgtgatgctgctccggtcggttgtgggggtgtacataactaatgacgtcggcttgtagtttacatgttctctgtcgaaaggagagaaaaccacgacactgtttgtcgccatggagtaacctggggaaatgggccgtaatttcgcagttcttgacaaccgtgcaaaacaaagccgagacctggtttacggtatcgacaaaggcagctttgattgggacatggaggcatgggcaggttctcctttctttggaaacacatccatgctgggatgcacagttcttttcctaaggattgtgtttactcctgactgcaacgtcttggccactgtttggagcagtttggtctgaaggtcattaaggatctgcttgcatcttgtttcatgtcctccgtgacagactgcagaccatgttagaagagaaggaaggtttgtggatcaagagggttgacattaggtttggtgagatgagttgcttggcacagatcagcagaacaggaccctggtgataaggcatctggctttgctaaccacttatcatcttccattattctctttcttaactaagtagacccgaaagtgcacttttgaagtctggtttagatggcgagattccgaatctacaatgatcgagtactggtggccacttttctccaacattaagtaaagaggaggagattccaccttcagaaagtgctgggaagcattggctttcttcccacattggtagaagagatggaggaggaaaccagggtgcacatttctacagatcccctttgcctgctggtgtttgccttgtaagataagtcactggggggaaggggaaatctatgaaatccaagataaaggcatagtctttcagctctattggtgttaaaagtatatttgtgtccaaatgttaatcaacacaaatgtacagtactcagtactgacttttttcacttcaaaatgttttcaagggaaattcagcagacacccaactgtatttaattagtgaaaagatctataaagactcttactttgaataaacacattaagtaagtgtgtcaaaatatttggaatgccagttatctatgagcgcatatctcttacagagtgtattttgttttcattaaggtatctctgtgtatctacactggactaatttcatagggatctgattctatgtgatccactgtagaaagctactgattacttctgcagtaacagcagctctaattagcatcagatgaccaaagcggaaatgggagtttcagcgctaacaagggcagccttcattgaagaatgcatgggtaggcaatatataaattacattttgaaaagcctcatctgtcaccaacaaatatctcatttttcttcagtgataaaagcatattcaagttaccagctcctcaatttgaaaatcagttgctgattaaataaatagggggaagcatcttgttcagggacaacacgttagagagattcttatcaaagcaagccaagcaaggtttccgccattcagtgtgatcttagtttgacacggtgaccctaaaacaccatcatttgccccag

SEQ ID NO: 11232 - DNA, 415 bp, Homo sapiens
  misc_feature 415: n = A,T,C or G
acgcgggattgagagcaggtaaattttttaatggaactatgcaaagaccaatatttcaatattggacattttgatggtccttctatccccaatgctttatttttttcaactttgatgaaaagatttgatctagatgagatactcccatcagaatcccaaacaaaaggactatgaagaaagttcttgggattctgagagtctctgtgagactgtttcacagaaggatgtgtgtttacccaaggctacacatcaaaaagaaatagataaaataaatggaaaattagaagggtctcctgttaaagatggtcttctgaaggctaactgcggaatgaaagtttctattccaactaaagccttagaattgatggacatgcaaactttcaaagcagagcctcccgagaagccatctgccttn

SEQ ID NO: 11233 - DNA, 488 bp, Homo sapiens
accattgtccagggagctctgaaaagcatcctatgtcgcaccccgggagagttttaccacaacactctgagcttcctcaaggtaagggcagctcctgccctccactttgggagtttgggagtcagagaatgccgcccgtggaattaggaataattggttctcctttctggagccatgttccaatattaggagacggcatcggtgtaagcatccacacacacgtttctcacttccggccattctctctgcccctggtgaaaagcttcaagtaatagagctttttctttttcactccttatgccagaacatcacacctacgttcccactcttcaatgaggggtctatttttaatgacttggcttttcttttacttaaattttgatccttgatttctccttgcctcttcttgtagtccaatgctgatctctgttatggggcgttggctgccatccctggactccggccagtccgcccttctggggctatgt

SEQ ID NO: 11234 - DNA, 445 bp, Homo sapiens
  misc_feature 1, 2, 3, 17, 445: n = A,T,C or G
nnnaccaccacccgccntccactttcaataaaagaaagcatgttaagataatatgagtcatctcccgatgctttgagttaatccatcatagagtattagcactgagacactatacatgttcctggcatcctttcccccaaagtaaacaagagaaagccacacagactttaacacattataccttaattccatcaacagtgtcctgagactgaggatagataaaatacttcaggtcaaagcagagcctgtggaattttaatttaaacaatagatgagaaaatgtcttttgttggaaaagagacattcaaaaaagatgttaaaatataccctgtttattatgaattatttgggaacgtaaacattaccttttatcttacagaccagactgacaaggccaccgagtgtgtgccccacctgctgtgagccatcagcttgcacaggtacn

SEQ ID NO: 11235 - DNA, 1414 bp, Homo sapiens
  misc_feature 1412, 1413, 1414: n = A,T,C or G
gcttggatttagtgtggtggcagttgagtggaggcttagcaggcagtggtaagccatggctctcctgaaggggcaaggtgactccacagcagggccagatgagaaaagagctgggcctatgaggaatgtgctaagccagcaagaaatggaagttagcaaagtcccagcactctgcagtgctgaagctgaaagaatagataaattcacaagccaaagacttaaatatgagatgatagcaacgggggtctatgaccaggcataactaacaagggactggtgtatggccagtgaggacctggagaaagaaacctccttcccacagctaccatgtacatacagtaagcttctgccttcccagctgctgtctggttagtggaactaacaatttccttgatggaaattgaataaggtaatccaaaaagaaggctcttttagatgaaaaaacatggatagattattaagcgccaagttttctcttcaacctactgctcaccagtgctccctcctcagctccaaggctgtggagggctcatgaagtcacaatgttctactgagaatttagctttttttttttttggagtgggtataccattttgtaattccacttgataatggcatctgattatttgatcatgacatcattatttgtatacaatgcagcaagaattttgtttttaatgtaggcttttaaatgggctttgatggaacttggttccatagaaggaatcccagataaggctttttaaaagccgagcccagccatggattcataccatcaaatacctatgagttaggtgaattcctctcgaggttccaagaatctatacaaagaatgtgtttattttgtatgggttcagcacaactcagttcctctttctcattttctgaaacttgaactgctctagtcttacccgtgtgtatagacctggactttgaggttggacagacatgcaaaggtagggatataggtggagtggtacagattgtttggacagatagaattctgggacttgggaaaactaagttttgtagtttttggtttcctgatgaaaaatttgtaatttcaacacataagcaaaataattagacatctggccttgtgtttgacaatttatatggtgtatttcatctcctttcgtcagtcctgtcaatgttcctatgttatatcttccaaaacccttctggaaaattagagaggaggtcacgatcacctacaattcttcatgtttatgaccatcattttcaccaaaatagtgcaacttcctcaaaaatgttctccctgcttccaggattaatcatctccaactttattctccatattccagtgggagtcttctaaaatattcatatgaattgtgctgctttcctgtttacaacagaatcgagtctacatctttaacatggtgtacaannn

SEQ ID NO: 11236 - DNA, 1510 bp, Homo sapiens
agtcaccacgcgtccggccaagtgcgcatggggacgctatagcaattcgtttgctgtccttcctctccttcgaagatgacaaggcctaccatcgtttcttcctgcctttgggccgtcaggcagttggttgggacccgctccaaccctcggttcttcctgcaatacagtggatacaatttgtcatggctactctgagtgttataggttcaagttcacttattgcctatgctgtattccataatatacagaaatctccagagataagaccacttttttatctgagcttctgtgacctgctcctgggactttgctggctcacggagacacttctctatggagcttcagtagcaaataaggacatcatctgctataacctacaagcagttggacagatattctacatttcctcatttctctacaccgtcaattacatctggtatttgtacacagagctgaggatgaaacacacccagagtggacagagcacatctccactggtgatagattatacttgtcgagttggtcaaatggcctttgttttctcaagcctgatacctctgctattgatgacacctgtattctgtctgggaaatactagtgaatgtttccaaaacttcagtcagagccacaagtgtatcttgatgcactcaccaccatcagccatggctgaacttccaccttctgccaacacatctgtctgtagcacactttatttttatggtatcgccattttcctgggcagctttgtactcagcctccttaccattatggtcttacttatccgagcccagacattgtataagaagtttgtgaagtcaactggctttctggggagtgaacagtgggcagtgattcacattgtggaccaacgggtgcgcttctacccagtggccttcttttgctgctggggcccagctgtcattctaatgatcataaagctgactaagccacaggacaccaagcttcacatggccctttatgttctccaggctctaacggcaacatctcagggtctactcaactgtggagtatatggctggacgcagcacaaattccaccaactaaagcaggaggctcggcgtgatgcagatacccagacaccattattatgctcacagaagagattctatagcaggggcttaaattcactggaatccaccctgacttttcctgccagtacttctaccattttttgaaactacaatactggaacatccaggaactggagttattctacgctaatggattggaaagaatgttgggaaaggacatcttaaatcttttctaactatgccctaaactgcagaactcaaaggaaatatagtgccattgttagtagtcattctagatgaattgggagtatctctccagttattcccagattcactagtgatccttaaagtctctattcagggagaggaagacactttccatctcagagatagactcgtgttaccttgatggatattggatttgtctaagtcttcttctagaaaaaataaattctaga

SEQ ID NO: 11237 - DNA, 384 bp, Homo sapiens
  misc_feature 1, 2, 3, 4, 5, 6, 7, 8, 9, 383, 384: n = A,T,C or G
nnnnnnnnncacttcctgcgaggcccctgcagcagcagcagcggcgtggtcagagcgagcttcggagaagcagtggtgggttccatgtgatggtggagtaggaggcaggtttccgcggaaagaaaaaagaagaaaacaaacctccatacgagaatgggtctaaaggaacttcccaaacctccatgattttgcaggaaacaagataaagctggttggtggagaatttgaactggagatgaactctattatccaggatgctgagagtataatacgcatgacagagcttttagagcactgtgatgtaacatgtcaagcagaaatagggagcatgtttacaaccattctatgaaaaagtgttggaatgtacccgccgcccccgggann

SEQ ID NO: 11238 - DNA, 1115 bp, Homo sapiens
  misc_feature 1114, 1115: n = A,T,C or G
taccctactggcctatgccgaaagcacaggaactgtgagggtgtttgatctcatgggaagtgaactctttgtcatttccccggcatctagttttataggtgacttaagctatgccattgctgggttgatatttttagaatataaagcaagtgcacagtggtctgcagaactcctggtcatcaattaccgaggagaacttagaagttaccttgtaagtgttggaacaaatcagagctaccaagaaagtcactgtttcagcttcagtagtcattatcctcatggaatcaacacagctgtttaccaccctggtcacagacttttacttgttggtggatgtgaaactgctgaagtaggcatgtcaaaagcttctagctgtggcctttctgcctggagagttctttcaggatcaccgtattataagcaggttactaatggtggagacggggttactgcagtaccgaagacactgggattattaaggatgttaagtgtcaagttttacagtcgccagggacaagaacaggatggaatttttaagatgagcctttctccagatgggatgctcctggcagccattcacttctcagggaaactgagcatctgggcgattccatctctgaagcaacaaggggaatggggtcaaaatgagcagccaggctatgatgaccttaatcctgattcggaggctctctactgagaagagaaacacacaatcaacgataacagagtccttttacccactgatagatgtcaattggtgggcagacagtgcacgtgactttagctcgatgctctggtgctttaactgtctcatccgtgaaactttgaccgactttactgggaacactcctgtgaaatggtttgaaccatccccctcaagtcactggctaacccatgattgggggatttataacgttacgagtgtgagaattaacacttgccccaaacgatctcgtctggaagactacggatggcagaacaaagatgcacgcgcagcggctcctgcttctgttaatcgaccatcttgccaaggtcgcctcattcggttatatcaaccaggctctacttgtgactgattgagcgatggccccacggaacgccgacacttctacann

SEQ ID NO: 11239 - DNA, 799 bp, Homo sapiens
actttcacagcaacatttagactagtgtttgaccaacaactgggcaccacggtcaagccaagttggcatatagaattagccagcaaacttggtattcacaatctgtcattatagtcttatctataaacctaaggtttagagaaacgctggtcattctgaacaattccctgtgaatgcagagatcaaggagcctccccttaactgggtaggcagtgtgaaatacctgcagtgtgcttgaccttactgttcacccactggcagctgttcctacagcttggcttcagatatataatattacattggctaacttcaaagagcattgttttccaaggatagagatggtgatggtgtatattacttttaccagccccagacctgtaagaggttctcatctcttttgtttaagattttgttgtttttttttaatgctcaataaaagaagctttattctttcattaaaaaacaaatctcagaagaacagggaagaagagggtagcctatgaaagtgtgattgttatttgataccatcgtgacttagcttgttttcacctaagactctgagattctattctgtttatgtgagatttgggctgagttcaactactatccatattaactgaatcataaaacaattaatccatcatctggttacattttggtggggagggagcatttaacacaacactaagccacatatttcactatttttttttttttgcagcaaattgacttaactgcttgctttcacaccatgcctataaaactttttggttttagaggttctatgtgtctggaaagt

SEQ ID NO: 11240 - DNA, 2185 bp, Homo sapiens
  misc_feature 1, 2182, 2183, 2184, 2185: n = A,T,C or G
naatagtcacatgacacgtttcccgtcaagatggcggatactctcccttcggagtttgatgtgatcgtaatagggacgggtttgcctgaatccatcattgcagctgcatgttcaagaagtggccggagagttctgcatgttgattcaagaagctactatggaggaaactgggccagttttagcttttcaggactattgtcctggctaaaggaataccaggaaaacagtgacattgtaagtgacagtccagtgtggcaagaccagatccttgaaaatgaagaagccattgctcttagcaggaaggacaaaactattcaacatgtggaagtattttgttatgccagtcaggatttgcatgaagatgtcgaagaagctggtgcactgcagaaaaatcatgctcttgtgacatctgcaaactccacagaagctgcagattctgccttcctgcctacggaggatgagtcattaagcactatgagctgtgaaatgctcacagaacaaactccaagcagcgatccagagaatgcgctagaagtaaatggtgctgaagtgacaggggaaaaagaaaaccattgtgatgataaaacttgtgtgccatcaacttcagcagaagacatgagtgaaaatgtgcctatagcagaagataccacagagcaaccaaagaaaaacagaattacttactcacaaattattaaagaaggcaggagatttaatattgatttagtatcaaagctgctgtattctcgaggattactaattgatcttctaatcaaatctaatgttagtcgatatgcagagtttaaaaatattaccaggattcttgcatttcgagaaggacgagtggaacaggttccgtgttccagagcagatgtctttaatagcaaacaacttactatggtagaaaagcgaatgctaatgaaatttcttacattttgtatggaatatgagaaatatcctgatgaatataaaggatatgaagagatcacattttatgaatatttaaagactcaaaaattaacccccaacctccaatatattgtcatgcattcaattgcaatgacatcagagacagccagcagcaccatagatggtctcaaagctaccaaaaactttcttcactgtcttgggcggtatggcaacactccatttttgtttcctttatatggccaaggagaactcccccagtgtttctgcaggatgtgtgctgtgtttggtggaatttattgtcttcgccattcagtacagtgccttgtagtggacaaagaatccagaaaatgtaaagcaattatagatcagtttggtcagagaataatctctgagcatttcctcgtggaggacagttactttcctgagaacatgtgctcacgtgtgcaatacaggcagatctccagggcagtgctgattacagatagatctgtcctaaaaacagattcagatcaacagatttccattttgacagtgccagcagaggaaccaggaacttttgctgttcgggtcattgagttatgttcttcaacgatgacatgcatgaaaggcacctatttggttcatttgacttgcacatcttctaaaacagcaagagaagatttagaatcagttgtgcagaaattgtttgttccatatactgaaatggagatagaaaatgaacaagtagaaaagccaagaattctgtgggctctttacttcaatatgagagattcgtcagacatcagcaggagctgttataatgatttaccatccaacgtttatgtctgctctggcccagattgtggtttaggaaatgataatgcagtcaaacaggctgaaacacttttccaggaaatctgccccaatgaagatttctgtccccctccaccaaatcctgaagacattatccttgatggagacagtttacagccagaggcttcagaatccagtgccataccagaggctaactcggagactttcaaggaaagcacaaaccttggaaacctagaggagtcctctgaataatggatatacaccaaactggatacccaactttggaaattctgactggtctcagagtctacttgatagaaggactgtttgagaaatgttagaaagcagcagcaattataaggcaaaataggtaatagaaatccaaaaggggattttccttatagaggacattccaagaacacacaacacttataaagcacannnn

SEQ ID NO: 11241 - DNA, 2180 bp, Homo sapiens
  misc_feature 1658: n = A,T,C or G
cgtccggctgaaccaagaaggaggagggggtcgggcctccgaggaaggcctagccgctgctgctgccaggaattccaggttggaggggcggcaacctcctgccagccttcaggccactctcctgtgcctgccagaagagacagagcttgaggagagcttgaggagagcaggaaagcctcccccgttgcccctctggatccactgcttaaatacggacgaggacagggccctgtctcctcagcttcaggcaccaccactgacctgggacagtgaatcgacaatgccgtcttctgtctcgtggggcatcctcctgctggcaggcctgtgctgcctggtccctgtctccctggctgaggatccccagggagatgctgcccagaagacagatacatcccaccatgatcaggatcacccaaccttcaacaagatcacccccaacctggctgagttcgccttcagcctataccgccagctggcacaccagtccaacagcaccaatatcttcttctccccagtgagcatcgctacagcctttgcaatgctctccctggggaccaaggctgacactcacgatgaaatcctggagggcctgaatttcaacctcacggagattccggaggctcagatccatgaaggcttccaggaactcctccgtaccctcaaccagccagacagccagctccagctgaccaccggcaatggcctgttcctcagcgagggcctgaagctagtggataagtttttggaggatgttaaaaagttgtaccactcagaagccttcactgtcaacttcggggacaccgaagaggccaagaaacagatcaacgattacgtggagaagggtactcaagggaaaattgtggatttggtcaaggagcttgacagagacacagtttttgctctggtgaattacatcttctttaaaggcaaatgggagagaccctttgaagtcaaggacaccgagggaagaggacttccacgtggaccaggtgaccaccgtgaaggtgcctatgatgaagcgtttaggcatgtttaacatccagcactgtaagaagctgtccggctgggtgctgctgatgaaatacctgggcaatgccaccgccatcttcttcctgcctgatgaggggaaactacagcacctggaaaatgaactcacccacgatatcatcaccaagttcctggaaaatgaagacagaaggtctgccagcttacatttacccaaactgtccattactggaacctatgatctgaagagcgtcctgggtcaactgggcatcactaaggtcttcagcaatggggctgacctctccggggtcacagaggaggcacccctgaagctctccaaggccgtgcataaggctgtgctgaccatcgacgagaaagggactgaagctgctggggccatgtttttagaggccatacccatgtctatcccccccgaggtcaagttcaacaaaccctttgtcttcttaatgattgaacaaaataccaagtctcccctcttcatgggaaaagtggtgaatcccacccaaaaataactgcctctcgctcctcaacccctcccctccatccctggccccctccctggatgacattaaagaagggttgagctgaaaaaaaaaaaaaaaaaaaaaaaaaaaaaaaaaaaaaaacatggnggccgactaggcccaaaaaactataaactcgagcaagcttatgcatgcggccgcaatataaagctcactgggccaatacgccctataaagagaacgattaacaattacaagaccgtttggtcccaccggccccaactgggaatatccctgcggtacccattttaatggcggggcaaaacatccccctttggccaattggcctattaggggggaggcccccaccgaacggcccgcccattaaaaacgcggcctgatggaaaacccggggttgcccccattaaaattcttttgaaaaacccccctttttcccggtgagggaaataataaatagaccacaccccggacccttcaaaaaatttttgaacccaagagggggaaccgggaaggggccgggttatatttctggtaagaaccggaaactttttttaaaacggccgcttttatcaaaaaaggccgaaaccggcaaaaccgccttaagaccaaaaaaaaacccggactctgttggggttttccccctgggca

SEQ ID NO: 11242 - DNA, 2557 bp, Homo sapiens
  misc_feature 1: n = A,T,C or G
natccttaagggagaaagcgcctcacttgccccagaaagcagttttttaaacaagggaaacgtgtggaaagaaaatagccaacccacccatacagaccggggtggacaagggcacgcggcacaccaccgccaaagcaaatcacaaagtcaaagcagcagtacttaagagtctagagaacaaagaggtgaaccagctgaaagctctcggggaagcttacatgtgttgttaggcctgtcccatcattggagtgcactggccatccctcagatttgtctgggctggcctgagtggtcaccgctttgagaaagctgttagtttccttggtgcccagagggctaacaccctagttggccttttccttcagtgtccaagaaggggaagggttaggaggggaggtaacactttaaaatacgacttaactgcactgatccttaataaaacacacaaccaatcaggagctaagagcgccagctgtgctggttggaaagcacatattttagatgtcatctgcctccaggacattttagatcacaggtactcaacttccaacagaaggagcttctaaagatcaatgcattaagttccacctgaaaccaggcagccatcatcatgctcttttgatttctctcttcagctccaaggattctgacaccacagatgagctaaagaagcgaaactgttttattcccctaagaaatggctctctttccgatactatgttgacactgtggttaaaggaggtctggtctgttggtgaacaactgtgtggaggaagaccagggaggctgcaccctaagcctccgggctgcactaatctgggttggactgctctgctacagactggagggtgttgccatctaaggcaaaagggagatgctgagaaggtcaacagtaccaaggtatctagtccaattatgggaaagaaaaaaattgccctgattatttccagtattccccacccctcccacctttgtttccccacacaatcaagtgctaagtaaggagtagaccaactacagctgttcagaccaatggtaccaggagccggcaagggaagagtgcatttttttttctctgtagctttagactgtacagaagaaaaataaaaaaggattgttcttactcaagcaaaaaaaccagaatgatgtaggggtctcacagacttttctagttcggaaacaagttatgagggccagacttttattacttgtcaatagagatccaaaaagagtccctgtctctgaagttaggagacaccagaaagaattttgccaaaggacatgtacaaatggccttccatccatgattcacatcctttcaaattgcacaccaagttaaaggatgttctcagcagtgaaatacacacacgtgcagcaaggcatgctggtcttgtccaagtagctccagtgtgcaccaaaaggtcacgtgtctgtacctcctcatctgcctttgaaggggtttcagcctgtctttaagaaaggtttcctttaggccctacgttggaaagtaaattttagtgagaagagactaatctacaatggggacaccttcagctctgtttctaccactccttggaatgtgctgagactttgtctctcttttcgttttaaaaaggtcaaactttacatttattctagcccagttggggattagtgataatcaattcccactgaaatcatgcagagatggtaagtggggtttaccttctctggaaatgaacttttaacttacctgattatttcttctacaacaaactggtaaatgacccccagagctgagaaatgtgaacgattcaagtttttcagaccacttaacttcattcccatttccatcagcaggagagaggacaacttggagaatatcctcaactgggctaatggctccacatctgcaggggtcgccccgatctcctttgtgatgtactggacatgtctcaaaacagtcttagaaacaatattccttcaactgaacctagattggagagcaaaaccctgggcaccaataaacattcaacagcttccactttgtaatagcagcatatgacagaaaggctggtaaaattatggctattgggcaatattttgagacagctcgaaacccatgccttttaaatgtctgacctgtgtgtttttcagggctgacagccctctaccttcatctatagcaaaatccttacccaatcaaaagccattaatagtcaacacatagatgacgaaccctgatagtggccaagtagaaaacatttctctgtagcatttgggtagctgggaagggaattacattgagaaaatatttcttaggctacgatgtatcattatactgggaaatattttctgaatataaccttgaactaaaagcttaaaaatactcataaagcaggaaaggtagaatgcatatgcataaaatgactctcaatatgtagtaacaacattcagtgggtacgcgggtatgtggagttcatcttgaattgtaaggaatgattaattaaaacacaacatctttttctactcgagttacagacaaagcgtggtggacatgcacagctaacatggaagt

SEQ ID NO: 11243 - DNA, 347 bp, Homo sapiens
  misc_feature 1, 2, 3: n = A,T,C or G
nnngggtaccgggcctcgacgaaattaagacgttcctaggaatagctctggtgctgtaatccattgcaaattatcaagtagcttttaataactaacacggctataaaccaccataactgttcttttctccatatcaatactattcacttactaaaaaaaaaatctgagggtatagaatatgctgataactgtgctgggtattggcgacaccagggaacaaaacagacgaggcctctggctcttctaatggacagctgggtgcaactctctaaaaatactacttcatgatttgacaggatatttgccaaagtccttcactactctacacaactataacaacattttct

SEQ ID NO: 11244 - DNA, 1325 bp, Homo sapiens
  misc_feature 1, 2, 3, 4, 5, 6, 7, 8, 9, 10, 11, 12, 13, 14: n = A,T,C or G
nnnnnnnnnnnnnncaggagactttacagtttaataaaccattcaacctggagaaagggaggtcgggacttaggtggcggtggactaaggacatgacaggagccataggttgtcagggagctggagcccaaggtacaggatgggaaggctttgctatggatcccagcctttctagggctgggtagtgggaacctcccaaaattggagttcgggttaggaaatcctcacatgcagtttgggagaggctcaggaggaggaacctgagccatgtcctctgttctgcagtgaaaagaagattaaatatgaccgctgcgtgatcccaaacgccctgctggagctggccctgctgcttatggagcaagacagaaacgaagaggccatcaaacttttggaatctgccaagtaaggcttgggtaacctcagtctgtcctttgctccctctgaactcagctcaggagctggctggggacagagttgcccagagagcagtgagtggagttgctagcaaggccagtctggcagtctagagggtggacctgtgtccctcggaatccagctctcgcctgtcataggaagacttctttcttaatgtataaatgcgcagttagactcccagaggcaggaagtaagttcccaaggtcacatcagaagccaactgcatggctgtgtgaggacccatgcctcctgccttccagggtaggggtctattccctaaaaccaccccttcaagcttaggaacccaggaggaccaggagtggttccagtggccatgataccagggatgaggggccacaaacccttctggttaactctcccattgggtagggctcaactctctctggacacattaatttctctacaatccttccttggctcgcggggctcatacagctcaaacaggaggaaaagcatctctgggagcaggcagcctcatgtgtctgattcgctgctcaattccaggcaaaactacaagaattactccatggagtcaaggacacactttcgaatccaggcagccacactccaagccaagtcttccctagagaacagcagcagatccatggtctcatcagtgtccttgtagctttgtgcagcagttccgggctggaagacagagacagctggacagagctcctgaaaacatttcaaaataccccctccccctgccctgccctgcctttggggtccaccggcactccagttggatggcacaacatagtgtatccgtgcagaagccgagctggcattttcaccagtgtagccaagggcctttgccaagggcagagcaggtggagccctctgcctgccctatcacacatacgggt

SEQ ID NO: 11245 - DNA, 666 bp, Homo sapiens
  misc_feature 651, 652, 653, 654, 655, 656, 657, 658, 659, 660, 661, 662,663, 664, 665, 666: n = A,T,C or G
gaggtactgcaccctccctacccccttaaaaacccactaggaaaggaagaaggggtggaaacccattaggagggagtgagcaggcagatttgccctgagagtctacacccctggcctgatgcacagagaacaaggatgtcctagtgtggcacaaaatctagggccacccaaaactgctctcatgttctaaaggtgactgtgtggggtttgaaccttggcgcccactggacagtggtgagcactcaccaccctgaggcctggcagcctgtctgtcactggagagcgttcaacactgacactgacattagcagatcacagagcttttcagcccacgtatgtatctctgtgaggcaggacaaggcctgcttgtcagtgagccattgaggtttgcagcatgcagtacaagccagtattctggcctaggtactgaggaaaccacagaatggggatgtcagccccagggagactaactcctagtgagggcttccagacccacaggctacctccagtcctgttcagctaaatcaaacagactgcagaattcttccaattatgctttacaacttgtattaattgtaaatatgctctgtataaatattaaaattgctaattactattttaggaagacttaagacctaattagagcaagannnnnnnnnnnnnnnn

SEQ ID NO: 11246 - DNA, 1048 bp, Homo sapiens
ctgtaaaaagctgacagatacaccccagagtaccttgatggtataagtttcctcaaagtcagttaacctggtacagaaaccagttctatgaccatccagcccaatgttcaattcacttcaattattctatgccccggaaaatataactgaaaagcttgatttatatgctagagaagaagcacaagtttttaatcaccacttagaaaaaaaaaaaaaaggaatcccaaatgctaaattatgctgtcaaatcatctaaagatgaacagctatttgcactggaggtcagagaacattacagacttggggaatatggtgttaacagtcagatccccttttttcataccaatctaaactcagagctgttggctattttgtctgacccatacaattggccagattagtctatgattgggacagaaacattacgggcactcagggattgctcatgaataccaattaatattaatttggatttcttctctttgacccagtacgcggggatccctgactcggggtcgcctttggagcagagaggaggcaatggccaccatggagaacaaggtgatctgcgccctggtcctggtgtccatgctggccctcggcaccctggccgaggcccagacagagacgtgtacagtggccccccgtgaaagacagaattgtggttttcctggtgtcacgccctcccagtgtgcaaataagggctgctgtttcgacgacaccgttcgtggggtcccctggtgcttctatcctaataccatcgacgtccctccagaagaggagtgtgaattttagacacttctgcagggatctgcctgcatcctgacgcggtgccgtccccagcacggtgattagtcccagagctcggctgccacctccaccggacacctcagacacgcttctgcagctgtgcctcggctcacaacacagattgactgctctgactttgactactcaaaattggcctaaaaattaaaagagatcgatattaaaaaaaaaaacctcggccgccaccgcggggagctccaattgccctatagtagtgata

SEQ ID NO: 11247 - DNA, 831 bp, Homo sapiens
  misc_feature 803, 804, 805, 806, 807, 808, 809, 810, 811, 812, 813, 814,815, 816, 817, 818, 819, 820, 821, 822, 823, 824, 825, 826,827, 828, 829, 830, 831: n = A,T,C or G
acgcggggtggagacatgggatttctcatggaaagtgaaaataactcactcagaataatgttttttcaaactcttctgtctttccacagtatgttcttgttactgattgtcagaaagctggttttgagactgcagcttggactaaagtaagttttgtctagaattgtttctctattcagtatagacattttcatgctatgatttatttctaagcctaggggaaacaataaacaacatctggctatcttatttcaaatttgttatgtaaaaattgtggattgatctttattggagcaaatttgtaatccaaattctcttggtgatttatttgcttggcacctaatacacctctaagctaacaacagtcatctcatttcaaatgtaaagcctcattgtaaaaacaaaaagcatatacatacacaaatatatagaaaataaagactaaaaaaatttaatttccataattttatcatcaagagacagccactactaatgctttgctggggatccttccagacattgttctatgtctgtgtgtgtgtatttttaaataagatgatgcagaacacaaggctttgttattaaaaaaaattagacacaatttccatgccttaaaatctaattcaacaaaattattgtttatgattaaagattaagttttatagatgttccatcatttatttcagcagtctcttattttagacattttcgttattttcagcatttaaagattatatctaaatctttatgtttgtttctcatgaagtgtcatgacctgcctgatatttaaatgctctgctaannnnnnnnnnnnnnnnnnnnnnnnnnnnn

SEQ ID NO: 11248 - DNA, 972 bp, Homo sapiens
  misc_feature 1: n = A,T,C or G
naggtactttttttttttttttttttttttttttttttaatgagtatctgacttcttcatgtgttacaaactcaggaaagcagacagtcttgggatattaaaatagataaagtgttttcaggatgagatggagactgccacagaactgtacacaagcatctctctaaacttaaagaaaacactgattctgggctaagagagtgtttactgtgtagatgaggtctacaggataaactcaatttatccaaatcctgtgccttccagccaagaaactataaaagaagactttgtagaatgaagcaaaaagtcatacttcctttcctaaggattgcaacctgttcacaagacaggcagagctgaacagctggtccccttccagggctccaagaaatgtgaattccaaggacaaggtagccctgaaatgcctgcctcatgggatcctgccctgtcagtagtaagcatcttcaaagtggctcctgcaggttggtctcctcaatcacagagttcagacagaaccctgacaccagccacgtgtaccatgcggtcagccaaatgtgtaaggaacttgttttgagaggagagaagaaaattctatagtaggcgagacaggcttctctctcctgctcctcctccctttctttttctctctctcctctttcttccctccttctctccctctttctctttctctcacacagttcctacatttctgcactgggggacaaaccaggcttctgatcaaaggcaatctgagacttgggttcaaaagctttgatgaagattggtacctgctatgcagatggggggagggaagaagagactagcctaggggcttttatatttctttaaagcatcagccattaatgggctaagtttaccactgggacccagagagctagtccccaaacacaagctcaaaatgtatgcattttccaattcatggttttcaaggacatgttcccccgcgtacct

SEQ ID NO: 11249 - DNA, 881 bp, Homo sapiens
acgcgggggggcactttacttgttccagaactggagcaggattaaactggtcgagcttcttggaagaaattttattttgtttatcatctttggcaccatggaagaaatgcagaacaaagctgtggttttctttgtgttttatttgtggagtgcaattgaaattttcaggtgggtagaaatgccaggatggtgtttgaatgctgctccctgtttgcagcagctctgttcttgagggagttgttatcttagccagagtctcatttggtttgggactaagattacatatgtggagaattctggttgcacctatgtgctctgcaaagttgagacagatttttttaaagccgtcattggatcataataccagactggatactagggagcagaagaggagaaccagagaaagggaagactcatcttaccatgacttcaggatcttgcagtcttggaaagagaggacccatccacatggaaaaattcttgaaagggctgaagaaacaggaggttgaaggagcaatccaggttggatagaactaatttaagactaaatttctacaagggatgatagaaatgaatcttataccacaagattattgaagtttgaaatggcctctaacccaattttcccgttctcggttgttagtagcataaatatcttttaagaaatggatctagttaaagtagatgtattcttctttaccagaccatacacactccatatgtcttccctttcagtcagctggagcaaggattttgcaaatgaacttctcagctccaggtttggtggtattttgacaaagttgctagttgagagagagaacaggccatagcagccttaaattgtgtcttaaccatggtctgtgtcccatggcacccagtgt

SEQ ID NO: 11250 - DNA, 1150 bp, Homo sapiens
actgtctgtagtatcagctagagctgagggtagctgctctgtctggatagctaggcaggcacaaaatgggagaaggaaattattcagcagccttgaagcttcaaagactcagagaaaggaaactgaaactcagtgtgccccagcccacttgacagcatgccaacttctctcaacaaaggagcataagctgatccagcttttagacagtaaatttatattaaaaaaattgaaagaatcaaggaattgaagtcagagggaagaaaacataacagctcactaacttttaaaaaatctttttatttaaggaaaatgcaaccaatttctgtatatggacatacaaaaagtattgcacattctacctctagaatatgtatctcaaattcatttacatctcttaatccctgctatcaattaattctactgtagtatagttccttatgtagaatgttattttagcctccaaatttgttcctctgcttttctgcttgccccctctcttctgaccacaggaaaatgaggagacttcatttataagatataaaacaacctgtgtcaatttcacaataaaaccccttctctaacttcacattgctaaggatcataaattcgtgtcctataggcagaattcaatccgcacatttgttctgtagggccaatgtaatgtctttatagtttttaattgttgaacgtgaatgcttttatatcattgggcatccactctccagtcctcctttgtcccctcttgctttatacctgactggttctaaaaaatttaaattacctgcctgccctaaaaaggtttttttaatttgctggccctattaaaaacaatagcatcatcaaataaaaatattttaagcagcttatgaggtattatatacttggctttaaaaattatattattatagacattatttgcaagacaatttacatgtatctcgtgtgtttattttaataactttatgatgaggacaccaatattattgccacttttcaagtaaataaacagagttttggagtattaagtgagaaaaagaggaggaataggagtgatgtgggaagaaatctcctactttagacagcataatcaggaaaggtctatctaatgagatgtcattggagaagtgtcctgaatggagtgagagggagt

SEQ ID NO: 11251 - DNA, 917 bp, Homo sapiens
actattgacatttggggccaggtaattcttgggggcagtggggagatgctgccctgggcaccggaggatgtccagcaatatcgtctacctactagtagtcagcagcaccgcaccaagctgtgacaaccaaaaaggtcccagacattgtcaatgtcccctggaggacagaactggccctgttttacaggaagataaatgtcccctaatccttttgtgtaaaagggggaatgttttttacccttagaccggataagcaagaccagctgagacctactggtataaagcatactgcctgctcacatggtgagaactcaataaatgtttgtatcactacgtaatgagagatcccgagagatgtcactttccaacaggcacagcagagggtgaaagagttgttattagactaaaaacaaaaaaagagacacaaatagtcggatacgtccagataacagctgagatgtcagagggaaccatggcaatgatcacagaagagcatggaacgcagccagggtgacttctaagagcacgactcaggacagaattgaccaggaggccaagacgacagccccgagggtgggctgtggccattgtgctttgggactaggcctcgggatgtggaaataggcaatcctaagcccagctaacaccacactgtcctttccaggcttcaaggcgccattcacagatctgaacgcaggtcatcctgcttcccttgagagagacaaagtcctggtggccggcacaagaggcctggttcattcctctaaagagggtgtcagctcaggacaatatgggcacaggccctgatcgctgggagtgggggtggtggcttccagagacctgtctatagcagggaacaaagtggcccaggaattcctccaagacctctgaggacatctttcctgctagggagcagt

SEQ ID NO: 11252 - DNA, 1547 bp, Homo sapiens
  misc_feature 1, 1539, 1540, 1541, 1542, 1543, 1544, 1545, 1546, 1547: n = A,T,C or G
nttttagccctgttcgctgtcagctttaccagattatttataggatgaagaaactgtcttgtaccttcaatttttcccacggtaatggaatataactatttatcaatttatcactgcaactgacatagccagggaaatgtttaagaaatgaataaatagaagtttattccctgcaggtagtcgattgagtccaccaaaatcttaagctaaattttatgttgtttcatggtagctgttatgaaaatggaccatctaagagaaaatccattgtttctcaaattcaaatgcattctgtgtgactaggttgttcccgtgataatgctatgtgacattgctgttctcttctattcaccagtttgccttcctaataacctcttctcatatacattctttaggaaaagaccagtgccctcagtctgagcaacgttgctggagtattctacatccttgtcgggggccttggtttggcaatgctggtggctttgattgagttctgttacaagtcaagggccgaggcgaaacgaatgaaggtggcaaagaatgcacagaatattaacccatcttcctcgcagaattcacagaattttgcaacttataaggaaggttacaacgtatatggcatcgaaagtgttaaaatttagggggtaggaacgaggctctaatacaaactttttagtgcacgtttagctttcttgttgcgtccttaagctcttttaaataaggaaggtggccaatggatcatcctgtatgtattgttgacgttcttccatgttcccagttggtgactaacctgcagctcaactgtctattttcctctttaatggcacagtagcttgggtgaatgtggacagattcctgccataattgtgctttattatttgtagttcagctttgcactgtttgctttcatttgctagaagctttcagatagaagtaaacttttcaaaaacaaccctgcctttcctctggatgcatttgaaaaccataacgtatgatttctttttctttctttccctcctctctcatttaagatgaccttgaatgatgccatgaggaacaaggcaaggctgtcaattacaggaagtactggagaaaatggacgtgttatgactccagaatttcccaaagcagtgcatgctgtcccttacgtgagtcctggcatgggaatgaatgtcagtgtgactgatctctcgtgattgataagaaccttttgagtgccttacacaatggttttcttgtgtgtttattgtcaaagtggtgagaggcatccagtatcttgaagacttttctttcagccaagaattcttaaatatgtggagttcatcttgaattgtaaggaatgattaattaaaacacaacatctttttctactcgagttacagacaaagcgtggtggacatgcacagctaacatggaagtactataatttacctgaagtctttgtacagacaacaaacctgtttctgcagccactattgttagtctcttgattcataatgacttaagcacacttgacatcagctgcatcaagatgtaccnnnnnnnnn

SEQ ID NO: 11253 - DNA, 573 bp, Homo sapiens
  misc_feature 1, 573: n = A,T,C or G
naagtcacttattaaccttaatctcctccacttgaccggcctctgtcttgttccagcagccatttttcagatacctggtacgcacaagcagggcccagcttgggagacgctaggataactaagacctggtcagcgccctgaggagtcttgtctggataaagggagacacacactagcttggacttatgcgtgcagcggagctgtgtagagcaggagtgcgtggagagggcagcaatgaactttggctggagagccagagaaagcttcgtgagctggaacacggggtaaagtaggagctttccagggcggaggggacttctgaagtggaggaaactgcctgttcaggacatggaggtagggatcaaagttctgagtcatgtgggtgggcacagagcagaggatggctggggcggtctcagggataaggagaagtttggggaccagactgttttgtcaccgtatctgcatccctgcagcctgcacaccagagtgtaagcgccaggagagcaggagctgtgtcttggcgttcattgctccactcctgtcacctgcctgagactgagtcctccgtgn

SEQ ID NO: 11254 - DNA, 425 bp, Homo sapiens
  misc_feature 425: n = A,T,C or G
ggccatgtggagctagtggccaccacacttgacaccacggatgcagaacttttccatcactgcagaaagctctgttgaacagtactttttttttccttttttttttttttttttccgcattagatcactgtgggtcttaagcaattcttcaaagcgaactttggtttttacttttgcttcactctcagctgtaggcatctctcagctttatgcagaggactgagaatgcaaagcattgactcaatcaggatccttttctcagacataattaagaaggctttgacaggttgaagattcagccccaggttcccactggagaggggtacgcagaaccgcccgtcccgccttaattaatctagaagtatctcgaggagagggccgggcagcaagcaggtcacaccttgtttccgggatggaaaacgacn

SEQ ID NO: 11255 - DNA, 703 bp, Homo sapiens
  misc_feature 1, 508, 509, 510, 511, 512, 513, 514, 515, 516, 517, 518,519, 520, 521, 522, 523, 524, 525, 526, 527, 528, 529, 530,531, 532, 533, 534, 535, 536, 537, 538, 539, 540, 541, 542,543, 544, 545, 546, 547, 548, 549, 550, 551, 552, 553: n = A,T,C or G
  misc_feature 554, 555, 556, 557, 558, 559, 560, 561, 562, 563, 564, 565,566, 567, 568, 569, 570, 571, 572, 573, 574, 575, 576, 577,578, 698, 699, 700, 701, 702, 703: n = A,T,C or G
nattatccattgggggtttattttaaaaggttttcaccggttgaatttccattgttgaaaaattttaaacctggtcccttttttttggcttagttggcccaaaaaccaagttgacctttcctgtgggcaccaccttttacctttgtttttaataaaaagttttctcccccaacaatgtccctttaaaaatattcaaaggggcgcaaaagttaattggaatatttccgcggttagccaaataaattgcccagccaaaagggttcattttttcatttctttttaggtcataattagataatgaaaatataaggtttcattatagattatgaaatttgctttggactttatttgttttgggggagattttttttttccttacatgattatattaaacactttaaaatagccttccggtttctctggcctccacctgattaatgggccctttatctttggtgtcccctaggagtgtccagttgttttattgctgtattttgttattgcagtnnnnnnnnnnnnnnnnnnnnnnnnnnnnnnnnnnnnnnnnnnnnnnnnnnnnnnnnnnnnnnnnnnnnnnnagataaaagaaaaaaatttacacgtgtagtaggataaataataagagaagtaataaaaatactaactgaacaaaaatggagggattgaccaaaaaatgaaaaatgaaggtttagagtacnnnnnn

SEQ ID NO: 11256 - DNA, 1824 bp, Homo sapiens
  misc_feature 1, 1689, 1690, 1691, 1692, 1693, 1694, 1695, 1696, 1697,1698, 1699, 1700, 1701, 1702, 1703, 1704, 1705, 1706, 1707,1708, 1709, 1710, 1711, 1712, 1713, 1714, 1715, 1716, 1717,1718, 1719, 1720, 1721, 1722, 1723, 1724, 1725, 1726: n = A,T,C or G
  misc_feature 1727, 1728, 1729, 1730, 1731, 1732, 1733, 1734, 1735, 1736,1737, 1738, 1739, 1740, 1741, 1742, 1743, 1819, 1820, 1821,1822, 1823, 1824: n = A,T,C or G
ngtaacactacttagggcaattgagctcaggcagcatgcaccgcacgctgactgtacacatgctagggtccaggacagcaggaccaagccagcagaaacagcctgagcccaccgcagactggcctggctatactggacaatgccactcctcctgtacacctgtcttctctggctgcccaccagcggcctctggaccgtccaggccatggatcctaacgctgcttatgtgaacatgagtaaccatcaccggggcctggcttcagccaacgttgactttgccttcagcctgtataagcacctagtggccttgagtcccaaaaagaacattttcatctcccctgtgagcatctccatggccttagctatgctgtccctgggcacctgtggccacacacgggcccagcttctccagggcctgggtttcaacctcactgagaggtctgagactgagatccaccagggtttccagcacctgcaccaactctttgcaaagtcagacaccagcttagaaatgaccatgggcaatgccttgtttcttgatggcagcctggagttgctggagtcattctcagcagacatcaagcactactatgagtcagaggtcttggctatgaatttccaggactgggcaacagccagcagacagatcaacagctatgtcaagaataagacacaggggaaaattgtcgacttgttttcagggctggatagcccagccatcctcgtcctggtcaactatatcttcttcaaaggcacatggacacagccctttgacctggcaagcaccagggaggagaacttctatgtggacgagacaactgtggtgaaggtgcccatgatgttgcagtcgagcaccatcagttaccttcatgacgcggagctcccctgccagctggtgcagatgaactacgtgggcaatgggactgtcttcttcatccttccggacaaggggaagatgaacacagtcatcgctgcactgagccgggacacgattaacaggtggtccgcaggcctgaccagcagccaggtggacctgtacattccaaaggtcaccatctctggagtctatgacctcggagatgtgctggaggaaatgggcattgcagacttgttcaccaaccaggcaaatttctcacgcatcacccaggacgcccagctgaagtcatcaaaggtggtccataaagctgtgctgcaactcaatgaggagggtgtggacacagctggctccactggggtcaccctaaacctgacgtccaagcctatcatcttgcgtttcaaccagcccttcatcatcatgatcttcgaccacttcacctggagcagccttttcctggcgagggttatgaacccagtgtaagagaccacccacccagagcctcagcactgtctgactttgggaaccagggatcccacagaaatgttttggagagcgggaggtttcccccaatctcctccaagttcttctccctccaaccagagttgtgtctaactttaggcatcttttaataaatgtcattgcgactctgaaaaaaaaagaaaaaaaagtcattttggggaagacgtttttgaactaaaggattcccacgatctttaggaatagggttcctgcccgggcggccggttttaaaataagggaccccccggcctccagaattctaaatcaacttaatgatacccgccaccctaagnnnnnnnnnnnnnnnnnnnnnnnnnnnnnnnnnnnnnnnnnnnnnnnnnnnnnnntggcaaaacaaggggaatagactgtttcctggggaaaaatggttatccgttcaaaattccacacaaaataaaagcnnnnnn

SEQ ID NO: 11257 - DNA, 1159 bp, Homo sapiens
  misc_feature 1, 2, 1158, 1159: n = A,T,C or G
nnatcatgagtggataaacttttatgagtatttgtaaatttcttgaaattgctttcttatgggattcatgtcataaactatttgggcattacaattatgaaagtattccagaaatcagaagttttgacctgtgtgtatgttattaaatttagctactctgtactccttgcccaaaatgtttaatgatttccagtttcattaactagtagatacattgaaaaatataaaattaaatattcccctataagtcaatatttgcataatactgctaacttgtttttttattaggtcattcatttcactttacaaatccatttcatacttgttattagatccctctctgggcgcattgttggaggtgtgtggtggttctttaccctgatcataatctcctcctacacggctaacttagctgccttcctgactgtagagaggatggtgtctcccatcgaaagtgctgaggatctttctaagcaaacagaaattgcttatggaacattagactctggctccactaaagagtttttcaggagatctaaaattgcagtgtttgataaaatgtggacctacatgcggagtgcggagccctctgtgtttgtgaggactacggccgaaggggtggctagagtgcggaagtccaaagggaaatatgcctacttgttggagtccacgatgaacgagtacctgcccgggcggccgcccgggcaggtaccctggccactcctttccttttggctggccaatgtctcctctgtaggctccagaaggctctcagggatgcaggcggcctcctgcagggttgagttgcaatgggaacaaagacagctgtggtcccatagcaccctcatctggtgacatcctgctactgacagtcaaaagaagccttcccagatgaaattttagtcctctgcgcagccatgctcttcttccagcaaaagagccatgtgcagtcgggtctgctccccatgggggctttgatgtgggcccagcagtggatcagccttccagacacgctcaactctgcacactcttcctgccgcctcaggctttccaggaccctcccgagccttatcagagtccttaccctcagggctactgataccttgctgggtgaccttggacagattcacttacctggactcagtttcatacccgcgnn

SEQ ID NO: 11258 - DNA, 1177 bp, Homo sapiens
  misc_feature 1: n = A,T,C or G
ngctcttttggggtctttgctcttttggggtctttgctcttttggggtctttgcttaaaacagaagcctggccatgtttgtgtaaagcagctatgctgtgcccagactttttttttaagtcagtgcctgtttttgttcctcctgactagataagacttctcaacttgtctccagtcacatcttataggtgcgttcatactggcaacaagttcgtacctcagtggcacagagctcccagaggaaggggcaggctatcatcttccctggaaaatacaaggcaattagggactggaggggacccccagcataccacagcagcctgacagaaaagtggccagacagtctacttgatgggcaggtcctactgacctgggtctccagccagtccaccatcagagctatccagccagtagcaactcagcaattccctggacagagcttccaggagcaaacgaaattctctcttccattgcctctgcagtgaaactgccctttctaccctcagaatatcaagggagcaaagaccctaagtgccatattgacacctccaataagctgcggttgacccaatgaacaagccagtccatctcccacgggtaccacacaccctccactactcatcaccagacagggaaccctggcttgggcccacagcacagaccctccatcctgggccgattacactaagtgattgctaactcacatgtctctgggatggagcacccaggagacaagcaaagtgttggagcagcaagtcaggtgatgtggagcccagagggctgggacagctatctctctagggtctacttgcccttgtgagacactttatcccagcactttaggaatgctgaggtcataccagccacatctcatgtgcaagattgcccagcagagatcaggtccaagagttcctgttttaaaaaaggggacttgcttaataaaagaagtctggccatgtttgtgtagagcagctgtgctgtgctgggggttcacttttgagagagttctcctctgagacctgatctctggaggctgggcagtcttgcacatgagatggggctggtctgatggcagcactccttagtctgcttgcctctcccatggccctagcctggccacacatgcttacagggcactcttagatgcccacactatagctgccgtgctagtggactgt

SEQ ID NO: 11259 - DNA, 290 bp, Homo sapiens
actcttctcccctttcacttttctgtctccctagagcttctgctgctttctactgaattttgtttcttgcttgaagaagagggtagtgaaggaaaggaggaaggcaaaacagcaagagagagaagaggctgtttggaacattctggaacagtttgaaacagctcaggcagggagaatggaacgaaagcctgcaatgagaaaccagaatgctgctatcattttgttcctgacattcacacctcaggtcttcactttggggagcgaagccttttagcagaaataccagaagt

SEQ ID NO: 11260 - DNA, 3051 bp, Homo sapiens
  misc_feature 1, 2, 3, 4, 5, 6, 7, 8, 9, 3045, 3046, 3047, 3048, 3049,3050, 3051: n = A,T,C or G
nnnnnnnnnggtttattatacaacgagaagcacaatatgccgtttctggggcacccaaagtgttcaaaccatgttccattttaccccttctttaccctcttggcccttaaaaatgtgggctatgttgcccgagtatttttgcccccccctttttgtttttttttccagttttagcatgcaactttattaacaacatgtaaataaaatctcaaaagaatacacatatcaatataaagcacagaagtatagcttactcaggatgaatagattcattatcaggtcacgttgcagaaataccaaaaatatctcaatttatatactatatagcacaataaaaatcagcacatgttcaggatctcaagattaattggtatccataaaattgcctccctcaatcaacatggaaaacataagtattgaatttataattacaatatgcattggtttcatattgcaactccaaaaaactgtttgaggctttatgagaacagaggggtattcagagttttagtattaatcgtatgactttatctctcacttcgggatcactgtgctctgctaagtcttggagtttctgaccaaactgttttgcttcctggaatattgaaataagctcagatttagtgaacttttccttggtaaatagctttgcctttgttttgaactgaaaatttatattctcaaatatttcaataatattaagaatattggcctttgactcattcttgttaaagggtgcaaccaatgatgacagtactttggcactgatcaattctcttgtattggcgtgatttttagacaaacacgaaaacacttttaaaacataaaacttggttttgacacttcccttgtttaacaaggtgaggaaatctggaatataactggtaatcacatagtgatcttcaaattttatactcaagtgccctagtaatttcagtccagccagctgcacaggggagttcaaggggcaagagattatgcctttacaaacttgatgtatatatgactcccctgattttggttcttcggaagactcagagctgtcatccaccatacttaaagctccagggtgttctttaacattgggattattgaccaagttttcaatcataacagtaatacctacatcatgaattatatcttgagtaaatggataagcaggactgatgcccattatcattgtagctatttcatgaatgaaaggatccttagttaacttaaggagggcaacaagtttatcaaactctttaggctctaaactaaagccacgtgatttgcagtggcaggccttcggattaggcccatacttttccctttgcctaatctgtttttttgatctcagctaaggtctggtaataaggcccatgataaggtgggatcttggtcaaaggtcgaatccccagaggagtttcaatcaaggtctcaaccagggtccagtttccttctggaggcaaggattgctcccctccttcaactggaactaggacaatatacctggcccttgaccatgctattaccttttgttttatagtaagtgtgggtttgtgtgtgggcttgggcttttcctggatcttaggtaggggcttataaacttgaagagaggtctcttcttcaggccagaaccaggaccctacactaggctcttctccagtccagaaccaggagcatatattttcttcatcctcatcactggatttcatcccaatgctggtctcttcccttctgtcaggtctggacccagtattggccttatcatgtgacttggcataggacctaatatttgcctcaatgacagcaacaaccttgacttcagacttggttacagtactgaccctagacataggcatggcctttgacttggtttgtggcactatactgcgttctgccaggggttttgtcttagtctcaaccatgactctagtcttagttgtatcttccaccttgatcacttcccttgtcacagccatagcctccctgtaggtcactgtatgtgtcctggtcattgctccatcaccagctttggcctgggtcactgattctgttttcagttctgcctcagccactgcctcggcctgggttttaccattcactctagcagtggcaggaccactgattccatcttgcaggccagcctcagcctttcctctagcccttgcttctgtcccagagtcaaccatgttccaagtttaacgtaaggacaagttatatacccccacccgtctcagccttgactgaagttttgtcccggttggtgttttcacacaaagtccagtagtcactctgtcccctttccaactacaggctctgccagtgatatagaaaacatgcagaggaagctcactcaaggtagggaaggatggctgtgcatgggcccagccctgtggagggtggtggtcttcagccactccaaggccaccagatctgccactgaagtaggaccttgcttccaatggtgacaagccctacagcagatctacaggcagacctatggacaaataaacaaacaggagaatgtggaaactgatctcctggtgacagaccttggtcccttgcccttattcttgcctttccagattttgtctagtgtttccctcctcctatcccctctcccccactgctttgtttcagggctactcctcctcctccttcctattgcccaccatcttcctcttcagtgattgccctagaatgtccctcgttcagattagactaggttcaagcgtgagagcaggacaagcagtggagagtgggaaaggcagcttagcattctgtacccccacaacttaccaagactcccaactaaatcagcagcagcagggggtggggcagatgggaataattggtaaaatgaccaaacagaagagatggaattctctagtcgaagttgcccccctgtccctgtacctttacaccaaccctaacagatacagggcaattttctcttcttcgtaatttcctagttttaagttgggtgaccattttacaaacttcacactgacatccacagacctggggacagatattactcatagggatcctctagannnnnnn

SEQ ID NO: 11261 - DNA, 646 bp, Homo sapiens
  misc_feature 1, 2: n = A,T,C or G
nnactactacctaaattcccggccgcgtcgacttttttttttttttttggtggaattatacgatatccctgttcaagaattgcagcctagtaaacacagctcataaaacttggaggtgacagggtgcttacccaacagatgctgatgagtgaagtgtaaatgaattagaaacatgtggatacaatgtcttaagtgtatatgcaggggttaaataaaatacggtgcttgctcaaagcaaagcaatggaccagtttgcagcatttggtctagtaactaatccaggagcagtcagagccacagcagcgccagacttttcctccactgactgcattatctacgtattattgctcctgtttatgacaaagtatccgcctgcccttggattccaaattctggactagactcagatgattactatttaaaatgctttcccccagactgcattttccgggacaaagttatggaaaataagatgaggagaatgattctcagagctcaggctcttctctggaattagaaaactgttttgaaaaagtcagaagaggggtgagactaagtcttagcttttcctgttctgaaaaagaaaaggttttgggcgctttccattattaaagcttaaatgcaaaaacacacagcttacccgcgt

SEQ ID NO: 11262 - DNA, 1611 bp, Homo sapiens
ttaatacgactcactatagggaatttggccctcgaggccaagaattcggcacgaggatcattctgacttattaaagagctatataaccagttaattccatctgtttgatgcttgacatccctaactagacagatgagggttgaagttagtttttggtggggttggaggtgaacatcaactaccttcctagttccaggtaatataggacatggagtgaaatgtagataaatgggtctggtgggtcccagagtcctcttatcacataatgactaatttacgttctggaaccgcagacaaagtgttacagatacatttcccattgtcttctgacaggtgtactatcctaaattgttgcctcttacaacctaatatcctgttgggcattctggacaacttggacccagtcatgttcttcaaatgcccttccccagagcctgccagcctggaggagctcccagaggtctacccagaaggacccagttccttaccagcctccctttctctgtcagtggggacgtcatcagccaagctggaagccattaatgaaccaattcgttttgaccacatatataccaagcccctagtcttagagataccctctgagacagagagtcaagctaatgtggtagtgaaaatcgaggaagcacctctcagcccctcagagaatgatcaccctgaattcattgtctcagtgaaggaagaacctgtagaagatgacctcgttccggagctgggtatctcaaatctgctttcatccagccactgcccaaagccatcttcctgcctactggatgcttacagtgactgtggatacgggggttccctttccccattcagtgacatgtcctctctgcttggtgtaaaccattcttgggaggacacttttgccaatgaactctttccccagctgattagtgtctaaggaatgatccaatactgttgcccttttccttgactattacactgcctggaggatagcagagaagcctgtctgtacttcattcaaaaagccaaaatagagagtatacagtcctagagaattcctctatttgttcagatctcatagatgacccccaggtattgtcttttgacatccagcagtccaaggtattgagacatattactggaagtaagaaatattactataattgagaactacagcttttaagattgtacttttatcttaaaagggtggtagttttccctaaaatacttattatgtaagggtcattagacaaatgtcttgaagtagacatggaatttatgaatggttctttatcatttctcttccccctttttggcatcctggcttgcctccagttttaggtcctttagtttgcttctgtaagcaacgggaacacctgctgagggggctctttccctcatgtatacttcaagtaagatcaagaatcttttgtaaaattatagaaatttactatgtaaatgcttgatggaattttttcctgctagtgtagcttctgaaaggtgctttctccatttatttaaaactacccatgcaattaaaaggtgcacggcgggcctggggcactgctctcatccccaaaaaagagacccggtggagcctcccaggggggaacatcagagccacag

SEQ ID NO: 11263 - DNA, 532 bp, Homo sapiens
  misc_feature 320, 519, 520, 521, 522, 523, 524, 525, 526, 527, 528, 529,530, 531, 532: n = A,T,C or G
actttttttttttttttttcccttgtgactggagagaagtgtcacattttgctcactctcaaccttcctcgcccacccccttcccggagaacctgtgcggtgtgtagagggtgctgtgagccacctccagcctcgggtggctgcttaagtaactttcaactcctttctttttaacacttttaaagtgttttcgggaaggcgcaggggcccagccagctgcttttccttgcctctttgcttgctttttttttgaagatttctgcaaacccggggcaacagccactctttaataacaaaccggcttatgtctggtgaataanagttgattaagtattttatttccccaaaaaacagtaagaagggaaagcattatttgcacctgaaaagaaaaattattccttattcaaacttttaaagctcttgggataaaacagttaaaaaaaacagggaactcctcaaggaaagtattgtaaaaggaaggctcaggtacctattgggaaaaaaattttccttggggannnnnnnnnnnnnn

SEQ ID NO: 11264 - DNA, 1064 bp, Homo sapiens
  misc_feature 1, 1063, 1064: n = A,T,C or G
nagaggatcctggcgcaggtgctatgatgcttggctaattctgactttattttggtagagatgaggtcttgctatgttgcccaggctggtcttgaactcctgggctcaagcaatctgggacctaaatggcaaataagatgctaatctgtggttgcaagccccagtcctcttgaatagtgatgcctatctgtctgtgtcgggacatagtaaggaagcccatgtctagtctggtacctttaaaccaggccatctccaacttttcaaaatgactcaaaagttgagctagccttattttaaaaactaaaagttcaaaatcagtggtgacatgaggacttatttatttaaagtgcttaagccttggttttagagtttctaagagacctagtggaatttgctattatgaaaagcatgaaaagattaagaaacctggctaaaggtcaggtgcccagcttcgaggaaaagttgggcttttagggaccgggaagcattaaaggcacagaaactttacattttgggggtcattttgttgagtaggtgaagtgagggatttgggcttgatatttggctgccccatctctatgtgggaactcaaagttaaaaacccactgtaggtaaattagaagggcagctcttgaatctgggccagtctatatcccttctgtgaagtgctaacagccaggctatctgtagcctgggtgggagcccagataatgtgagctggtaaagggtattggaaaagtgccaagaaatgccaagcttttggttcgtaaccactataaaaagtttatgaacatgtcagaggaatggatgagtgatttgtgaggtcttaactagataccccggtttcttccttgttttggcttcttttcagaatgccgggagagtacatgggggattcatttatcacccagacctctctgtcgcgggaatacatcgctttatagggccacggtcacttggggacacgcaccgaattcacggccctgacagaagggtagatcagtttcaggccaaaagatacagagaaggtgtcatagtagtcacccaattagttgcacggaann

SEQ ID NO: 11265 - DNA, 531 bp, Homo sapiens
  misc_feature 1, 2, 3, 4, 15, 56, 529, 530, 531: n = A,T,C or G
nnnnatcccacagcncaactctagaaagagagaaaggggaaagataattttttttnttaattcttggtctctgagcatttgcaatttgaactgtggttccctggccacagttgtcttcaggagttgaaatggccagaaagggaaatatctacatggtttatccttgagatggcaaagacatctgcaccaatgcacaacccaccgggagcatgcattgctagcaggtgaaattcacatggaaaagtaggattgtgggttagggtaagagatacagcaatggttacaagtgcagaatttggaggcaagtagtccttgattagaatcccaatactagcatttgctagctgcataatcttgggcatgtcactcagcttctctctgagccaccctctctttacctttaaatggagttgatggtactgtttcatgggattgcgtgatgattaaatggtaatatttatcaacttcttagtatcatacctgatacatggcgagtgcccaataagtgtcagcgtaataaagaaatcannn

SEQ ID NO: 11266 - DNA, 512 bp, Homo sapiens
accccatcagcgttgcacccatctccatagttgtagtttccacacacttatacaactcaaatgttcactttactgtgcagtccattccctctgttttgtgatttttaggaaatcttcataatttacggtctacaaaactattattttgttttcaaggaagtcgtgttatatatttctgactgtcttttctcttatttctagaattcaagccaggaagaagcagcaatctgtcttctggattaaaactgaagatcaacctactttcaacttactaagaaaggggatcatggacattgaagcatatcttgaaagaattggctataagaagtctaggaacaaattggacttggaaacattaactgacattcttcaacaccagatccgagctgttccctttgagaaccttaacatccattgtggggatgccatggacttaggcttagaggccatttttgatcaagttgtgagaagaaatcggggtggatggcgtctccaggtcaatcatcttctgt

SEQ ID NO: 11267 - DNA, 1177 bp, Homo sapiens
acgtctgtccattccttccttcagtgttgatgacatgtttgtagctgccaggccctccggtagtcattggaggtaggactgcattctacctgcaaggagtttacagtctggaaaaagcggtaggtaacacaccgtggactcttgactgtgccctcagctcatctaaggctctgcatgttcacagcccctgaccccaccaagggaggagttatcccgcttacagatgaggagattcgggcatggagcgcttaagacacttgcctgaggccacacagctcctaagaggtgggaccacagttcacaaccaaggcaggctgtctccagggcccatggccctttaccttacttaatgttgcttttgtgccggagggatcaggcagagcccagagaggggtgatgtgtgaagtaagcagggtgcaggacaaaagaggcggcatctcagtggggtctgcctctgcggtgagcagagggaccagaatgtaccattgcatgcaggcgtgagtgatcacagcacgtcccaggaacttcagtcatggttttatctgtattccacttaccatggctgtgcaaataactactgccaaaacacactagtgtaaaacaaccatccagtttcttcatggatattataggtcaagaatttggactgggtgcaggggagatagtttgtccctgctccatgacctctgggccttggcaggagagcgtgaaggctggggcaaatcacctgaaggctcactcccttgtgtgcctggcagttgatgctggctgtcagctgaaggcctcggttccctcacatgagcctctctgtgcggtgtctccaaaggctagctcgtgcttccccactgcatggtgactgggtgcaaggacaggcattcaagggaaaaagagccagaggaaagaggcctcttccaacccctacatcagatgtcacaaaacatcactttggctgtggttactcagggccaccagatacaaagggagggaacaagaccccacctctcagaggaggggtgtcagcatcacgaggtgtggcagtctttagaaaatgcaaccgtcggccgggcgcggtggctcacgcctgtcatctcagcacttttgggaggccgaggtgggcggatcacctgaggtcaggagttcaagaccaccctggccaacatggtaaaaccctgtctgt

SEQ ID NO: 11268 - DNA, 642 bp, Homo sapiens
  misc_feature 1: n = A,T,C or G
nacgcgggggaggaagtgcagactgacatgggagagcatggcaggcaaacttagcctgtaagggtggaggtgctggagagacacttcctgcaggaagtggcctgtaggctgatacttgaagaatggttaggagttaggcaattggggtgggagggaggaaatgaagctgagacaaagaatagcaagggccaaaacctagaaacaagagactgtaagctatagcaaaggaagtggggtaatgcatgttttaggtcctgtgtggggtgtttgtgaatacacatgcggggtgtggagcgtgatgagagacaaagctgagaagtgtggtggaaaaggaagagagagctgaggcagacgatgtaagatctgctgttacttcttgctgtgtgaccttgggtgaagtgaagtgggtgtgcctgggatcacacacagctgtgcaataccaagtgacatgggacttatacaaaggcagcgccactagtcatgctggaagtgtccccaagaagcagggaaaattcatgacgtgatatataagaaaaagttgaattgcttgatatggaccattgattgaggtctgcagctgcagttgctgccatcttagaccgactgttcatcttgtaaacttacagaatcaataaatacggt

SEQ ID NO: 11269 - DNA, 778 bp, Homo sapiens
accagtgcattaatttgggcaaggaaagtgtcataatttgatactgtatctgttttccttcaaagtatagagcttttggggaaggaaagtattgaactgggggttggtctgcctactgggctgacattaactacaattatgggaaatgcaaaagttgtttggatatggtagtgtgtggttctcttttggaatttttttcaggtgatttaataataatttaaaactactatagaaaccgcagataagtttttttctctttgaaagatagagattaatacaactacttaaaaaatatagtcaataggttactaagatattgcttagcgttaagtttttaacgtaattttaatagcttaagattttaagagaaaatatgaagacttagaagagtagcatgaggaaggaaaagataaaaggtttctaaaacatgacggaggttgagatgaagcttcttcatggagtaaaaaatgtatttaaaagaaaattgagagaaaggactacagagccccgaattaataccaatagaagggcaatgcttttagattaaaatgaaggtgacttaaacagcttaaagtttagtttaaaagttgtaggtgattaaaataatttgaaggcgatcttttaaaaagagattaaaccgaaggtgattaaaagaccttgaaatccatgacgcagggagaattgcgtcatttaaagcctagttaacgcatttactaaacgcagacgaaaatggaaagattaattgggagtggtaggatgaaaccatttggcgaagata

SEQ ID NO: 11270 - DNA, 1590 bp, Homo sapiens
  misc_feature 1589, 1590: n = A,T,C or G
gcgtcagatcagtgatcctattcagcagatattaattcagctgcacaaaataatctatatcacacagcttcctccagcttcgcaccacaatttgaaaagaagggttatagagagattcaagaaatccctcttcagccagcagagtaacccttgtaatttgaaatctgaaattaaaaagttatctcagggatctccagaaccgattgagcccaactttttcacagcagattaccatttattacatcgttcatccggtggaaacagcctgtccccaaatgaccctacaggtttaccaaccagcattgaattggaggaaggaataacatatgaacagatgcagactgtgattgaagaagtccttgaggaaagtggctattacaattttacatctaacaggtatcattcctatccatgggggaccaagaatcacccaaccaaaagatgaaaatgctgcattttgagtggacttgattttctcagtgaagttcaagttctggacttcagccgctattgcaagatgcccaaggattgggtgctgctagagggtgtggaaaagaccaagatgccatggggcctgcaggacttctttctgggggtcctgtgctggagtatatgacagctgcggtacttgagggcttcattgccagaacacattatatacaggatgtcagagctaccagtgtgctgctgggagaaaatgctgcaaaattcatcttttggagggtggggggaaaacccaaaaacaacaacaaaaaaactctcttacagaattttccttaacattaaaaaaaacttgtcatatttttcaaaggcacatttgatactcagaattgctaaaagtatatttaaagacatctagccttccatatgtaaaaaatattttagataaagacagttacaggactcagaataatatattgggtgattcactgtatcctccacttttacatttaaagaaattcaaaatacgtgattaaatttttttttttttaatggatgggttggttctcgcttaaccacttgggtgctagtggtcttgaactgtgatacagtgtagacagtatttgtaaccttgcacagcctctgggggtaactgtcaaactgtcagatttaacttagactaatagaatatattgctgtacagtgtgtgtatatgtttatatatgagggcggaaggggagaggttttgattagactaatgctttgctgctaatcaaacttatagtatttttagagcattttgaagagtttatagaatctatgaaaaagatgcaatattcctcatcctaaatccctccttattacaattacctaaattgtttatgaattgtttaggattttgaaatgaaaataagttaaatcccttttttactcattgaggcagctcaatggaagtgaaatcagaatgccaaactgtgtatcatcctttatgccgggagaattatgatgaaaatctgctagattctcactgggcttaaactccttctcttcaatcagcttcttaaaactctggtgtaatgtcaagaaatacccttattgcgaaatctgtctacacttctagctacctaaagagcaatttattctacatnn

SEQ ID NO: 11271 - DNA, 1989 bp, Homo sapiens
  misc_feature 1985, 1986, 1987, 1988, 1989: n = A,T,C or G
aaaaacaaaaaacgaacaaaaaaaaaaacattaatcataaaactctctcctcaggaaccagccgtccctcacattaccaggtcttgtgggatgacaactgcttcactgcagatgaactccagctactgacttaccagctgtgtcacacctatgtgaggtgcactcgctccgtctctattccagcccctgcatattatgcccggcttgtagcatttagggcaaggtatcatctggtggataaagatcgtgacaggcaagtttcttaggcacaataaagtctctttatattttagtagcatgttaaaaaaaatgagctacaatagaaaacttttttaaggatttaaactttcagagtttaaattgtaagaagcaaataaaattgcatgtgcctctgagagcttgtaatgtgacttttggtccaagaagtgctcaggcttgtttatacttgtgttgtgtctctaaaggagtttaatttggagctgcttgtggttctcccatggagccaaatgcatttcagttctgctcaggtcctaagtagcctcaaaaagtggtcaacacagtaccctggctccggtcaaagtagtcacagggctgtggattccacttcatgcaagtgaggaggcctgaccagttcactttgcttttggtacattctggaaaaataccccagagtgaacctggatgtgtgtgtgggagtgggggcacagatgattctcactctcaaataggcatctcaggagaattagagaatctgttattttgacctattcctgagctactattaaatagttacacaagctctctgcattaattttcttttccaaatgaccatctgtgaagtgtagcagtttctgggctcttccccaagtctgaatttcagctgcttaaatagtagacattccactgcaagtctatttctgtaagggttgaaaatacactattatggaaaatgtccaactgtggctttgtaccttccattccgtaatgtgctttcatttattcggcatatttattaggtattgactgtgtgcctagtactgtgctaggtgctaagaaatactaagatgagtaagacatgtttcttgtccacgggggattttatgtttcagtatgggagacaatacaggccaatatacaactgacaagtagcccaagtcagtacagataaaagtgcaatgggacaccagaggagaggcttttagagaagatttcatagctggatggatagaatggctctacaaaaaagagaaaagaattttcagggcagagagaacaagggacacaaaggggaaaaagcaagtggcatgtttgtacagtagcaaattttctttggctggaggatattaaaggggaacaagcaggtatgaggctggaaaaatatgttaaagcaagaccctgtctgttaaatgtaaaatgctgttcctaggatagaatagacaggacttaacagttaattggatatgcatgtcagaggagagggtgaagtaaaagatggctaagattttgagcctagatgataaggataataatcacttaaagagaaagtcagaagagggatggggatttacagcttgtcaagccctttatatcacatggtatccttaagtagtatgtttagaagtcgttgttgctactccgaaagaccaaagttcagaggagttattatgtgtccaaggctatatagttagtgaagggaagactcgaagagactggtggcacactagcatttgctgggaataccctatgttccatgactatgctaggtacatagatacatacattcaactaacgggttattgagactttgttgtgtcatgtgctagacaaccaacgatacagagggtgggcaagggggacaaaattgctgcttgcttggagtttatatccgagtgggaaaataaataattacccaagtaataatttaatttcaattgagtttagcaccatgaaagaaacatatcggtttctagtgaagcatgccccannnnn

SEQ ID NO: 11272 - DNA, 1349 bp, Homo sapiens
acccttccaccatagctgtaatcttcaaaaacaggaacacagtgacagagactgttaaaggaacttcttcactgaaggtaagaagaataacacaaatttgaaaagggcctctatcagatatagggaaacttctaatgacctggattgaataccagacacagaaatgtatccctgtcagcacgctgagtatcatggccaaagtataaagtttgtgatgttgaaaaaaaaggctggatctgactatgatgtcagatgttaaatttactgctagctctgggtggtttaaacaattcagaaccattattcattacataatgtgaaagtgagtgctgagtctgtgagtgctaatgttaaggcagctggagaatttagaaaccctagataagctaattgtggaggaaatttacttgccaaagcaaatcttcaatgtgtatgaacgctccctattctggaaatggatgctgaaaaagatattcatccataaggaggccaagtcaatgtcaggtctcaagccttttaagaacaggataaaagtcttgcttgggggcaatatttcaggctacaaattcaaaccctttgtgatctggcactggacaaaccctggggccttcaagcatacaagtaaacacacactgccagctacaggaccaacaagaagtcatgagatgacccaatttctcttccaagatgttttcctcaattgctatcacagcaaaatagagtattgtttagagaaaaacatacctttcaagagtttgcttactgttaataatgttcctgcacatgtttctttaattggtgatctccatcccaatatctaagtggtgtttctccctctaaataccacctctttgatccaaccaatacatcaaggagttaaaacagcatttaagttctactacctcaggagtatctttgcccaggctatttctgcaattgaagaagacactgcaaagatattgatgtaattctgaaaggattactacatctatgattccatcaagaaccttgcttagccttaggttaatgtcatcaagtggtgtataaatggcatctgaaagaagacacttaggggttgtctatgatgtcaaaggattttccaaggataaggaggttgcaaaaatcaacaaggttgaaatggcaagcaactttaactcaggtgtggatgaagatggcattgaggagcatctataggtggtttctgaggagctgactaatgaggagttattggaactggaaaaggaatgcaatgctgagcaagaggtaagagaaaaggaaactgcacgagaagaaaaataagaaaccctgttaaaattcacagcgaattgtttagcagaagtttttgcggt

SEQ ID NO: 11273 - DNA, 460 bp, Homo sapiens
  misc_feature 1: n = A,T,C or G
nacgcggggggcctgattatatgtggcaactgcatgtagagaaatctaattgccataccttcctttttctaatttcttttaacaaaactgctttttctctccctttggcactaattggtaacattgcttccttccatcatagccctgaattatcagatctctctacccagcaatggttctattaacaacctcaatcttaaaacacagccaaataattaactcaaatttatttttttcttctcccctaccccttccttttacagccaaagaacctgaaattggaaacttaaatgtttctgacataactcccgagagcttcaatctctcctggatggctaccgatgggatcttcgagacctttaccattgaaattattgattccaataggttgctggagactgtggaatataatatctctggtgctgaacgaactgcccatatctcagggctaccccctagt

SEQ ID NO: 11274 - DNA, 2320 bp, Homo sapiens
  misc_feature 2313, 2314, 2315, 2316, 2317, 2318, 2319, 2320: n = A,T,C or G
cgacccacgcgtccgtgtcaggctgcgcaggcggccagtccattggctggaagagaccggagccgggctccgggcccgaccagaggagggcggtgctgcagggctggtccgggaggtgacgaccggcttcggagagtctatcatggcagctcggactggtcatacggccttgagaagggtagtctcgggatgccgtccgaagtcggcgacagcggccggggcgcaggcgcccgtgcggaatggcagatatttagcttcctgtggtatactgatgagcagaactcttccactacatacctcaattttgcctaaggagatatgtgcacgaactttcttcaaaatcactgcaccattaataaacaaaaggaaagaatattcagagagaagaattttaggatattcaatgcaggaaatgtatgatgtagtatcgggagtggaggattacaagcattttgttccttggtgcaaaaaatcagatgttatatcaaagagatctggatattgtaaaacaagattagaaattggatttccacctgtgttggagcgatatacatcagtagtaaccttggtgaaacctcatttagtaaaggcatcttgtactgatgggagacttttcaatcatttggagactatttggcgttttagcccaggtcttcctggctacccaagaacttgtaccttggatttttcaatttcttttgaatttcgatcacttctacattcccagcttgccacactcttttttgatgaagttgtgaagcagatggtagctgcctttgaaagaagagcatgtaagctgtatggtccagaaacaaatatacctcgggagttaatgcttcatgaagtccatcacacataaaggcaaaaaagaactggtgccacctgcttctgactttagtttgttcacttttaggaagtattttcatgacatgttttcagaagccagaaagcatttgttaaacgcagctttggttataaacctgcaccattgaaaatttgcacatagaatatagactcacttgtacatagaattatttcttcaagtataattcaaaataatatggacattatcatgttctgcattacaataatgggatgtcatcaccattgctagaatactggcatgattcttctgagcagaagttgaaactgtaaatttaaaccttttaattatcaccttacctgaaagaggttagttaagatattcacacagtatgtattatattaaccatatcacacttaagttattaaattcagactatttgtaacttattgttatagggcctgccgtatggcttaggatatttgagtaatcatatatttaaagtaaaaactttgggctgggcacagtggctcacacctgtaatcccagcacttggggaagctgaggtgggcagatcagttgaggtcaggagttctagaccagcctggtcaacatggcgaaaccccatctctactaaaaatacaaaaattagctgggcgtggtggcacacacctgtaatcccagttacttgggaggctgaggcacaagaatcgcttgaacccgggaggcggaggttgcagttagccaagatcgccctgctgcactccagcctgggcaacagagggagactctgtctccaaaaacaaaaacaaaaactgttagtgaaggttccctgggacttttgatattttaaaaattgttcttatgactagtagataaattcattgccataatgaggctagctcccagataaacagtgtattttcttctttttttttttttttttggtgagtggtccagagctttaagctacttttccagtagtttgccactttctccgaggtagtttggctgctctttcagtaatgctaattgtgtgtcaaattttgtctacaacagtaggcaacagatgaagataagttggttgaatgtctccagcactatgcatccctattttctatttattgtgtacactcactttcagtaatgtgtttcaaactggtattttttaaaaaacaaatcaatgtaaggactgaagttgaagtagcaatgtaataaagttaatttgtttaaaattggtaaaaaaaaaaaaaaaaaaaaacacgaggttgagcccggtacccaattcgccctatagtgagtcgtattacaattcactggccgtcgttttacaacgtcgtgactgggaaaaccctggcgttacccaacttaatcgccttggagcacatccccttttcccacctggcgtaataaccaaaaaggccccacccatcgcccttcccaacagttggccaccctgaatggcaaatggcaaattgtaaccgtaatannnnnnnn

SEQ ID NO: 11275 - DNA, 1397 bp, Homo sapiens
  misc_feature 1, 2, 3, 1397: n = A,T,C or G
nnngcatctttatatattatctgactgtcctacaatgagcacttacaacatttttctaatcatcatgcccatttcattttctaaaaaaaatgttcataatatggaatatatctttcctgacctttttaattcacttatgaacaaaacagacattttctataagtgtgatcattctgtgcacacttggttaaaacaattgtatatgactttcataatcagaaaaaattaaagtttcttcatgaaattcaactatttgctattcaaggagatgaagtagattggtgatttgctgagtcatctgcttatttcctcactcagaatgcctctggtttttctacttctccctatacattttggaagaattccaaaggtacatcagagaaatggccctggtaagctgagcctgcttccagagtgaccacagtgaggcaaattcaaacacgctccatttcattcagtgggctggtggtcacatattttagccatgaaaggaacaagaattcactcaacttctaactcaaaatttcttcttagttttctcactgctaccctgcaagtagtgcaagaagaatcaaagagggatggctattagtcacataactcttaacactaaaaagaacctcttgttatctgtgtggttcgtcaccctcttcacttcacaaatgagacttgaagacaagaaatgtcaggtgacttgcccacagacacactggtcaagacgcaaagccaaggctggaactggggcccatcctgaggaaatgacactgctgctgctgcctacagctcccctccccaactctcaggagctggtgtgccttgcctatagctggccttagagaagctgctcccagatcctgcctccaccattcctgctgttccttgcttctgactcctaagaagacttggttttagagctagggaagcaatgaagagcaccacagcagttgctgcacatcatcagcacagacatccagccagcccttcctgaccccagccctgcataaagggtgaaaggggagcaggtgcctacagtaggtagaatcatggaagaaaagcacgccattaggaggagcaaggattcaccacatcactgcttatctctcttttttaatatgacatatattttcatgtgctacatattcccttcgaaaatcttttcagtgagttatgctaacataatgtttgataccaatgcctcctatgcaaattataagcaaatttggtagctattttataacacagcaaaagagaaaaggtggggatgggagacaacccctaattcattaatgtatgatggggccaggcattcatattcaatttacttgaaaaagattgctctcaaactatgctgcaaaatgaacatcgctggcaaagagatggaccctctttccccgcgn

SEQ ID NO: 11276 - DNA, 648 bp, Homo sapiens
actttttttttttttgtaatagtgcgtgtttatattcaggagtgcttaatccaagaacctgtgatttctgctcttgttttacctcctatgaacgaaaaattgttgtccttacggttttttctgctttctttgaaatgttccttacagaataactacatgaatgtaatcacatgcatttaaaatagtctagagaatatagtgtgaaactataatggtatttttttagatgaggtttctggtggtatattactaaaattttaaactccttgatcttatgctgttaaccaagaagatggggatttgtgttactttagacactgctgggtgccatggtaaattgggatgttattgtaaattgtagctctcacagctgcgtattgcttacaaactcggaaggatagtctcatatcagtaaacatttttatgaacgtagttgaacttttttgtaaattaatgtgctggaaagaataccaaaagggccctaaaaaagtctaaaaggattaaaatttacttatgtaattattggtattttaaaatatttggtagtcacttaaaatgcataatgacagacaatagggtgtcataatatggtttattaatcttttttcattttccactagatgtggcaactacatagttggacctgat

SEQ ID NO: 11277 - DNA, 605 bp, Homo sapiens
  misc_feature 1, 2, 3, 4, 5, 6, 7, 8, 9, 10, 11, 12, 13, 14, 15, 16, 17,18, 19, 20, 21, 22, 605: n = A,T,C or G
nnnnnnnnnnnnnnnnnnnnnnactattagaatatttgctctatgcgtttcgacatttcgttctgctcactgttacacgtcctaacacctagaagaatgcctaccacatggtaggcattcagtaaatatttctgaataaatgaataagcaaaagaactttggagccacagacaaaccctcaaaaacaggaaacttggaaaatgcaaaaacacataaaccccgactacaagtgcatggtctttggctgaccataacctacaactgactgtaatgaggaaagcacgcccttttttttttttttgagacggagtttcgcttttgctatccaggctggagtgcaatggtgcaatctcggctcgctgaaacctctgtctcctgggtaaaagcaattctcctgcctcagcctcctgaatagctaggaccacaggcatgagccaccacacccggctaattttgtatttttagtagagacggggtttctccatgttggtcaggctggtctcgaactcccaaactcaggcgatccacctgccttggcctcccaaagtgctgggattacagaccacttgaggccaggagtttgagaccagcctggccacccgcgn

SEQ ID NO: 11278 - DNA, 367 bp, Homo sapiens
gcgcggtggcggccgaggtacatccaagattaggtcataaaaagtctgtggcagctactcgggaggctgaggcaggagaattgcttgcacccaggaggtggaggttgcagtgagctgagaccacgccactgcactcaagcctgggctataagagcaaaattctgtctcaaaaaaagtccgtggcttcaatcttgggggctctgcctctctggctttttgctcagttactctgaaaaaagccaggtgtcacactgtaagctgtcctacagagaggcccatgtcacaaagaacttatgtcttctgccaagagccacatgagtgagcttggaaactgagtcacactctgcacattcatgtacctgcccgg

SEQ ID NO: 11279 - DNA, 1091 bp, Homo sapiens
  misc_feature 1, 1052: n = A,T,C or G
natagtgcagtgtatgccacgtcattgtcacctcctgtagtggagcagatcatcacctccatgaagtgcatcatggggcaggatggcaccagcttggattattttgttttctctcaccgtgactttccaggtaaagagtgtgtacaacagttagctgaaaacaccaggtatttcaggagacgcctgaaagagatgggcttcatcatctatggaaatgaagactctccagtagtgcctttgatgctctacatgcctgccaaaattggcgtctttggacgggagatgctgaagcggaacatcggtgtcgttgtggttggatttcctgccaccccaattattgagtccagagccaggttttgcctgtcagcagctcataccaaagaaatacttgatactgctttaaaggagatagatgaagttggggacctattgcagctgaagtattcccgtcgtctcgtcaaagggcctgtccagtagaggtaccaaccgatgacgggaatacttcagctgcaataggtccccaacttcatctatctcctttaaagcagtatcaagtatttctttggtatgagctgctgacaggcaaaacctggctctggactcaataattggggtggcaggaaatccaaccacaacgacaccgatgttccgcttcagcatctcccgtccaaaggtgccaattttggcaggcatgtagagcatcaaaggcactactggagagtcttcatttccatagacccgcgtacctgcccgggcggccgctcgacctgggtctgcagtaaggagcattgctattggacacatagctgccaagacagtatccaagaattgtccacgtggtccctgggactgccctccactgggacacttagtctgaggtttgttccttggttgagtagttactctgtggacatggacatagtgcattatttcaggggttcctgaaatgtctgtgtgtggtcagaaggaggcttacccccagaaaggaaacacctctgcttcctgcctaactaaacaggcagtgatggtctcttctccatctggagaagctngggttgagtagagatccagaggtcttcttcatccttctt

SEQ ID NO: 11280 - DNA, 665 bp, Homo sapiens
  misc_feature 1, 2, 3, 4: n = A,T,C or G
nnnngtactttttttttatttttttttttacgtaatacacgttcctatgttttcaaaaattaaataacaatttaaaacgcatccattgttatactgttcctcactataattcctgaacctccatgtaaacccatttttatatctatcaatttttgttggtgtcaatttcatgtttttaaatagcatgacatgcctttttattttgaagtttttggcatgatatattgacctatctctaatggaaaactgaagtttatctatgttacattatgccactgaaataaacatatcccagctgttgaacaagtgacacttcctgtctaccaccagaaacagcagccccaggatacgatcacactgcatggttttgcagcatcaagttgccaagaagtccacgatttactcagatgataaacagatcaacagctctactcactaagagacagagcaagatcagattttatagtgggcataggtctccatggccagtgggtctggccctgaagtggacacagggagatagtatacatgatacctcttgtcctgcaggcaagaccccattctctttctctgcgaacagatatggtagtgggattgaccaggtggcacacgacatttagcacatgcttaagcagaacaaagtacctcggccgccaccgcggtgg

SEQ ID NO: 11281 - DNA, 372 bp, Homo sapiens
aggtacttagagtccaattttcctaccttggcttgtgcatgaggttgcctggttgccacggtgcctgcttttctccctgtgtcacctccactgcctcctgaataacagtctcaggtttgtctatggcctctgcagggagccgggattcccagacagagcaggccacttaaatcaggtgggacgcctctcccctcttggccggagtccaactccacgcaggcacagagatcccagatgggcccccaagtttgtgagaaacacattcatctgtccaaacccaaagaatggactcagagacacaaaagaacaatggaagagagaattttaatggtgatcgtgcaagaatgggtgtctggtaggcaggccccgcgt

SEQ ID NO: 11282 - DNA, 458 bp, Homo sapiens
acgcgggcaactattgcaatgaaaaatttcaacaattttttaatgaaaggattctgaaggaggaacaagaactttatcaaaaagaaggtttaggtgttaatgaagtgcattatgtggataatcaggactgtatagatttaattgaagccaaattagtgggaatactggatattttggatgaagaaaatcgccttccccagccaagtgatcaacactttacatctgcagttcaccaaaagcacaaggatcattttcgactcactattcccagaaaatctaagctggcagttcataggaatatcagagacgacgaaggcttcattatcaggcattttgcgggggcagtgtgctatgaaacaacccagtttgtggagaaaaataatgatgctttacatatgtctcttgaatccttaatatgtgaatccagagataagtttatacgggaattatttgaatca

SEQ ID NO: 11283 - DNA, 2423 bp, Homo sapiens
  misc_feature 1, 2, 3, 2395, 2396, 2397, 2398, 2399, 2400, 2401, 2402,2403, 2404, 2405, 2406, 2407, 2408, 2409, 2410, 2411, 2412,2413, 2414, 2415, 2416, 2417, 2418, 2419, 2420, 2421, 2422,2423: n = A,T,C or G
nnnatgagggtcagggctgcgcggacccctatcccgcctgcgtcctcccggcaagcccagcgggagcgcccgctcggctgggtccccgcctccagcgcgccggggccgcccagaccctgggctcagcctcgcgccccggtgcccacctgaggaggcggcggtcccggcctcgcgtcccggatgggacggcgcgggagcaatgccagtggccccgagcgccccgggccacgcgcggggccggccagccgctctcgcgccctccccgccccctccgcgccttgcctcgccgcccgcgcgccccacccaccggccgctcctcccctctccccaccctcctcctccgccccctcccctcccccgccgcctcgcagatagctcggccgcgcgtctcagccgccggggccccgagcgcaggcggcgaggccaccacacctgcagagcgctcgggctgcctaggcggcacctcgcctcccgccgcgcaaaccccttctccccacgcgccgagtctcccatgacgcccgagccccccggccggcgacaatgaccacttccctgcaagatgggcagagcgccgcgagcagggcggctgcccgggattcgccgctggccgcccaggtgtgtggcgctgcccaggggaggggcgacgcccacgacctggcgccggccccctggctgcacgcgcgagcgctcctgccccttccggacgggacccgcggctgtgctgcagacaggagaaaaaagaaagatcttgatgttccggaaatgccatctattccaaacccttttcctgagctatgctgttctccaattacatctgtgttgtcagcagacctatttcccaaagcaaattcaaggaaaaaacaggtgattaaagtatacagtgaagatgaaaccagcagggctttagatgtacccagtgacataacggctcgagatgtttgtcagctgttgatcctgaagaatcattacattgatgaccacagctggaccctttttgagcacctgcctcacataggtgtagaaagaacaatagaagaccacgaactggtgattgaagtgctatccaactgggggatagaagaagaaaacaaactatactttagaaaaaattatgccaaatatgagttctttaaaaacccaatgtatttttttccagagcatatggtatcttttgcaactgaaaccaatggtgaaatatcccccacacagattttgcagatgtttctgagttcaagcacatatcctgaaattcatggtttcttacatgcgaaagaacagggaaagaagtcttggaaaaaaatttacttttttctaagaagatctggtttatatttttctactaaaggaacatcaaaggaaccgcggcatttgcagtttttcagcgaatttggcaatagtgatatttatgtgtcactggcaggcaaaaaaaaacatggagcaccgactaactatggattctgctttaagcctaacaaagcgggagggccccgagacctgaaaatgctctgtgcagaagaagagcagagtaggacgtgctgggtgaccgcgattagattgcttaagtatggcatgcagctgtaccagaattatatgcatccatatcaaggtagaagtggctgcagttcacagagcatatcacctatgagaagtatatcagagaattccctggtagcaatggacttctcaggccagaaaagcagagttatagaaaatcccactgaagccctttcagttgcggttgaagaaggactcgcttggaggaaaaaaggatgtttacgcctgggcactcacggtagccccactgcctcttcacagagctctgccacaaacatggctatccaccggtcccagccatggtttcaccacaaaatttctagagatgaggctcagcgattgattattcagcaaggacttgtggatggagttttcttggtacgggatagtcagagtaaccccaaaactttcgtactgtcaatgagtcatggacaaaaaataaagcactttcaaattataccagtagaagatgacggtgaaatgttccacacactggatgatggccacacaagatttacagatctaatacagctggtggagttctatcaactcaataagggcgttcttccttgcaagttgaaacattattgtgctaggattgctctctagacaagccagaagtgacttattaaactattgaaggaaaaggactcaagaaaaataataaaagaccataaataagggcgaaaacattatcatgtgaaaagaatgtatttcacctgcaagttacaaaaaaatagtttgtgcattgcaaataagcaaagacttggattgactttacattcatcatttaaaattcattagttaaaattaaaccttaggaaaaaaaaaaaaaaaaaannnnnnnnnnnnnnnnnnnnnnnnnnnnn

SEQ ID NO: 11284 - DNA, 763 bp, Homo sapiens
  misc_feature 1, 2, 763: n = A,T,C or G
nnatagttaataacaactatttctcaatatttgtatactaaaaactagtgaaggtgttatgtgtttcagtatcttatctcttatttgaacatgggtttctgaaaggagcctatataataatataaatggtatgtagtaaatgaggcactgtcttggctgggactgctataaaaaaattaccatagaccattgactaaaccacaaacatatacttctcacagttctggaagttggaaagccaagatgaggatgccagtatggctagcttctagtgagggtcctcttgcaggttgcagacagccggcttcttggctcctcacatggcaggaagaaggtgcgcaagctctctggcctcttcttacaagggcattaattaccttctgaaggctccacctccaaacaccatcacattgctgacttccattaacttccttgtcattttttaatgtttttctcttcttatgtttttctactgttgggcaaggtgggaaatgtgtattctgacatatagactcctctcatcttctcttgatgttttgcataaccttctgggatatccctgtctcttctacttcactgcattttcctgcaggatgtttataaatagttcctggcaaaggaggttgccgtatagggtcctacaagtaacctaggtggcagcatctcctcccagcgtcaggtctaagcacacaagttcttccttccatctacccccgcgtacctcggccgccaccgcggtgagctccaattgccctatagtagn

SEQ ID NO: 11285 - DNA, 8741 bp, Homo sapiens
  misc_feature 1, 2, 8741: n = A,T,C or G
nnaccacgcgtccggcggggaaggcgggcggtggggcacggggcctgaagcggcggtaccggtgctggcggcggcagctgaggccttggccgaagccgcgcgaacctcagggcaagatgcttggaaccggacctgccgccgccaccaccgctgccaccacatctagcaatgtgagcgtcctgcagcagtttgccagtggcctaaagagccggaatgaggaaaccagggccaaagccgccaaggagctccagcactatgtcaccatggaactccgagagatgagtcaagaggagtctactcgcttctatgaccaactgaaccatcacatttttgaattggtttccagctcagatgccaatgagaggaaaggtggcatcttggccatagctagcctcataggagtggaaggtgggaatgccacccgaattggcagatttgccaactatcttcggaacctcctcccctccaatgacccagttgtcatggaaatggcatccaaggccattggccgtcttgccatggcaggggacacttttaccgctgagtacgtggaatttgaggtgaagcgagccctggaatggctgggtgctgaccgcaatgagggccggagacatgcagctgtcctggttctccgtgagctggccatcagcgtccctaccttcttcttccagcaagtgcaacccttctttgacaacatttttgtggccgtgtgggaccccaaacaggccatccgtgagggagctgtagccgcccttcgtgcctgtctgattctcacaacccagcgtgagccgaaggagatgcagaagcctcagtggtacaggcacacatttgaagaagcagagaagggatttgatgagaccttggccaaagagaagggcatgaatcgggatgatcggatccatggagccttgttgatccttaacgagctggtccgaatcagcagcatggagggagagcgtctgagagaagaaatggaagaaatcacacagcagcagctggtacacgacaagtactgcaaagatctcatgggcttcggaacaaaacctcgtcacattacccccttcaccagtttccaggctgtacagccccagcagtcaaatgccttggtggggctgctggggtacagctctcaccaaggcctcatgggatttgggacctcccccagtccagctaagtccaccctggtggagagccggtgttgcagagacttgatggaggagaaatttgatcaggtgtgccagtgggtgctgaaatgcaggaatagcaagaactcgctgatccaaatgacaatccttaatttgttgccccgcttggctgcattccgaccttctgccttcacagatacccagtatctccaagataccatgaaccatgtcctaagctgtgtcaagaaggagaaggaacgtacagcggccttccaagccctggggctactttctgtggctgtgaggtctgagtttaaggtctatttgcctcgcgtgctggacatcatccgagcggccctgcccccaaaggacttcgcccataagaggcagaaggcaatgcaggtggacgccacagtcttcacttgcatcagcatgctggctcgagcaatggggccaggcatccagcaggatatcaaggagctgctggagcccatgctggcagtgggactaagccctgccctcactgcagtgctctacgacctgagccgtcagattccacagctaaagaaggacattcaagatgggctactgaaaatgctgtccctggtccttatgcacaaaccccttcgccacccaggcatgcccaagggcctggcccatcagctggcctctcctggcctcacgaccctccctgaggccagcgatgtgggcagcatcactcttgccctccgaacgcttggcagctttgaatttgaaggccactctctgacccaatttgttcgccactgtgcggatcatttcctgaacagtgagcacaaggagatccgcatggaggctgcccgcacctgctcccgcctgctcacaccctccatccacctcatcagtggccatgctcatgtggttagccagaccgcagtgcaagtggtggcagatgtgcttagcaaactgctcgtagttgggataacagatcctgaccctgacattcgctactgtgtcttggcgtccctggacgagcgctttgatgcacacctggcccaggcggagaacttgcaggccttgtttgtggctctgaatgaccaggtgtttgagatccgggagctggccatctgcactgtgggccgactcagtagcatgaaccctgcctttgtcatgcctttcctgcgcaagatgctcatccagattttgacagagttggagcacagtgggattggaagaatcaaagagcagagtgcccgcatgctggggcacctggtctccaatgccccccgactcatccgcccctacatggagcctattctgaaggcattaattttgaaactgaaagatccagaccctgatccaaacccaggtgtgatcaataatgtcctggcaacaataggagaattggcacaggttagtggcctggaaatgaggaaatgggttgatgaactttttattatcatcatggacatgctccaggattcctctttgttggccaaaaggcaggtggctctgtggaccctgggacagttggtggccagcactggctatgtagtagagccctacaggaagtaccctactttgcttgaggtgctactgaattttctgaagactgagcagaaccagggtacacgcagagaggccatccgtgtgttagggcttttaggggctttggatccttacaagcacaaagtgaacattggcatgatagaccagtcccgggatgcctctgctgtcagcctgtcagaatccaagtcaagtcaggattcctctgactatagcactagtgaaatgctggtcaacatgggaaacttgcctctggatgagttctacccagctgtgtccatggtggccctgatgcggatcttccgagaccagtcactctctcatcatcacaccatggttgtccaggccatcaccttcatcttcaagtccctgggactcaaatgtgtgcagttcctgccccaggtcatgcccacgttccttaatgtcattcgagtctgtgatggggccatccgggaatttttgttccagcagctgggaatgttggtgtcctttgtgaagagccacatcagaccttatatggatgaaatagtcaccctcatgagagaattctgggtcatgaacacctcaattcagagcacgatcattcttctcattgagcaaattgtggtagctcttgggggtgaatttaagctctacctgccccagctgatcccacacatgctgcgtgtcttcatgcatgacaacagcccaggccgcattgtctctatcaagttactggctgcaatccagctgtttggcgccaacctggatgactacctgcatttactgctgcctcctattgttaagttgtttgatgcccctgaagctccactgccatctcgaaaggcagcgctagagactgtggaccgcctgacggagtccctggatttcactgactatgcctcccggatcattcaccctattgttcgaacactggaccagagcccagaactgcgctccacagccatggacacgctgtcttcacttgtttttcagctggggaagaagtaccaaattttcattccaatggtgaataaagttctggtgcgacaccgaatcaatcatcagcgctatgatgtgctcatctgcagaattgtcaagggatacacacttgctgatgaagaggaggatcctttgatttaccagcatcggatgcttaggagtggccaaggggatgcattggctagtggaccagtggaaacaggacccatgaagaaactgcacgtcagcaccatcaacctccaaaaggcctggggcgctgccaggagggtctccaaagatgactggctggaatggctgagacggctgagcctggagctgctgaaggactcatcatcgccctccctgcgctcctgctgggccctggcacaggcctacaacccgatggccagggatctcttcaatgctgcatttgtgtcctgctggtctgaactgaatgaagatcaacaggatgagctcatcagaagcatcgagttggccctcacctcacaagacatcgctgaagtcacacagaccctcttaaacttggctgaattcatggaacacagtgacaagggccccctgccactgagagatgacaatggcattgttctgctgggtgagagagctgccaagtgccgagcatatgccaaagcactacactacaaagaactggagttccagaaaggccccacccctgccattctagaatctctcatcagcattaataataagctacagcagccggaggcagcggccggagtgttagaatatgccatgaaacactttggagagctggagatccaggctacctggtatgagaaactgcacgagtgggaggatgcccttgtggcctatgacaagaaaatggacaccaacaaggacgacccagagctgatgctgggccgcatgcgctgcctcgaggccttgggggaatggggtcaactccaccagcagtgctgtgaaaagtggaccctggttaatgatgagacccaagccaagatggcccggatggctgctgcagctgcatggggtttaggtcagtgggacagcatggaagaatacacctgtatgatccctcgggacacccatgatggggcattttatagagctgtgctggcactgcatcaggacctcttctccttggcacaacagtgcattgacaaggccaggacctgctggatgctgaattaactgcaatggcaggagagagttacagtcgggcatatggggccatggtttcttgccacatgctgtccgagctggaggaggttatccagtacaaacttgtccccgagcgacgagagatcatccgccagatctggtgggagagactgcagggctgcagcgtatcgtagaggactggcagaaaatccttatggtgcggtcccttgtggtcagccctcatgaagacatgagaacctggctcaagtatgcaagcctgtgcggcaagagtggcaggctggctcttgctcataaaactttagtgttgctcctgggagttgatccgtctcggcaacttgaccatcctctgccaacagttcaccctcaggtgacctatgcctacatgaaaaacatgtggaagagtgcccgcaagatcgatgccttccagcacatgcagcattttgtccagaccatgcagcaacaggcccagcatgccatcgctactgaggaccagcagcataagcaggaactgcacaagctcatggcccgatgcttcctgaaacttggagagtggcagctgaatctacagggcatcaatgagagcacaatccccaaagtgctgcagtactacagcgccgccacagagcacgaccgcagctggtacaaggcctggcatgcgtgggcagtgatgaacttcgaagctgtgctacactacaaacatcagaaccaagcccgcgatgagaagaagaaactgcgtcatgccagcggggccaacatcaccaacgccaccactgccgccaccacggccgccactgccaccaccactgccagcaccgagggcagcaacagtgagagcgaggccgagagcaccgagaacagccccaccccatcgccgctgcagaagaaggtcactgaggatctgtccaaaaccctcctgatgtacacggtgcctgccgtccagggcttcttccgttccatctccttgtcacgaggcaacaacctccaggatacactcagagttctcaccttatggtttgattatggtcactggccagatgtcaatgaggccttagtggagggggtgaaagccatccagattgatacctggctacaggttatacctcagctcattgcaagaattgatacgcccagacccttggtgggacgtctcattcaccagcttctcacagacattggtcggtaccacccccaggccctcatctacccactgacagtggcttctaagtctaccacgacagcccggcacaatgcagccaacaagattctgaagaacatgtgtgagcacagcaacaccctggtccagcaggccatgatggtgagcgaggagctgatccgagtggccatcctctggcatgagatgtggcatgaaggcctggaagaggcatctcgtttgtactttggggaaaggaacgtgaaaggcatgtttgaggtgctggagcccttgcatgctatgatggaacggggcccccagactctgaaggaaacatcctttaatcaggcctatggtcgagatttaatggaggcccaagagtggtgcaggaagtacatgaaatcagggaatgtcaaggacctcacccaagcctgggacctctattatcatgtgttccgacgaatctcaaagcagctgcctcagctcacatccttagagctgcaatatgtttccccaaaacttctgatgtgccgggaccttgaattggctgtgccaggaacatatgaccccaaccagccaatcattcgcattcagtccatagcaccgtctttgcaagtcatcacatccaagcagaggccccggaaattgacacttatgggcagcaacggacatgagtttgttttccttctaaaaggccatgaagatctgcgccaggatgagcgtgtgatgcagctcttcggcctggttaacacccttctggccaatgacccaacatctcttcggaaaaacctcagcatccagagatacgctgtcatccctttatcgaccaactcgggcctcattggctgggttccccactgtgacacactgcacgccctcatccgggactacagggagaagaagaagatccttctcaacatcgagcatcgcatcatgttgcggatggctccggactatgaccacttgactctgatgcagaaggtggaggtgtttgagcatgccgtcaataatacagctggggacgacctggccaagctgctgtggctgaaaagccccagctccgaggtgtggtttgaccgaagaaccaattatacccgttctttagcggtcatgtcaatggttgggtatattttaggcctgggagatagacacccatccaacctgatgctggaccgtctgagtgggaagatcctgcacattgactttggggactgctttgaggttgctatgacccgagagaagtttccagagaagattccatttagactaacaagaatgttgaccaatgctatggaggttacaggcctggatggcaactacagaatcacatgccacacagtgatggaggtgctgcgagagcacaaggacagtgtcatggccgtgctggaagcctttgtctatgaccccttgctgaactggaggctgatggacacaaataccaaaggcaacaagcgatcccgaacgaggacggattcctactctgctggccagtcagtcgaaattttggacggtgtggaacttggagagccagcccataagaaaacggggaccacagtgccagaatctattcattctttcattggagacggtttggtgaaaccagaggccctaaataagaaagctatccagattattaacagggttcgagataagctcactggtcgggacttctctcatgatgacactttggatgttccaacgcaagttgagctgctcatcaaacaagcgacatcccatgaaaacctctgccagtgctatattggctggtgccctttctggtaactggaggcccagatgtgcccatcacgttttttctgaggcttttgtactttagtaaatgcttccactaaactgaaaccatggtgagaaagtttgactttgttaaatattttgaaatgtaaatgaaaagaactactgtatattaaaagttggtttgaaccaactttctagctgctgttgaagaatatattgtcagaaacacaaggcttgatttggttcccaggacagtgaaacatagtaataccacgtaaatcaagccattcattttggggaacagaagatccataactttagaaatacgggttttgacttaactcacaagagaactcatcataagtacttgctgatggaagaatgacctagttgctcctctcaacatgggtacagcaaactcagcacagccaagaagcctcaggtcgtggagaacatggattaggatcctagactgtaaagacacagaagatgctgacctcacccctgccacctatcccaagacctcactggtctgtggacagcagcagaaatgtttgcaagataggccaaaatgagtacaaaaggtctgtcttccatcagacccagtgatgctgcgactcacacgcttcaattcaagacctgaccgctagtagggaggtttattcagatcgctggcagcctcggctgagcagatgcacagaggggatcactgtgcagtgggaccaccctcactggccttctgcagcagggttctgggatgttttcagtggtcaaaatactctgtttagagcaagggctcagaaaacagaaatactgtcatggaggtgctgaacacagggaaggtctggtacatattggaaattatgagcagaacaaatactcaactaaatgcacaaagtataaagtgtagccatgtctagacaccatgttgtatcagaataatttttgtgccaataaatgacatcagaattttaaacataaaaaaaaaaaaaaaaagggcggccgcn

SEQ ID NO: 11286 - DNA, 263 bp, Homo sapiens
  misc_feature 1, 2, 3: n = A,T,C or G
nnntacaacctgagaatcacaagcggtgtggtggtgtgtcagtgtggcctgtccatcccatctcatgtgagtgttccacacacagatttcatgatacttcttcccacatggatctactttcttgaagatcctccagtgctgacttggagcccattgtgcatatttcttcccagttttatgttcagtggtgtcacattggtagcttcaaatcagccatggtgagaatatctatggcatgaaaattggcaaacagtacctgcccg

SEQ ID NO: 11287 - DNA, 6316 bp, Homo sapiens
  misc_feature 1, 2, 3, 4, 5, 6, 7, 8, 9, 10, 11, 12, 13, 14, 18, 22, 25,55, 6316: n = A,T,C or G
nnnnnnnnnnnnnncccncatnctngtcagttacgggggctgcccggcggggctnggaggcgctcgaggctgcctagtcgttcgctcgctctctctcgcgtgctccctctcgccgcctgtggggaagtcggggccgcccgagcggccgttcccaccgcctcgccccgacctccttcccggtcccctcccggcccagtccctcccgcccgcgcaccccgagtagtgagtggccccgcgcaggtctggagagtcaccgcggcggcgccgggtggtggttaaaccatgttaaggaggattttacagaggactcctgggagagttggctctcaaggttctgatttagattcatcagcaactcctataaacacagtggacgtcaataatgaaagctcttcagagggtttcatatgtccccagtgtatgaaatctcttggatctgctgatgaacttttcaaacattatgaagctgttcatgatgctggtaatgactcaggtcatggaggagagtctaatcttgctttgaagcgagatgatgtaacactgctcagacaagaggtccaagacctacaggcttcacttaaggaagaaaaatggtactcggaagaattaaagaaggaattagaaaaatatcaagggctgcagcagcaagaggccaaacctgatgggttggtgactgattcatcagcagaactacagtctttggaacagcaattagaagaagcccaaacagaaaattttaatattaagcaaatgaaagacttatttgaacagaaagcagcccaacttgctactgaaattgcagatataaagtcaaagtatgatgaagaaaggagtcttcgagaagctgctgaacaaaaagtgacacgtctgacagaagaattaaacaaagaggcaactgtaattcaagatctgaagacggaactgcttcagagacctggtatagaagatgttgccgtgctaaagaaagaactggtccaagttcaaacactaatggataacatgaccttggaacgtgagcgagaatctgaaaaactcaaagatgaatcgcaaaaaattcgcagtcacaatatgctagctcagaggccacaataagccagctaaggagtgaactgtccaaaggcccccaggaagttcgtgtatatgtacaggaactacaaaaactgaaaagttcagttaatgaattaacacaaaaaaatcagaccttgacagaaaacttgctgaaaaaagaacaagactatactaagttagaggagaaacataatgaagaatctgtgagtaaaaagaatattcaggcaacccttcatcaaaaagacctagattgtcaacagcttcagtcaagattgtctgcatctgaaacctcactgcatagaatacatgtagaactaagtgaaaaaggagaagctactcaaaagctcaaagaagaattatctgaggtagagaccaagtaccagcatctaaaggcggagtttaagcagctacaacaacagagagaagaaaaggagcagcatgggttacaactccaaagtgaaattaatcaattacatagcaaacttctggagacagagcgccaactaggggaagctcatggtaggctgaaggaacagagacagctttcaagtgaaaagttgatggataaagaacaacaagtggctgatttacaactcaaactttctcggttagaagagcagttgaaggaaaaagttacaaattctacagaattgcagcatcaattagataaaacaaagcaacagcatcaagaacaacaggctcttcagcaaagcaccacggcaaaacttcgagaagctcagaatgatttggaacaagttctacgtcaaattggcgataaggaccaaaagatccagaaccttgaagctttattacagaagagtaaagaaaatatttcattactagaaaaagaaagagaagatctttatgcaaaaattcaggctggtgaaggagagactgctgttcttaaccagttacaagaaaaaaaccatacactacaggacgaagtaactcaactaacagagaacgtgaagaatcagtcagaaagtcataaacaagcccaggagaatttgcatgaccaggtacaagagcagaaggcacatcttagagctgcacaagaccgtgtcctttccctagaaactagtgtcaatgaattaaatagtcaattaaatgaaagcaaggagaaggtctcccagcttgacatacagattaaagccaaaaccgaactattactatcagcagaagcagcaaaaactgctcaaagagctgatcttcagaatcatttggacacagctcaaaatgcattacaagataaacagcaggagttaaataagattactactcagttggatcaggtcactgcaaagttacaagacaagcaagaacattgcagtcagctggaaagtcatcttaaagaatataaagagaaatacctctctttagaacagaaaaccgaagagctagaaggtcaaattaagaaactagaagctgatagtcttgaagttaaagcaagcaaggagcaggctttgcaagatctacaacagcaaagacagctgaacacagatttagagctcagagccacagaattgagtaaacaacttgaaatggagaaggaaatagtatccagtacaagattggatctacagaaaaaatctgaagcccttgaaagtatcaagcaaaagcttaccaagcaagaggaagaaaaacaaatcctgaaacaagattttgaaactttaagtcaagaaacaaagattcagcatgaggaattgaataacagaattcaaacaacagtaacagaactacaaaaagtgaaaatggagaaagaagctttaatgacagagctttctacagtaaaggacaaactatcaaaagtttctgattctttgaaaaactctaaaagtgaatttgaaaaggagaatcagaaaggaaaagccgctatattagacttggaaaaaacttgcaaagaattaaagcatcaacttcaagtgcagatggaaaacacacttaaggaacagaaggaactgaaaaagtcacttgaaaaagagaaggaggcttctcatcagttgaaattggaactcaattcaatgcaggaacaacttatacaggcccagaatactttaaaacaaaatgaaaaagaagagcaacaacttcaggggaacataaatgagctaaagcaatcaagtgaacagaagaaaaaacaaattgaagcactccaaggagagcttaaaattgctgttttacagaagacagagcttgagaataaactacagcagcagttaacacaggcagcccaggaacttgcagcagagaaagagaaaatatcagtattacaaaacaactatgaaaaaagtcaggaaactttcaaacagcttcaatctgatttctatgggagggaatctgaacttctagccaccaggcaagatcttaagtctgtagaagagaagctttctctagcacaggaggacttgatttcaaacagaaatcaaattggaaatcaaaataaattgattcaagaactgaagactgccaaggctacattggagcaggattcagcaaagaaagaacagcaattgcaggagcgatgtaaagcactacaagacattcagaaagaaaagtcactgaaagaaaaagaactggtaaatgagaagtctaaattggcagagatagaagaaattaaatgtagacaagaaaaagaaatcactaaactaaacgaagaactcaagtcccacaaactagaaagcataaaggagataacaaatcttaaagatgctaaacagcttctaattcagcagaaattagaacttcaaggaaaagcggactccctgaaggcagctgttgaacaggagaagagaaatcagcagatactaaaagaccaggtgaaaaaggaagaagaggagctgaagaaagaatttattgagaaagaagctaagttgcattccgaaataaaagaaaaggaagtaggaatgaagaagcatgaagaaaatgaggctaaacttaccatgcagattacagcattaaatgaaaacttaggcactgtgaagaaggagtggcaatctagtcaacggagagttagtgagcttgagaaacaaacggatgacttacggggtgaaattgcagtattagaagcaacggttcagaataatcaagatgaaaggagagcactactggaaagatgtcttaaaggagaaggtgaaatagaaaagcttcaaaccaaagtattagaattgcaaagaaagctggataatacaactgcagcagtgcaggagctgggcagagaaaaccaatcacttcagatcaaacatacacaagcgttgaatagaaagtgggccgaagacaatgaagtacaaaactgtatggcctgtgggaaaggcttttcagtaacagtgagacggcatcactgccgacagtgtggaaatatcttctgtgctgaatgttcagccaaaaatgccttaactccttcctccaagaagcctgttcgtgtctgtgatgcatgtttcaatgacttgcaaggataatgggttatcacaacttcagagtaatattacactaacattagattttataatgtacttaatagaggtcttggactactatttggtttggacacttggttgcaatactagaccaaataggaattagtatattttggaatgttatggatatcaagtaaaactcttctatttttgtgagacttgggcttatcatctttcattacttttttcccatttagcccctggaatagctttcatgccaagtttagaattagccaatgaaatgtaaataaactttggacagaaaatagcaatgtatttttttaatataatttcattattcacaaatgaagaatgcaattccatagcttacttctttctcctaaatttaatgtacaaaaatgtacatggatgatattatcacttgttgctgtttttgttgcacaatagcacattaattatattaaatattctctttgtgaagttatgcacagaactgtaacactttcctctgcctttttctcttatatgtgggttcatggttcagttgcattgttatgttatgaatttactacttgggtgttctaaatacagtttatcttaaaatatgtagtaatatgaattcaaaaatggtttttgttttaacaatattaattaaattttcttgggtggattttataaaaacctctgtaaaatcaatttgtttacttatagttatctggggttgtattgcaaagaatagggttaatttttctttttgtctttttctgtctctttcttaaactcccacgcattgtccatttagaatcttagaaagcttcttaccctcgctgtcagttggaggatgaataataaacattgtataatgttcttattctcggtttcttgtaagtgggaagtcttttgagatcagccttcatatcatacccttattttgtctctctagcatcttcaggaacctgagtttgctttttacatagatctgattttttcctttatttggtttaacattttcaagcatagatcagcttcatgtatttgttttataattttgcatcttaaagctagtaactaatattgctgtggtcttattggtgaaaacaaaatataaaatgataagaagacattaaatattttactttctatttcttaccctattgggaagaatttttaaaagttgtaaaattgacttaaagttaaaatggttctgaatttggtgttccatgtcaactgttcccagttttaattttaactttgcaaaaataatgttgtgaaattccctttaagtaactaacacctagaaatagagtatcaccaaaaacaaatgtatttaggaatcccagttacaataaaaactgaaacagcatggctaagcatcttaaggataattaagaaattagcttatttgtatgctgaacaatggaatcgaactttaatttagcatagtcttattaatttggaaaatcgtaaaacatctcaagagagaagttattaatattggtttattactctttctagagaagaagtgtagttatacattcattcagtggcaatcattttattaacagctagtttacatatttcccttattaatagatcctctatataccttttgctcttccacatattctggcactggaattcattttcatgccattacccacgcgttgttaatacaaagagtcccacactattgctcactctctaaaaacaagtttgtgccccgtgtctcttcttctacaaccttttatcccgccgggccactctcttcccttttgaacccgggggccacaaaagagtctctaccgggtcgcaataan

SEQ ID NO: 11288 - DNA, 158 bp, Homo sapiens
actcaatggaccaatctgaattaagcttttcctgtttttcatagaagtgttcttttctctaaactgctgtaatttttcttgacttattaggctggaggacgtgtgccagtgttagacacactcatagaacttgttacacgaggccgatctatccccgt

SEQ ID NO: 11289 - DNA, 1066 bp, Homo sapiens
  misc_feature 1, 2, 3, 4, 1063, 1064, 1065, 1066: n = A,T,C or G
nnnncgatttaaggtttctccatgtctttttgtaattggagaagctcattttttaaaaattttatctctttagattgttgaacagataaatacgaaactgccatcatcatttgtagaaaaactgtttataccatcatctaaactactattcttgcgttatcataaagaaaaagaggtacgtaatacattgataatgaattttgacaacttgagtcactgaagagttggacctaatgttgcttaccaggctgtataagtgaaattgagtgaaatgtgaaatgtttgatttagaatatagtgattgtatttgttcttttaagtttgtatttcttgagaatcatactgaatactttcatgaatgatgtgccagatactcttttcagactatgcatcttttgctgttattaaatttattatcaatttattataaatttaaattttcataagggtgaaacaagttgacacatttttaccgttttacattaagaagtcctgtatatctttgtaaccaaaaatgactggcttttcaaccaccccctagtcaaatccaccacagactttcctggtagatttaagaaacccagtcttaaactgctgtttgcatatgtcttctgatgttgattatttaaaaaaaaacaaaaaacggccatttcggaaatttcatattgacagttttcatttatagtacgcggggactgggagagcgggctgaatgcaatggagtgtgcattacatttggaaaaaaatgtgaatcagtcactactggaactgcacaaactggccactgacaaaaatgacccccatttgtgtgacttcattgagacacattacctgaatgagcaggtgaaagccatcaaagaattgggtgaccacgtgaccaacttgcgcaagatgggagcgcccgaatctggcttggcggaatatctctttgacaagcacaccctgggagacagtgataatgaaagctaagcctcgggctaatttccccatagccgtggggtgacttccctggtcaccaaggcagtgcatgcatgttggggtttcctttaccttttctataagnnnn

SEQ ID NO: 11290 - DNA, 784 bp, Homo sapiens
  misc_feature 777, 778, 779, 780, 781, 782, 783, 784: n = A,T,C or G
acgcggggggctttttctctgaaagcaaacgtgtgtcttttacaccagggctttctccccaccccagggggtgtcttccatccttttgtggctcagttgaaggcgaaaagggctccaaaccactaactaaccagaggagagccccttcttccacctccagggagaatttcagatttaatttgtccgaagatagcgtgctctcttcttactcatttgccatcattacgaggaaaacaaaccaccaccttggcttcaagatcctgggtagaggctcacggtcttttcaaccatctttggcgaggccttgcttccttccactcgagcctgttgactggggctgcttttaaccctttcctatttgctgagaatgcagccgtgtgacagtaactg[394 bp omitted]

SEQ ID NO: 11291 - DNA, 491 bp, Homo sapiens
accaaaagaattaggcacagaaaactgttttaattagggtaacagaaagcagctgcaatacagagtgatgaatgtgagctttgaaagtaaatttggtgggtttcaggatttctgaggagggaagtcaaacagttctaaagagttggcaaggccaattgagagggtggtaagctatcctaagccctttcttctacattaactctgctttccagttagtcttcaggtgctttagaatttgagatccttttttctcattgtgtggtccatggactagaagtattagcactacctggaaacttgttcaaaatgcagaattctgggccccaaaacagacctactaaataaaagtctccattttaaagagattgctaaatgattcataacttgttaaagtttgagaggcattaccttagattctgtcttcttcttacctttcaaacccagctgaaagtgggtttgtatttccctttactttcgacctttagggaagt

SEQ ID NO: 11292 - DNA, 1154 bp, Homo sapiens
  misc_feature 1, 2, 3, 4, 5, 6, 7, 8, 9, 10, 11, 12, 13, 14, 15, 1151,1152, 1153, 1154: n = A,T,C or G
nnnnnnnnnnnnnnnaccgaggtaccacaacactcaccaggactggagtgccacctatgacctcattgcgtaatggatggcttgtcctcaaatgggcccggtcttggacgagcctgaggatgtctacaagtggaagaaaagaagccactggagcagaaggtggggaggataaaatttggagcaagattctcaaggaagcaacaagatcctaaggaaaggagaaagagaccacctactgcatttctgtcactcgctgaaaaggacactctgtcagaaaatcttctagcaaacttcaaagggcaaaatcaccccttgttactgataaagcccagagagcttcagcagctaacattccctggacagggcacagcaaggattggaacctaggtcagtctggccagaacacccacaagctttccttaactcagtgtgctatctccccacgactaggtcgctactgctttataatcacctttgtagccaccagtggattttgttcatcagtatttttcaggcaattgatactttagatattcagctgcaagacgtatgcagttttcattgacatcttttggagaaactgacaaacctggacttgatttaatgcctttggaaccttccaagatgttatataactctagatagaaggctgggcctccatgatgtcaggaatgttgcattcttatttccccatagataaacccatttgtccacaaagtcaaggagtcaggcagaggcccttgccatggggctttttaggataaagcaacaagcctggactttgctctacaacagggttttgcatagggagtggtatgaccagatccctcaagaaagaaagcttagagaccaggccagagtccactgcagtagcccagtcaagagaggatggtgacttggacttgtagtagagccagttagaatgaaagaaattgacacattcagaaatggttttagagatagagtcaaactggacctgataaagaactagagaagcggagtgaggataaagagaagagccatgactgactcggaagattttgtcttgaaaaacttgagaactcaagacagagtgaaataaaatcacatgtggaaaaatctcctgctttgttttggactactttgaagtgaaatgcctgttaagcctaagnnnn

SEQ ID NO: 11293 - DNA, 1001 bp, Homo sapiens
  misc_feature 984, 985, 986, 987, 988, 989, 990, 991, 992, 993, 994, 995,996, 997, 998, 999, 1000, 1001: n = A,T,C or G
acgcggggtgctcctctgagaaccatctgttggtctgatggtgctagatctgaagctggtgagcctcttggggcggcctcaagggctaacaagatctcaaatgcccttctctccatcatttgtggtatcctggattattgtgaaaatgtatagggattcctggggaagagttaaggattaaaatataaaggtttaaatataaataactttatatatatatgttttttcttgtaaaccaatatgttatatagtaggaagtttaattccttaactttggtttttctccctagcctttttatagccaacaagagcaaaagcacactgcaatgtccaaacgaattgcaggcgttttctgctccctgaagcctgggaattaatttatatactcagtcccttttcccttggctggccattgaagtagttgaaccacaggattggactgtccagaatcattagccagagttcactgtgagtggacgtcttttagttctgcttcaacgctataaccaacctttaccaaaagcaacaacaaaacaaaaaactgcagaaaccaatgagttctgttcacaaaggatggctcctcatgtcatcacaccggcaaggaatggacgagcctctgatttttctcttcttggctgactttacaaggttggatgcagtccatgaggatcatgcagcaaagacagaaagtgctggagaagcccaacctgcagggcctcacctttagctggtttgtgtggttccacttcatgtagctgttggaacaccagtctctctaatgtgctctatgggatagctgttaccttccactaatttatgtctaatacctataaacctaaagtatctttttaaaaattttattccgtctttttggaggaaatttttgtgcatgccagatatagtgtcaagcattgggattgctaagatgaacgtaacattgtcctcaccacccattaagtcacaatctagtagatgagtaaaagnnnnnnnnnnnnnnnnnn

SEQ ID NO: 11294 - DNA, 963 bp, Homo sapiens
  misc_feature 1, 2, 3, 4, 5, 6, 7, 962, 963: n = A,T,C or G
nnnnnnnctcccccagttatcacggccaaaaaccgacccacccttgggttaatttttggcccacccccccatccctgtttattcttttgcgagtccttccatgcagccttttcctctttgcaattcccccactgattgctcttagccattcctgtagcagcagaatcatcttcccaccccccctggcagtttgagcctttggaatcctccccacctcagagcaggtttgggatccgccccaccctgatacagatgaggtatcattaccattagggctagtcttatctatacatgcccctgagttaaaagtctgtgttgcagagcttccccaggcctctgtcccattgtcagtctttcgttcccctctaggtgatgtttctgtatcccaggcagtattctgcttaataggagtctgtccccaaccagagttggacaggacacgtggatctaagtcagttctgtttacaatgctttggagtaatgtgtgctgatcaatttttcttctgtctctactctgactttccccagttcctttttcctcaaggcgtccagtgctttctgtactaccatcgctctccactgtacctcctgttttggcccacacactgctttgctcatttgtctgagatgtggcagaaccctgatcctcttcctcagtagatttccatccatttgtaaacgtcttaccattgccatttgcactatcattggaatgctgattgctaggcagtttgttccactcaacgctgggtaaattagtgccagtgttttgtgcaggggttccccatcctcttcgacttcctccagaatttgcgccatttccacttccccatgatgtactctgggagtttgccgcacccgattcccacacaccacctcctttgtttgtgttaacttgaaagttagtgcccataggaccatttacgccaggctgcattagagttgcattcacacggacgggnn

SEQ ID NO: 11295 - DNA, 1712 bp, Homo sapiens
  misc_feature 1708, 1709, 1710, 1711, 1712: n = A,T,C or G
ttgactcaccgggcgcgcggccgaggtacccgtcgcttctagctatgtatcttcctgttctctgccctcgtctcaaactatgttgccacctcaattaatcaggcacttgaattcacattgtgtagaatactcaaggttgatgatagactgggaaggaggaggaaggaggcagagataagcgatgggggatactgagccctatttagactttggtccgccagcttttggatgaacttagcacattactggctatgcaggactaacctctatgggatgcaaaatgactccaagtatggaacaacattgcaaaaatggacttcaatattacatgaaggatttggctgctttatataaatatagaaacaagcccagtagattactccactaaaggtgactaagcaaatgttacagttcaaattgcactcaagaagtcaatcgagaaataattctatcaccaagcccgtggacctaccccccaatctggtccctctcccagaactccttgggctctctcaagacccagcaattcaggtgttaacataaccctgtccagtggtatggccagtgtcttagtccaatcttttgccataccagtcattacatattttgaataccaacttggtggaggaatttcagctccctttcagcagtagcctagtgggcaccacatctctattcttcattccccattccagcttgatgctgaagggatgaggcttccagactccaaacccctctcagagtcttcatctgcttgttgcattttttcattcagctcctgaaggaatgccaagacatgcaaagcctcagaatctgctccatttttagaaagtcgcattttggcaattttttgcagtttgtctttcatcttttctttctcccttgatttctggtttatttttacaccctctataaagtggtggatggccttgtcttcacacttcatttggtacctcggccggcggccgaggtaccttaaagtcctcctggctctgaagcttcataagatgcgtgaagaaggtgaagaggaaggtgaaggagagaagttagttgaagaagccttggagaaagccccaggtgtaacagatgttcttcgcagtgcagccaagttttatcgaagaaaagatgagccagacaaagcgattgaactgcttaaaaaggctttagaatacataccaaacaatgcctacctgcattgccaaattgggtgctgctatagggcaaaagtcttccaagtaatgaatctaagagagaatggaatgtatgggaaaagaaagttactggaactaataggacacgctgtggctcatctgaagaaagctgatgaggccaatgataatctcttccgtgtctgttccattcttgccagcctccatgctctagcagatcagtatgaagacgcagagtattacttccaaaaggaattcagtaaagagcttactcctgtagcgaaacaactgctccatctgcggtatggcaactttcagctgtaccaaatgaagtgtgaagacaaggccatccaccactttatagagggtgtaaaaataaaccagaaatcaagggagaaagaaaagatgaaagacaaactgcaaaaaattgccaaaatgcgactttctaaaaatggagcagattctgaggctgtgcatgtcttggcattccttcaggagctgaatgaaaaaatgcaacaagcagatgaagactctgacannnnn

SEQ ID NO: 11296 - DNA, 330 bp, Homo sapiens
aggtacgcgggggtattcggcaagaccagactccgtagccctcagggaaacattcgaccacaactgtggtgtgtgggccccgctgtttgctagagagcctgagagatgagtcattggtttctagcctggagaaagacgcctgcgaggcgagactgtcagggtctctgccgccctccccaggagctgtgtccctgagagtggaaaagacaaggatgccgtggataaattgctcaaggacctggacgtcaatggagatgcccaggtggacttcagtgagttcatcgtgttcgtggctgcaatcacgtctgcctgtcacaagtacctgcccgg

SEQ ID NO: 11297 - DNA, 948 bp, Homo sapiens
acatggaggtcaaaagtcaggtaaagtcatcgaaacatgacattgatttaaagcaaactgagattttgttctaaaacaagagtttcaaaattatttatacacaaccaaacagactaacctgaggaataaacaattttgtgagtaacctttttggtatcctcatcctatcttattggatcatcagtagaatggagcaatgagttctttcaagtagcctcaggttatttcgaaataataccttgaggaaaaaaaacaccaatatgtttatcaggtacgcggggatccctgactcggggtcgcctttggagcagagaggaggcaatggccaccatggagaacaaggtgatctgcgccctggtcctggtgtccatgctggccctcggcaccctggccgaggcccagacagagacgtgtacagtggccccccgtgaaagacagaattgtggttttcctggtgtcacgccctcccagtgtgcaaataagggctgctgtttcgacgacaccgttcgtggggtcccctggtgcttctatcctaataccatcgacgtccctccagaagaggagtgtgaattttagacacttctgcagggatctgcctgcatcctgacgcggtgccgtccccagcacggtgattagtcccagagctcggctgccacctccaccggacacctcagacacgcttctgcagctgtgcctcggctcacaacacagattgactgctctgactttgactactcaaaattggcctaaaaattaaaagagatcgatattagaaaaaaaaaaaaggaaaaaaatattttcctttcccggggggccctttaaaaaataggggacccccggggggggggaaattaaaatacccctttttttttccccccccccccggggggggcccccgccccccccttttggccccttaagagggggttaatggcccccttgggaaaa

SEQ ID NO: 11298 - DNA, 2425 bp, Homo sapiens
  misc_feature 2424, 2425: n = A,T,C or G
tcgagcggccgcccgggcaggtacgcggggcagagaatcctccaccacacacagcaggcactatctgccacagttcctttccccgatagcttcaaattctctgccttttgaaataagcctacttttaactggaataaataattggtcaatctctacctcaggtgaagaggaaccaagcctctggaaacacttaggaacaaactgtaaaaaccaaaggcaattgtgtaaccggttaaataagcttgctggactttgtccctgtgtatgagttagacaattctttcagctagtttgagtgacgcactgaccagtgaagcgcagtgaagcagtgggaaccggaatatccaaagagtggtttgaaggagaaagaagcattgtggctttatatcctctgggcctgggtttcctgaagtcaccacacatagaggagagagaaaatggctgagttaaagtacatttctggatttgggaatgagtgttcttcagaggatcctcgctgcccaggttccctgccagaaggacagaataatcctcaggtctgcccctacaatctctatgctgagcagctctcaggatcggctttcacttgtccacggagcaccaataagagaagctggctgtataggattctaccttcagtttctcacaagccctttgaatccattgacgaaggccatgtcactcacaactgggatgaagttgatcctgatcctaaccagcttagatggaaaccatttgagattccaaaagcatctcagaagaaagtagactttgtgagtggcctgcataccttgtgtggagctggagacataaagtctaacaatgggcttgctatccacattttcctctgcaatacctccatggagaacagatgcttttacaattcagatggggacttcttgattgttccgcagaaagggaaccttctcatttacaccgagtttggcaagatgcttgtacagcccaatgagatctgcgtcattcagagaggaatgcggttcagcatagatgtctttgaggagaccaggggctacatcttggaggtctatggtgtccactttgagttacctgaccttggaccaattggggccaatggcttggccaatcctcgtgatttcttgatacccattgcctggtatgaggatcgccaagtaccaggtggttacacggtcattaataaataccagggcaagctgtttgctgccaaacaggatgtctccccgttcaatgttgtggcctggcacgggaattatacaccctacaagtacaacctgaagaatttcatggttatcaactcagtggcctttgaccatgcagacccatccattttcacagtattgactgctaagtctgtccgccctggagtggccattgctgattttgtcatcttcccacctcgatggggggttgctgataagaccttcaggcctccttattaccataggaactgcatgagtgagttcatgggactcatccgaggtcactatgaggcaaagcaaggtgggttcctgccagggggagggagtctacacagcacaatgaccccccatggacctgatgctgactgctttgagaaggccagcaaggtcaagctggcacctgagaggattgccgatggcaccatggcatttatgtttgaatcatctttaagtctggcggtcacaaagtggggactcaaggcctccaggtgtttggatgagaactaccacaagtgctgggagccactcaagagccacttcactcccaactccaggaacccagcagaacctaattgagactggaacattgctaccataattaagagtagatttgtgaagatttcttcagaatctcatgctttctggtagtattggaggagggggttggttaaaatgaaaattcacttttcatagtcaagtaactcagaacttttatggaaacgcatttgcaaagttctatggctgtcaccttaattactcaataaacttgctggtgttctgtggacgtaaaaaaacacaaaaaaacacacacagggcgaaaacaaaacaaccgaaccataacaccaccacacaaatttttcgtgcggcggcggctccggcctcgtgaaaaagtttttaaacaaccacatatttttgggagccgcgggcccacaaatgggtaagtgacaacacactggccacagaggagtcgaccccacagagaaaactgctggacaccatagcaatcgacggatgtgtaactcccaccgcaataaaaataatccgcggcgtgcgtcaccagagagcttgttggagaaacacacacacaggaagggcgcatgcgcaggcctaaacagaggagctcataaacagaggggtcacagaggaaggcggagttgtaactaataaagcgcccgcagtagggcttacaacgataacgcacacaactgacaacgagccagccacnn

SEQ ID NO: 11299 - DNA, 566 bp, Homo sapiens
  misc_feature 537, 538, 539, 540, 541, 542, 543, 544, 545, 546, 547, 548,549, 550, 551, 552, 553, 554, 555, 556, 557, 558, 559, 560,561, 562, 563, 564, 565, 566: n = A,T,C or G
tgacagaaaacaggttatacgtaacgttaaaaataataaaatggaagactatgccttcggggctcatttctatagtttgttgttagaagaagtttctctgaacgtgtggagcacagggaaaaaattggtctataggttgttgggttatagacccttccttttatattcatatgtatttatatgagaataaacatgacccaaatattctacacttaatattttgcaatcaggaaaaaatgacttgatagaagtatttaccctgccaggcgtggtggctcacacctgtaatcccagcactttgggaggccgaaccaggaggatcatctgaggacaggagttcgaggacagcctggccaacatcatgaaaccccatctctaccaaaaatacaaaaaattagccaggcctggtggtgcacacctgtaatcccagctactcaggaagctgaggcaggagaattgtttgaacccaggaggcggagtgagatcgcatcattgcactccagcctgggcgattagagcaaaggctctgtctcatannnnnnnnnnnnnnnnnnnnnnnnnnnnnn

SEQ ID NO: 11300 - DNA, 888 bp, Homo sapiens
  misc_feature 725, 726, 727: n = A,T,C or G
gcgtccgctgaactgacctctcccctttgggagagaaaaactgtctgggagcttgacaaaggcatgcaggagagaacaggagcagccacagccaggagggagagccttccccaagcaaacaatccagagcagctgtgcaaacaacggtgcataaatgaggcctcctggaccatgaagcgagtcctgagctgcgtcccggagcccacggtggtcatggctgccagagcgctctgcatgctggggctggtcctggccttgctgtcctccagctctgctgaggagtacgtgggcctgtcccagcaagggctctggcagctgacagggctttgtctgggacagctgcaaaccagtgtgccgtgccagccaaggacagggtggactgcggctacccccatgtcacccccaaggagtgcaacaaccggggctgctgctttgactccaggatccctggagtgccttggtgtttcaagcccctgcaggaagcagaatgcaccttctgaggcacctccagctgcccccggccgggggatgcgaggctcggagcacccttgcccggctgtgattgctgccaggcactgttcatctcagcttttctgtccctttgctcccggcaagcgcttctgctgaaagttcatatctggagcctgatgtcttaacgaataaaggtcccatgctccacccgaggacagttcttcgtgcctgaaaaaaaaaaaaaaaaaaaaaannnttccttgcccgggggggcgtttggtttaaaaaaaaggggaccccccggggggggaaaatttaaataaaacttttttaaccccccccccccggggggggggcccggccccccatttttttcccttttaaggggggaaaaagcccccctggggaaaaaaaggg

SEQ ID NO: 11301 - DNA, 215 bp, Homo sapiens
aggtacaactgaagcaaagaggaaagcagacctcatggctcaggacacatgggagtcccaccagcttgaagaaggtgtcacagagctggcatttccatcagtgcagacacggctctgaaaacagtagttgctgccttatgggcatgatacgcccatttctactctgacctcctcccaggagaaactcttctgcaaatgaccacagtacctgcccg

SEQ ID NO: 11302 - DNA, 1438 bp, Homo sapiens
  misc_feature 1438: n = A,T,C or G
tatagggagtcgacccacgcgtccggcagggacttgaagaggacgctctgttcagcagatgcacgtttgggtctcagtttggattttgtgtcaaggttctgcatcaaatgtaaagccggtgacatttctggctgactttccttcttcttccccaaaccaaaggtaaacactttgggatcaaacaccttttctaaatggtcttcgtgaataggaggcatggcaaagtgaggagcaggagagtttggcatcctggccttctttcttttcatgggcatacaaactgcgctatccatctgttttataatttcagtgaatttttccatatcagaagaagaatcaaatacactatcatcactaccagcagaaatgttcaaaaggctggcagggctatcctggccatttgtaacagtctgatctggcctttgaggagtggctaagtgatttccgctgctgggagagttggtgggactggattcagccatcaggggtgttctgctgccctgactttgagcctgaataggcagagttttctctgatgctggcggtatgacttgtgggccagattttgccgcgagctctgctgtgcaatgagagtgttcattgcccagtacttcctcttgtgggggagcacaacttgcaacggaaaccacttcaggttcattactgtgacaagttggcaactgcacttctctaacttcagagctctctgggatgacctgggagctcacatcctgggtgctctccacggggagcacgaaggacctgacctggacgaggactctggatggacactcacttcccacagcttctggactacgctctgtggacaaaggaggggttgtttctcctccaagttctaaaagtggcattttctcattgttctaacgagacacaggcaaaacacatcctttatggttttctgacacttttagatcagtgcatgggaaactgcttatgggtgattgaacacatgtgtctttgggaacatccccaggagcgggtgcagacagtgaaagagaaggcccaggagatgactcagcaggggactgtgagtcagaaaatgtatgctgtggctttggcatggccgttggaggtaaatctttggtatccacagtggtggggatgtcttgtgctgtatcggttacattttcaagtacaaggcttttgctgtctgcagcctctgagtcctccttctctaagagcttatggtccttgacaggaatcagagcagaagccactggttctgaaaggcagccagcatctgtttgtacatctgctttatcatcttggttaggctgaggaccaagagcttgattctcagaagagtctccattcattcctctggttgctggcagaatctcttcttccgagacggtaactttggtttctatagcagtttccttaaccaacacaccaagaagtccggtaccggctcgan

SEQ ID NO: 11303 - DNA, 1347 bp, Homo sapiens
  misc_feature 1, 2, 3, 4, 5: n = A,T,C or G
nnnnncctgtgcctggtaacccctgaataactactgtgtatgtttatcctttattgcctctgtaagagaatgctggaggtcaaacatagcagagattaataataatatgagtgataacggataaaacgcgtagcactgactacctaccaggcactgtcctgagtgctttacatgtattaacccatttaatcatcagtcaacacagcatgatgttattggtagatattattattacgtatatattctacagatggagaaactatgacctagagtgaccccaatgtcaccagctaagggtggggctgggtttaaaccaggccagtctagcttgtaacctctatgtcatattggaatagactctagcacagtggttataggttcctactaaaagagtgttaaaaaccatgacagctatgctttaagaatacatacttgaatgtaagtgttagccctgacatccaatttgtcttcctaacgcctagtatataatatggctcaagaaatgtttattaaatatgtgtttcattttttttttcttttttgagatggagtatcactctgtcacccaggctggagaactcaagaaagtctggtcacttcagtgagtgttggtgtgtgaggagaatcaagtgagaagtgcttttagaaacatccatgcaggtatgaaggagctctaacatgccaggtgagtggacaaggcttggggaaggttgacgatacctagagacatgtcagcctttgggtcagagcctgcctaatctcatggggaactgatgggtggaataggcactctaggctccccctggcatgggcagggttgcagagaattcagaaatttgtgtgtgttcacggaggggaggccaagcttctgactgttgaagttagggtcagaatggagaggcaagcatgtgtgtgagggactctgagatgggagactgacaattaggacaatgggctttgcccatggagccagaatgtcaccctgcgagggtgaatggcactgggccacatatctcagtggtcagatccaggatctcagcagtcactcctatcaatcagagatcggaccatggcaggcacactcagcaaagtcccccatgatccagaagacatgtgcgaattctgcatcatcttcccctccataatcctgaggacagtgagagccaaggtaaggaccttgacacacagattcgttaccaggaggaattctttgcctactgaatcattctgaatatatcggatttgtctaaatagatcccacctgccctcccatctactcttctccagtaaagaggcttacgtggaagattagatctgttaccaaaaaaaaaaaaaaaaaaaaaaagt

SEQ ID NO: 11304 - DNA, 450 bp, Homo sapiens
  misc_feature 1, 2, 3, 4, 5, 6, 7, 8, 9, 10, 11, 12, 13, 14, 15, 16, 17,18, 19, 20, 21, 22, 23, 24, 25, 26, 27, 28: n = A,T,C or G
nnnnnnnnnnnnnnnnnnnnnnnnnnnncttttttaaaagatcattttttaacttttcattttgaagtaattacagggttttaacaagttgcaaaaacagtagaaaagttcctgtggactcttcatccaacgtccccaaaagttagctttgaggctgggcgcggtggctcacgggcactcatcacagcactttgggagaccgaggtgggtggatcagctgaggtcgggagtttgagatcaggctggtcgacatggtgaaaccccgttttcacactcatggagccaggaggaccaatccatgagcacagggcacctcggagtcccgggcgggcattctccggcgtccttcttctgaagcttctgaaaagttgctgtaggactccttttcccaggttggggtttctatctgcgttttagctgcttgtgttgccatgtggatctgccccgggt

SEQ ID NO: 11305 - DNA, 6608 bp, Homo sapiens
  misc_feature 1, 6608: n = A,T,C or G
nagttgtgcctggagtgatgtttaagccaatgtcagggcaaggcaacagtccctggccgtcctccagcacctttgtaatgcatatgagctcgggagaccagtacttaaagttggaggcccgggagcccaggagctggcggagggcgttcgtcctgggagctgcacttgctccgtcgggtcgccggcttcaccggaccgcaggctcccggggcagggccggggccagagctcgcgtgtcggcgggacatgcgctgcgtcgcctctaacctcgggctgtgctctttttccaggtggcccgccggtttctgagccttctgccctgcggggacacggtctgcaccctgcccgcggccacggaccatgaccatgaccctccacaccaaagcatctgggatggccctactgcatcagatccaagggaacgagctggagcccctgaaccgtccgcagctcaagatccccctggagcggcccctgggcgaggtgtacctggacagcagcaagcccgccgtgtacaactaccccgagggcgccgcctacgagttcaacgccgcggccgccgccaacgcgcaggtctacggtcagaccggcctcccctacggccccgggtctgaggctgcggcgttcggctccaacggcctggggggtttccccccactcaacagcgtgtctccgagcccgctgatgctactgcacccgccgccgcagctgtcgcctttcctgcagccccacggccagcaggtgccctactacctggagaacgagcccagcggctacacggtgcgcgaggccggcccgccggcattctacaggccaaattcagataatcgacgccagggtggcagagaaagattggccagtaccaatgacaagggaagtatggctatggaatctgccaaggagactcgctactgtgcagtgtgcaatgactatgcttcaggctaccattatggagtctggtcctgtgagggctgcaaggccttcttcaagagaagtattcaaggacataacgactatatgtgtccagccaccaaccagtgcaccattgataaaaacaggaggaagagctgccaggcctgccggctccgcaaatgctacgaagtgggaatgatgaaaggtgggatacgaaaagaccgaagaggagggagaatgttgaaacacaagcgccagagagatgatgggtacttgctacccgaattccgatccatctgctggagacatgagagctgccaacctttggccaagcccgctcatgatcaaacgctctaagaagaacagcctggccttgtccctgacggccgaccagatggtcagtgccttgttggatgctgagccccccatactctattccgagtatgatcctaccagacccttcagtgaagcttcgatgatgggcttactgaccaacctggcagacagggagctggttcacatgatcaactgggcgaagagggtgccaggctttgtggatttgaccctccatgatcaggtccaccttctagaatgtgcctggctagagatcctgatgattggtctcgtctggcgctccatggagcacccagtgaagctactgtttgctcctaacttgctcttggacaggaaccagggaaaatgtgtagagggcatggtggagatcttcgacatgctgctggctacatcatctcggttccgcatgatgaatctgcagggagaggagtttgtgtgcctcaaatctattattttgcttaattctggagtgtacacatttctgtccagcaccctgaagtctctggaagagaaggaccatatccaccgagtcctggacaagatcacagacactttgatccacctgatggccaaggcaggcctgaccctgcagcagcagcaccagcggctggcccagctcctcctcatcctctcccacatcaggcacatgagtaacaaaggcatggagcatctgtacagcatgaagtgcaagaacgtggtgcccctctatgacctgctgctggagatgctggacgcccaccgcctacatgcgcccactagccgtggaggggcatccgtggaggagacggaccaaagccacttggccactgcgggctctacttcatcgcattccttgcaaaagtattacatcacgggggaggcagagggtttccctgccacagtctgagagctccctggcggaattaattcggctccccagcgtggtaaaagttagcctcatcatgcaccactttagccaaattctgtctcctgcatacactccggcatgcatccaacaccaatggctttctagatgagtggccattcatttgcttgctcagttcttagtggcacatcttctgtcttctgttgggaacagccaaagggattccaaggctaaatctttgtaacagctctctttcccccttgctatgttactaagcgtgaggattcccgtagctcttcacagctgaactcagtctatgggttggggctcagataactctgtgcatttaagctacttgtagagacccaggcctggagagtagacattttgcctctgataagcactttttaaatggctctaagaataagccacagcaaagaatttaaagtggctcctttaattggtgacttggagaaagctaggtcaagggtttattatagcaccctcttgtattcctatggcaatgcatccttttatgaaagtggtacaccttaaagcttttatatgactgtagcagagtatctggtgattgtcaattcacttccccctataggaatacaaggggccacacagggaaggcagatcccctagttggccaagacttattttaacttgatacactgcagattcagagtgtcctgaagctctgcctctggctttccggtcatgggttccagttaattcatgcctcccatggacctatggagagcaacaagttgatcttagttaagtctccctatatgagggataagttcctgatttttgtttttatttttgtgttacaaaagaaagccctccctccctgaacttgcagtaaggtcagcttcaggacctgttccagtgggcactgtacttggatcttcccggcgtgtgtgtgccttacacaggggtgaactgttcactgtggtgatgcatgatgagggtaaatggtagttgaaaggagcaggggccctggtgttgcatttagccctggggcatggagctgaacagtacttgtgcaggattgttgtggctactagagaacaagagggaaagtagggcagaaactggatacagttctgaggcacagccagacttgctcagggtggccctgccacaggctgcagctacctaggaacattccttgcagaccccgcattgccctttgggggtgccctgggatccctggggtagtccagctcttcttcatttcccagcgtggccctggttggaagaagcagctgtcacagctgctgtagacagctgtgttcctacaattggcccagcaccctggggcacgggagaagggtggggaccgttgctgtcactactcaggctgactggggcctggtcagattacgtatgcccttggtggtttagagataatccaaaatcagggtttggtttggggaagaaaatcctcccccttcctcccccgccccgttccctaccgcctccactcctgccagctcatttccttcaatttcctttgacctataggctaaaaaagaaaggctcattccagccacagggcagccttccctgggcctttgcttctctagcacaattatgggttacttcctttttcttaacaaaaaagaatgtttgatttcctctgggtgaccttattgtctgtaattgaaaccctattgagaggtgatgtctgtgttagccaatgacccaggtgagctgctcgggcttctcttggtatgtcttgtttggaaaagtggatttcattcatttctgattgtccagttaagtgatcaccaaaggactgagaatctgggagggcaaaaaaaaaaaaagtttttatgtgcacttaaatttggggacaattttatgtatctgtgttaaggatatgtttaagaacataattcttttgttgctgtttgtttaagaagcaccttagtttgtttaagaagcaccttatatagtataatatatatttttttgaaattacattgcttgtttatcagacaattgaatgtagtaattctgttctggatttaatttgactgggttaacatgcaaaaaccaaggaaaaatatttagtttttttttttttttttgtatacttttcaagctaccttgtcatgtatacagtcatttatgcctaaagcctggtgattattcatttaaatgaagatcacatttcatatcaacttttgtatccacagtagacaaaatagcactaatccagatgcctattgttggatattgaatgacagacaatcttatgtagcaaagattatgcctgaaaaggaaaattattcagggcagctaattttgcttttaccaaaatatcagtagtaatatttttggacagtagctaatgggtcagtgggttctttttaatgtttatacttagattttcttttaaaaaaattaaaataaaacaaaaaaaaatttctaggactagacgatgtaataccagctaaagccaaacaattatacagtggaaggttttacattattcatccaatgtgtttctattcatgttaagatactactacatttgaagtgggcagagaacatcagatgattgaaatgttcgcccaggggtctccagcaactttggaaatctctttgtatttttacttgaagtgccactaatggacagcagatattttctggctgatgttggtattgggtgtaggaacatgatttaaaaaaaaaactcttgcctctgctttcccccactctgaggcaagttaaaatgtaaaagatgtgatttatctggggggctcaggtatggtggggaagtggattcaggaatctggggaatggcaaatatattaagaagagtattgaaagtatttggaggaaaatggttaattctgggtgtgcaccaaggttcagtagagtccacttctgccctggagaccacaaatcaactagctccatttacagccatttctaaaatggcagcttcagttctagagaagaaagaacaacatcagcagtaaagtccatggaatagctagtggtctgtgtttcttttcgccattgcctagcttgccgtaatgattctataatgccatcatgcagcaattatgagaggctaggtcatccaaagagaagaccctatcaatgtaggttgcaaaatctaacccctaaggaagtgcagtctttgatttgatttccctagtaaccttgcagatatgtttaaccaagccatagcccatgccttttgagggctgaacaaataagggacttactgataatttacttttgatcacattaaggtgttctcaccttgaaatcttatacactgaaatggccattgatttaggccactggcttagagtactccttcccctgcatgacactgattacaaatactttcctattcatactttccaattatgagatggactgtgggtactgggagtgatcactaacaccatagtaatgtctaatattcacaggcagatctgcttggggaagctagttatgtgaaaggcaaatagagtcatacagtagctcaaaaggcaaccataattctctttggtgcaggtcttgggagcgtgatctagattacactgcaccattcccaagttaatcccctgaaaacttactctcaactggagcaaatgaactttggtcccaaatatccatcttttcagtagcgttaattatgctctgtttccaactgcatttcctttccaattgaattaaagtgtggcctcgtttttagtcatttaaaattgttttctaagtaattgctgcctctattatggcacttcaattttgcactgtcttttgagattcaagaaaaatttctattcttttttttgcatccaattgtgcctgaacttttaaaatatgtaaatgctgccatgttccaaacccatcgtcagtgtgtgtgtttagagctgtgcaccctagaaacaacatattgtcccatgagcaggtgcctgagacacagacccctttgcattcacagagaggtcattggttatagagacttgaattaataagtgacattatgccagtttctgttctctcacaggtgataaacaatgctttttgtgcactacatactcttcagtgtagagctcttgttttatgggaaaaggctcaaatgccaaattgtgtttgatggattaatatgcccttttgccgatgcatactattactgatgtgactcggttttgtcgcagctttgctttgtttaatgaaacacacttgtaaacctcttttgcactttgaaaaagaatccagcgggatgctcgagcacctgtaaacaattttctcaacctatttgatgttcaaataaagaattaaactgaagaaaaacaaaaaaaaaaaaactcgagggggggcccggtacccaattcgccctatagtgagtcgtattacaattcactggccgtcggtttacaacgtcgtgactgggaaaaccctggcgttacccaacttaatcgcctttgcagan

SEQ ID NO: 11306 - DNA, 2229 bp, Homo sapiens
  misc_feature 1, 2, 2229: n = A,T,C or G
nnagtttcggaggcggtgaccgtgacgtagaaggtggagaccgcttcaccctgatcagggagtatcggctgcgggtgcgcaaggcgtccaggagtgacctggggctgtggagagcgacccgtggccttgtgtttcagagtttaccacctaggatgacttcagtgactagatcagagatcatagatgaaaaaggaccagtgatgtctaagactcatgatcatcaattggaatcaagtctcagtcctgtggaagtgtttgctaaaacaatctgccagttatcaagacaggaggcaatcctggcggcgagcaagtatgaaagaaacgaaccggcggaagtcgctgcatcccattcaccagggcatcacagagctcagccggtctatcagtgtcgatttagcagaaagcaaacggcttggctgtctcctgctttccagtttccagttctctattcagaaacttgaacctttcctaagggacactaagggcttcagtcttgaaagttttagagccaaagcatcttctctttctgaagaattgaaacattttgcagacggactggaaactgatggaactctacaaaaatgttttgaagattcaaatggaaaagcatcagatttttctttggaagcatctgtggctgagatgaaggaatacataacaaagttttctttagaacgtcagacttgggatcagctcttgcttcactaccagcaggaggctaaagagatattgtccagaggatcaactgaggccaaaattactgaggtcaaagtggaacctatgacatatcttgggtcttctcagaatgaagttcttaatacaaaacctgactaccagaaaatattacagaaccagagcaaagtctttgactgtatggagttggtgatggatgaactgcaaggatcagtgaaacagctgcaggcctttatggatgaaagtacccagtgcttccagaaggtgtcagtacagctcggaaagagaagcatgcaacaattagatccctcaccagctcgaaaactgttgaagcttcagctacagaacccacctgccatacatggatctggatctggatcttgtcagtgactttatgagagtttctgccacaaggtgcccaagaggagaggaatgggaagagtgccccagcacgtggtgactgcgtgatttctgctcgttgcctttgaagataactggcaggactgactgtagaacactttgacttttttcaaaaagtgatggaatttgtacatccaaatgaatattgtatagacaattttcccaggaatgtgcaaaatgcttgaaagttcaaacttcttttttgaaatgatcttcagatccagtggcccattcttttatctttatcctgtgaaggtgtttttcaggttttgaaacaatccaaaaatcatttaggaccaagtctaaggaaacattttagtggccaagttggattccgattgtaaaggaatgatactaattttctagcatggctctgaaggtgattttaggtagaagagttttgaggctgggcgcaatggctcacgcctgtaatcctagcattttgggtgactgaggcgggtggattgcttgagcccagaagttgaagaccagcctgagaaataaggtgaaaccctgtctacaaaaaatacaaaaagttagctgggtgtggtggcgtgtgcctgtagtgctagctactcagaaggctgaggtgggaggattgtttgagcccaggaggttgaggctgcagtgagttctaattgcgccactgcactccagcctgagcgacagagtgagacactgtcttaaaaaaaattaaaaattgtaaaaaaatgaaaaaaaaagttttgagcattatttgcatcattgggatacatatgtcacttcacaagatgttcaatttgaaggaaataccactcattctctatgtcctgttgtctgtagtgtgcttcagtttttcatattgagttgacctaaatcctggattcatgacaagaaaggagtaagtactactattcattgttctatttgtttataatctgtattataaaattgcacataattaaaagctttccccttggtcttcaaaaaagacaatcagtagcaaaaaccaccatcaacgagctcatcagacggcgcggacacaaccatgcactcacgcggcgcccaaccgagctccgcgctgcccgcaccgcgagcaaaacacacagaaggagcgggggtccatcccacaccgcn

SEQ ID NO: 11307 - DNA, 1711 bp, Homo sapiens
  misc_feature 1, 14, 15, 1706, 1707, 1708, 1709, 1710, 1711: n = A,T,C or G
natcctcaaacccnnctataaaatttctctctccttcccgtgttttttcccaatgttttttccaaaccccttcccctgtgtttgagccccaaacgtgaaaatcctcaagggccccccacaaccaacagattgttgagccccgaaaactaatgcgactatccaattcgaccaagaaccgggccccacttaagcacttccattatgccttaaggaatgtaaataattgccaagcatttgtgaagaaggtattaacaattacgtaaatggccatgcccagaaccaagataaccaggtcattttaagaacatgtccggaacacccccaatattaccagttttcaaaacatgtcaagcagtatgagtttggtttgcctatcattaagatgaacctcattttaatagactcttcattctctgaagttcttagtcttgaattttaaaaataagataatataactaattctcatgtttactacacactctaattcattatcagagattttcagctattaaaaatgtgtccttaaaaaaaaaacaggtcacaagacatatcctgtttgataatttgttgcatagggaatagcatacatcttagttaaaatcattcctatacgtgggcaaaacatttaccaccacctattatggtctcctacgtgcatcattgctgaaacattttaagataacttaattttatacctgtacccctcccattgtggtagtcccagcagtttaccaaacactagttcccctagtagagccagcctatgagaagaaaagctttgttggccaagttcttacattaatgacttcatagtaagaaactgatttcaaagtgaattaaggaaatcatcacagagaatattttcaaacagatgtttctctttttaaaaagtgatagtaagatgaacttgtaaaaaatttcctctgatgttaattgtagagttgtgggggacggcctatttttctctaccgttgggactggcagggcattgcccaccatataccatagtggtcaccaaaaaagaaacctcttcaacttgaaaagggaagtgaacatgagccatgagagagatttaaaagacccctgtgcttgcagttaatgccacgttgattgattatctgtgcttcaaaggtcacagaaatcttaaaggatttttagcaccatgtagatattgtcttttgtcctgctttataaaaagcgttgctataatgtattagtgggttctcgtgtctccaaattaccaccgtggctaggctgctggaaaaaagcactgttctgttcactccaatctcctggtagactctgttggtctatagacttctgtgaagccagtgggtttctactaataaccaggtccagcttattcccggattctgctatgaggggcacaacaaggcagcagtcaaagtctctggttcggacatgattcacctgtaagagcctgtcatagggctttaagccaccaagatctcctggcccagctgggcgaatatttttgacatacactcctttctccagtaagccatctgctacactgaacccaaagtcctccatgtcagagtccttgtacaaggtcaccttgtgcagctccacaggagttggagacatgatctcctttatttcttgtttcatttttctcagggttactgacttcctacccacatctgaaggcagggtgttgctccgagttgtttggctgtagtgcnnnnnn

SEQ ID NO: 11308 - DNA, 310 bp, Homo sapiens
tccaccgcggtggcggccgcccgggccgccacgcgggttctcattcttttctcctttatcttcactctgatttttcttttgtcattcaacgcttactcccttccccatacctcagtcctccaggtgacacctgggcgcttttctgcctgaacagcatttcccaccaacggccacagcagtcggtcagtgtcctcttgagcacctcctgaagctgcagtgtcatttgctgtttgccctaaaaagccacgcccagatttcttctaccgctgcttccctgatgggctagcccattctgacttgatgtgtacct

SEQ ID NO: 11309 - DNA, 336 bp, Homo sapiens
accagattttcaccgctatgcctcctttcactctgggagtcttccagaggtcttgcactcgggagagcatgctcaggtttccccagctctacaaaatcacccagaatgccaaagacttcaacacaaggatactgtgttgaccagtggtcatgccactgcctgttgatttgttgaaaatattgtttacacgtatgttcttgttactgattgtcagaaagctggttttgagactgcagcttggactaaattcagtcatctggctgtctggggaagcatgctgaccagtctggtgttctttggcatctactcagccatctggtccaccattctcattgc

SEQ ID NO: 11310 - DNA, 881 bp, Homo sapiens
  misc_feature 1, 2, 3, 4: n = A,T,C or G
nnnnccctttcatcggctctgttctcgcctctctttaatcattttagcaatcattcatgttttgttttcattctataaaaaaaaaattattggtagaagattttccttctcaatttcaaaacctttaggcctctgcagagttcgtcctgcaaggccctagattgcagagtgaagaggaggtcacaggcactagtcctaatgcatggtatcctcagaaatatgcactccagctgcaggctccgacaactctccacattagagctcagagggcctcccgtgtacctgaatgagcctggcctggtgctgtgtctccagactcgacacagcccagaaagaaacaggtgaacacactcctgagagccgaaactggactcttgctgatggactcatggcaatactccagccaaaggctgctccgagtcctagaagggctcggaactgtcctgggtaagcctgtcgacacagtagggacagagaggggttagtgtcctctttcacagcactaagcatgttgttgcccacatgcaacagttatgacaagaacagcaagtccaattcaggaaatacatgtctttatcaaagaaaatagatgtgactgacacaaaggcttgctccagaagcaaaggcgcacatctctaatagttagagatcttttgagtattccaccagagaatagaggtggaaccttaggccaatcagttaataagtatttatggaacatctactgtgtgccaggtagggctgggataagagggaagcaggcaatctgcacaggcatgtgcctgagagggagggtctccttgggttctcagacctgggcctagatccagggactaagatgagaggtgacacctaactttgcaacacagtcctgcccgcgt

SEQ ID NO: 11311 - DNA, 4543 bp, Homo sapiens
gtcgctcgctctccttctcctccctcgtcgctctctcctcccctctctcctcggcgcggcccccgcgcgtcttctcgtctttgctcctcttcgttggccgtcggtctgtcgtttcgcttctctcctgtcccgtgccgcccgtgcccctctgctccggcctgctcctgatgttgccgctgtgtctgtgtcgtgatgttcgctccggtccgtcctcctgcctgcgtctctgctctcccggtcttgctcggtttgtttctcgcgtcttgttcctctccccgccgctctccggtgctgggtgttggtcggtgcgcggtgggtggtgtgggtggtgtctgtgtgtttcgtgggtggtgtctggcgtgttgtttttcgcggcagttcgttgtgcccgggtttaccccggtgtgttctgcgatttgatgtgcggtgttcgctattgtggggagccggcggggtggtcgcgcgttgtgtggcgagtgtgcttgggtccggtgtcttgctttgtcccttggcccgtggcggtcctcggtttgtgctggctccgtgcattgaggggcgtgtcggggtgttgtgtgtgtgttttttttttttcagaatccaactggactttatttgacacagaatacaatatggctacagaaacagcaaactgaaaaaacaaagcagaaaaaaacacagttccatccaatttgtaattaggtaacagcagggaaagtcattaaatgaataacaaaacaattaagcttgatggaagaagtcttttcctagtgcccatacttttggaattcccactctctgttgtccaatggacacacctgtcgtgttttgagccagcgagagatgcagtggaagtgaaaagcatggttacagactccccatgcgacagtacactcttctgaagtagcggacgcctggttagcttgacattctatgcaaagatccataatgtggttcctgcagatggcacagttatcaaccacaatatcccaggcccagagggctactgcattccactttttcacttcaaagcgcttcttgcccgcgccgctgttggtgccgctcggggtatccacatccatcgctgcgggctcacaaagcggccagacgctcggcggcggcgtgtggcaggagcgcaggggcgcgagccggcgatcagccttcccggcgaccgtgccgcgggagctcgagcttctcggactaggggacccgggccggcccccaagatgccggcgatcgcggtgcttggcggcggccgccgcggcgtggtgcttcctccaagtcgagagccggcacctggacgcgctcgccggaggcgcgggccccaaccacgggcaatttcctagacaatgaccaggtggctgagcaccgtctcccagtacgaccgggacaagtactggaaccgctttcgagacgatgattatttcagaaactggaatcccaacaagccctttgaccaagccctggacccatccaaggacccctgcctgaaggtaaaatgcagccctcacaaagtgtgtgtgacccaggactaccagaccgccctgtgtgtcagccgcaagcacctgctccccaggcaaaagaaggggaacgtggcccagaaacactgggttggaccttcgaatttggtcaagtgcaagccctgtcccgtggcacagtcagccatggtctgcggctcagatggccactcctacacatccaagtgcaaattggagttccatgcttgttctactggcaaaagcctcgccaccctctgtgatgggccctgtccctgtctcccagagcctgagccaccaaagcacaaggcagaaaggagtgcctgcacagacaaggagttgcggaaccttgcctcccggctgaaggattggtttggagctctccacgaggatgcgaacagagtcatcaagcccaccagctccaacacagcccaaggcaggtttgacactagcatcctgcccatctgcaaggactccctgggctggatgttcaacaagttggacatgaactatgacctcctgcttgacccttcagagatcaatgccatctacctggataagtacgagccctgtatcaagcctcttttcaactcgtgtgactccttcaaggatggcaagctttctaacaatgagtggtgctactgcttccagaagcctggaggtctcccttgccagaatgaaatgaacagaattcagaagctgagtaaggggaaaagcctgttgggggccttcatacctcggtgtaatgaggagggctattacaaagccacacagtgccacggcagcacggggcagtgctggtgtgtggacaaatatgggaatgagttggctggctccaggaaacagggtgctgtgagctgtgaagaggagcaggaaacctcaggggattttggcagtggtgggtccgtggtcctgctggatgacctagaatatgaacgggagctgggaccaaaggacaaagaggggaagctgagggtgcacacccgagccgtgacagaggatgatgaggatgaggatgatgacaaagaggatgaggtcgggtacatatggtagtgcccacaagaaagaggacacaagttttgcacaaaattgcaagtcacttcctattcctgcatttgtatctaagactccaaggcaccaaggtctcttctccattgttgctctctatacccgacctaaggtttggaagacaactgcttgttcccagaggattctgattttgcatatgtttgtatgggagaaagggtgttgtgtttttttttttgttgttgtttattttttggatagggaagtcattggcttaattagagcctccttcctttctgtgagatttttccaacaagcatgtgatttacgtggaattctgacagtgcagggagcccccaccctcttaaatgtcaaagaccctttttgattacccacactggtggttattacagcatggttcccagccttacagtgtctaagtgcttctcttgtgtcctgtagatgttgtgaaaaagaaaaaaacaaaaaatacaccacactgtactttttccccccccccccgttactgccggtgattattattaaaaattagtttttttcacatcattatatctggcttcctataaacaacagccttaattcagtcaagactccctttggggaattcattttattaaaaattggtgtctggatacttccctgtacatgcataaatatgcatgcatgtacagaaagactgtatgtgtgtgccttgcacacacacccatacctctcagaaaaagtgggtatcttaaaaactcgaaaaacaatgataaatttctcagcttgtccagacctggaacaaaatttctggaataagaaatttgtattaaagtccttttttgcactaacagttggctcttgtagcctgcaggctgaggaagtctcttctctgtgcatcagcagagttactgaaagcctctgattgagaaaaaacctccgtctgcctaaatcacttttctcgcagaagccatgcgactcccacacgacacgggcagcttcacaagccatctctttcatttctgcttgaagcccccttggctgcagcaatcctgtctgccataggtttcttccttccttacctactcaagggctttttctaaggcatgcacacatatctcctgttctctgagagtaccatggtgttccttaaaagaagaaaatttctaattctgaactcaatgttttgcttttactccctttctactgacaaatcatgataagggcacaaaagctgtacagattttttttttttaaccactcaatcccaaatggaggcctacaaagaacatcgtaataacacatggaagcaaaccccgggtttttaagagcaaattctgtccccccctcactcccccaagtgacaagatactaatgaagaaagttcttcaccatagtgtttgttttaactaaactcattggagtctagttccaaatttggtagggtcatcatctctacattccttaggatttctctccctatcaagctggcccagatacaagtaccaaacagtagtctctgaagttcccccatttccttcagtaccagtctataagctactgtccgccactgattttcatttatcagggtgtcctaatcagaatcagccacccaagcaagcctctctggcccacatatctatctcttgccttcccccatgaacttcagcctgtccacacaaaagccacataaactcaagcaagaaatatgttcagccaaaacatgattatagtggcagctgaccaatcccccatcccaaattgaccatttagatgtaccaactcaccttaaattagcatgttccaatccagtcggcattgcctgaatacagtaagcatcttatctatagtgtggtcttagataagaaatgaatattgatatagaagtcctttggttcgaaataactgaggtttgtattatttcccataggaaggcgcatagcactctgttggatcttaatcatacttgttaaatttttttctgacaaggatattaaacggtatggcaatcatagtttaatcgc

SEQ ID NO: 11312 - DNA, 524 bp, Homo sapiens
actgaacactacatgctatgcactgctccaacatttttaagtgtcctaatttattaaactctcacacatttgaatagggaggtttcactgatcaggaaatagaggatcagagcatttaagtaactagctcgaggtcacagagctaataaagggaagagctaagattcaaactcagacaatctagcttcagaactgatgcttaatgtgtaaacatcctttctttcatgtccttcaacattcccatttcccatctgtaaccaaacatatggaaggcataaatttcttttatgggtcctaacatcaccacagagccctagataaatcttaagtaggtgctggatgatggtgaagcatattaaaaatggaggctggtggtaaagttgacctgatttcactactcagaaggaacagagtgttgctttgaaagacagacataaaagaatgtagatgacaggttgatgagtgcagcaaaccaccatggcacatgtatacctatgtaacaaacctacatgttccgcacatgt

SEQ ID NO: 11313 - DNA, 2970 bp, Homo sapiens
  misc_feature 1, 2, 3, 4, 5, 6, 7, 8, 2951, 2952, 2953, 2954, 2955, 2956,2957, 2958, 2959, 2960, 2961, 2962, 2963, 2964, 2965, 2966,2967, 2968, 2969, 2970: n = A,T,C or G
nnnnnnnnccctgctccctgccctcctgggcagccagggcagccaggacggcaccaagggagctgccccatggacagggccccacagagacagcaccgagcctcacgggagctgctggctgcaaagaagacccacacctcacaaattgaagtgatcccttgcaaaatctgtggggacaagtcgtctgggatccactacggggttatcacctgtgaggggtgcaagggcttcttccgccggagccagcgctgtaacgcggcctactcctgcacccgtcagcagaactgccccatcgaccgcaccagccgaaaccgatgccagcactgccgcctgcagaaatgcctggcgctgggcatgtcccgagatgctgtcaagttcggccgcatgtccaagaagcagagggacagcctgcatgcagaagtgcagaaacagctgcagcagcggcaacagcagcaacaggaaccagtggtcaagacccctccagcaggggcccaaggagcagataccctcacctacaccttggggctcccagacgggcagctgcccctgggctcctcgcctgacctgcctgaggcttctgcctgtccccctggcctcctgaaagcctcaggctctgggccctcatattccaacaacttggccaaggcagggctcaatggggcctcatgccaccttgaatacagccctgagcggggcaaggctgagggcagagagagcttctatagcacaggcagccagctgacccctgaccgatgtggacttcgttttgaggaacacaggcatcctgggcttggggaactgggacagggcccagacagctacggcagccccagtttccgcagcacaccggaggcaccctatgcctccctgacagagatagagcacctggtgcagagcgtctgcaagtcctacagggagacatgccagctgcggctggaggacctgctgcggcagcgctccaacatcttctcccgggaggaagtgactggctaccagaggaagtccatgtgggagatgtgggaacggtgtgcccaccacctcaccgaggccattcagtacgtggtggagttcgccaagaggctctcaggctttatggagctctgccagaatgaccagattgtgcttctcaaagcaggagcaatggaagtggtgctggttaggatgtgccgggcctacaatgctgacaaccgcacggtcttttttgaaggcaaatacggtggcatggagctgttccgagccttgggctgcagcgagctcatcagctccatctttgacttctcccactccctaagtgccttgcacttttccgaggatgagattgccctctacacagcccttgttctcatcaatgcccatcggccagggctccaagagaaaaggaaagtagaacagctgcagtacaatctggagctggcctttcatcatcatctctgcaagactcatcgccaaagcatcctggcaaagctgccacccaaggggaagcttcggagcctgtgtagccagcatgtggaaaggctgcagatcttccagcacctccaccccatcgtggtccaagccgctttccctccactctacaaggagctcttcagcactgaaaccgagtcacctgtggggctgtccaagtgacctggaagagggactccttgcctctccctatggcctgctggcccacctccctggaccccgttccaccctcacccttttcctttcccatgaaccctggagggtggtccccaccagctctttggaagtgagcagatgctgcggctggctttctgtcagcaggccggcctggcagtgggacaatcgccagagggtggggctggcagaacaccatctccagcctcagctttgacctgtctcatttcccatattccttcacacccagcttctggaaggcatggggtggctgggatttaaggacttctgggggaccaagacatcctcaagaaaacaggggcatccagggctccctggatgaatagaatgcaattcattcagaagctcagaagctaagaataagcctttgaaatacctcattgcatttccctttgggcttcggcttggggagatggatcaagctcagagactggcagtgagagcccagaaggacctgtataaaatgaatctggagctttacattttctgcctctgccttcctcccagctcagcaaggaagtatttgggcaccctaccctttacctggggtctaaccaaaaatggatgggatgaggatgagaggctggagataattgttttatgggatttgggtgtgggactagggtacaatgaaggccaagagcatctcagacatagagttaaaactcaaacctcttatgtgcactttaaagatagactttaggggctggcacaaatctgatcagagacacatatccatacacaggtgaaacacatacagactcaacagcaatcatgcagttccagagacacatgaacctgacacaatctctcttatccttgaggccacagcttggaggagcctagaggcctcaggggaaagtcccaatcctgagggaccctcccaaacatttccatggtgctccagtccactgatcttgggtctggggtgatccaaataccaccccagctccagctgtcttctaccactagaagacccaagagaagcagaagtcgctcgcactggtcagtcggaaggcaagatcagatcctggaggactttcctggcctgcccgccagccctgctcttgttgtggagaaggaagcagatgtgatcacatcaccccgtcattgggcaccgctgactccagcatggaggacaccagggagcagggcctgggcctgtttccccagctgtgatcttgcccagaacctctcttggcttcataaacagctgtgaaccctcccctgaaggattaacagcaatgatgggcagtcgtacttgtgccattctttataaaatgattttaaannnnnnnnnnnnnnnnnnnn

SEQ ID NO: 11314 - DNA, 491 bp, Homo sapiens
  misc_feature 1, 463, 491: n = A,T,C or G
ncgattgggactccacccggtggcggcccgagtacgcggggaaagggcagcaggccgcctgccaggcagtgtgtgtcagaatcccacaactctctgggcctccttaggccacagggtctggactctatgaacagttggtgctaggcatggggaagatagaaatgttccttgtggcctagattcaaccaggaggcctccctggaggaagtgtcccctctgaaggtgtgagacttcctgcctatatctgtgagctggggcaggggagagtggaggctctggactggcccaatttaacttcatttaccacactttaagaaatcttccccaggctgggagcagtggttcacacttgtaatcccagcactttggaaggtcaaggtgggaggatcacttgagcccaggagtttgaaaccagcctgggcagcatagtgagaccctgtctctgccaaaaagggatgtatanaaaaaaaaagttcctgcccgggcggccn

SEQ ID NO: 11315 - DNA, 456 bp, Homo sapiens
  misc_feature 456: n = A,T,C or G
acagctcccaggaatccccttctcaggcctgtttcagttcaaactggacatattcctgggttttcagattgaagaaacaagattttgctacgatttttgttaaccctcttttttgcagtctttttggttatttgctggtttgtatctgtgtttgaatcagttgcaattttggtttctggcattttagcagcctatgctatactatgagaaatagatattttttaaaggcacttttttcagcagctaccattttcctaaaagttttcaatcagtagtatttccatcaaaatgctaattattgttgttgttgttgtgattaaagacagggtctccctctgtcaccccggctggagtgcagtggtgcaatcatagttcacggaaacctagaattgctaggctcaagagatcctgccacctcaacatgccaaagtgctgggattacaggcgtgagctacn

SEQ ID NO: 11316 - DNA, 824 bp, Homo sapiens
  misc_feature 824: n = A,T,C or G
cagggtcagggttccagggccaagttatccactcccttgggtctttccttcctgaggctttccctgcggggcccgggggagctgcagcaacagcagtgggcaacgaccagcagctgccggagcagcgcggtgcccacgaaggtgagggtgccaaggctggcgcccgtggcccccgtcggctggtctaactggtggctcgccagtctcccctgcacgccctgtgaactgggaggagataagaagagaaagggccaagtgatccagttctaagtgtcatcttttattatgaagacaataaaatctgagtttatgttcaaaacaaaaaaaaaaaaaaaaaaaaaaaaaaaaaaaaaaaacaaaagagagagaggagcaccccaaccaaaaaatacacacaccgcaacaggagagagacgccacaaaaaaaaaggacacacccggcgcggcgcgccggcgccaacccagcggcgcgccccaacaaaagagcaacgccaatactaatacacccaaacaagcaagacgcacaacccggcctactcaccacaagcaccaaaaagaccggcaaaaccacgcgccaccccgacggacacaaccaccatgcggaaaacaacaccaccacaaacatccggcagagcagcagccacccaactggggaagacacactcacaccgcacaccatcaccaccgccaccagggcgaaccacgaccaccaactagacagcaaaacacaggggcgcaaaaacgcgggcccgccccagccgaacaaccacaacacccccacaacgggaaacagactagcgcaaacaactacaccgcggcaaaan

SEQ ID NO: 11317 - DNA, 1126 bp, Homo sapiens
  misc_feature 1, 2, 3, 4, 5, 6, 7, 8, 9, 1121, 1122, 1123, 1124, 1125,1126: n = A,T,C or G
nnnnnnnnnccgaggtaccattgagttcaaccacatccttactgattttctgcctgctacatctgtcctgtgctgactgagggattttaagtctcctactacagtagtggatgcatctcttcacgggtctatcgtttttggcctcacgtgttatgatgctttgttgttaggtgcatgcacattaagtattgctctgtcttcttagataattgacctctttatgattatgaaatgcagactgtaatttaactgagatggttagaaaaggcctttcagggaagttggccaaacttctggcaaagctgatggggcaaaggtgaaggctgacaattgcctgcaccagaagcagccaaaaggtcccatcacagtgcaggtcatcaccaccggaaacctcagccctggctttgcattagccctagaataagccaatccaagcctgacccacaaatcctgtgagatctaggcccatccgtcctcttgtcatgatacttatcttccttccctaagctcaagctgccctggagagggcctaccgtctcttcctctaaccagagagctggtgcctacctcaaggcttacacattcctttccctctaccaaggatgcagttccccctgtgcaatgcctagtcaacttgctctacagccttggcttccatgccacctcttccaggcagccttacctgacgatcccatctcacttcttactgcatatcctgcgtatttcctccagagaagccaaacagttgagagaaatttgtcattatattgcaatttccttgagagcccatggatgtcatctgttttgttttcctgatgtaaaccatctgacaggttccctgggtcaggagtccgggagtggctgaactgggccatgactgcttagggtctcataactctgagccgctgtctttccctctggaatgcacttcaattacgctctgctggtcataacactttacatacgatggttatcttgcagtggtgggaatccatgtaaggcatctcagagaactttacacccagaagggtccttgaaatagagaagaggcaccgatgctcatgcccctggcttccccgggtcctgaatcagaagggccccctcacttcacagtgggatcnnnnnn

SEQ ID NO: 11318 - DNA, 1077 bp, Homo sapiens
aggtacttccaagactgagatttgggtgctatagcctttttgctttacaggaaagcaatggaaaatagaacaatttccttcagcgctggttgtagatcccgcgtacatccaggagctatggagaaagaagcagtctgatgtcatgcgctttcttctgagggtccgctgctggcagtaccgccagctctctgctctccacagggctccccgccccacccggcctgataaagcgcgccgactgggctacaaggccaagcaaggttacgttatatataggattcgtgttcgccgtggtggccgaaaacgcccagttcctaagggtgcaacttacggcaagcctgtccatcatggtgttaaccagctaaagcttgctcgaagccttcagtccgttgcagaggagcgagcgtggacgccactgtggggctctgagagtcctgaattcttactggcttggtgaagattccacatacaaactttttgaggttatcctcattgatccattccataaagctatcagaagaaatcctgacacccagtggatcaccaaaccagtccacaagcacagggagatgcgtgggctgacatctgcaggccgaaagagccgtggccttggaaagggccacaagttccaccacactattggtggctctcgccgggcagcttggagaaggcgcaatactctccagcttcacccgtaccgctaatataagtaaagcttgtaaaattcatacttaataaacaatttaggacagtcatgtctgcttacaggtgtaatgggtctgtaaactagtctggaaatgtttctgaatgcttgcaacttagaaagtacacggtcactatgtgccgaccatagtgggggaatcggttctaatacgataactttgctggcttaactaatagggagtggtgccggctaaccttcggtggctaaccggtaaaatttaaagggaaaggctgccgtattggggggtggagccgggatacagggagacgcggataaggcggaaggggggacagggaaggggaaattcacataataggggggggatctgttgcttttctcttcttgtgtctatc

SEQ ID NO: 11319 - DNA, 1325 bp, Homo sapiens
  misc_feature 1321, 1322, 1323, 1324, 1325: n = A,T,C or G
acgcgggggaggaggtggatttgagagatacctcccctccttctgctcagctgccttgcagtaattaaactctttctctgctgcaacacccctactgttctccgtgtattggcttttctgggcagcagaaaaaagcttggccagaccacaagcgggaatgcaaatgccttaaaagctgcaaacccagatatcctccagactccgttcgacttcttggcagagttgtcttcaaacttatggatggagcaccttcagaatcagagaagctttactcattttatgatctggagtcaaatattaacaaactgactgaagataagaaagagggcctcaggcaactcgtaatgacatttcaacatttcatgagagatgaaatacaggatgcctctcagctgccacctgcctgggacctttttgaagcctttgcaaaagtgatctgcaactctttcaccatctgtaatgcggagatgcaggaagttggtgttggcctatatcccagtatctctttgctcaatcacagctgtgaccccaactgttcgattgtgttcaatgggccccacctcttactgcgagcagtccgagacatcgaggtgggagaggaggatgctgatatgctaactggtgatgagcaagtatggaaggaagttcaagaatccctgaaaaaaattgaagaactgaaggcacactggaagtgggagcaggttctggccatgtgccaggcaatcataagcagcaattctgaacggcttcccgatatcaacatctaccagctgaaggtgctcgactgcgccatggatgcctgcatcaacctcggcctgttggaggaagccttgttctatggtactcggaccatggagccatacaggatttttttcccaggaagccatcccgtcagaggggttcaagtgatgaaagttggcaaactgcagctacatcaaggcatgtttccccaagcatgaagaatctgagactggttttgatattatgagagtgacacatgggcagagaacaccagctgattgaaatttggttctacttttagaagaatgcgacgccaacatcagacatcctaaggcaacgcagtccagaggaatacagcgtgtgtctttgtttgaatgcctatgagggtcacccctctatgcttgttgctgtgttgacctctcctatggaattcggtcggttgcgtagtaaatacaggcgacatgttgcacccagatcttttgtgggaacgcttttacttcccttgctgcgaacaaacaaaaaagggggccttaactcggcgccccaccttaaagccaataaaaaacggaacagaaacggnnnnn

SEQ ID NO: 11320 - DNA, 152 bp, Homo sapiens
  misc_feature 1, 2, 3: n = A,T,C or G
nnncacgcgaagacgtgttttgcgacccggcaccaccgtagtttttacgcccggtgaactctgtggaggtagcaggttttttagaaacaaggaaatggctgtgcgtgccctcgtggcatgtcacgtggcttgacactgccggctgattggct

SEQ ID NO: 11321 - DNA, 4635 bp, Homo sapiens
  misc_feature 4473, 4548, 4577, 4585, 4623, 4632, 4633, 4634, 4635: n = A,T,C or G
acgcgggggagtgtgtgtgagtgcatgggagggtgctgaatattccgagacactgggaccacagcggcagctccgctgaaaactgcattcagccagtcctccggacttctggagcggggacagggcgcagggcatcagcagccaccagcaggacctgggaaatagggattcttctgcctccacttcaggttttagcagcttggtgctaaattgctgtctcaaaatgcagaggatctaatttgcagaggaaaacagccaaagaaggaagaggaggaaaaggaaaaaaaaaggggtatattgtggatgctctacttttcttggaaatgcaaaagattatgcatatttctgtcctcctttctcctgttttatggggactgatttttggtgtctcttctaacagcatacagataggggggctatttcctaggggcgccgatcaagaatacagtgcatttcgagtagggatggttcagttttccacttcggagttcagactgacaccccacatcgacaatttggaggtggcaaacagcttcgcagtcactaatgctttctgctcccagttttcgagaggagtctatgctatttttggattttatgacaagaagtctgtaaataccatcacatcattttgcggaacactccacgtctccttcatcactcccagcttcccaacagatggcacacatccatttgtcattcagatgagacccgacctcaaaggagctctccttagcttgattgaatactatcaatgggacaagtttgcatacctctatgacagtgacagaggcttatcaacactgcaagctgtgctggattctgctgctgaaaagaaatggcaagtgactgctatcaatgtgggaaacattaacaatgacaagaaagatgagatgtaccgatcactttttcaagatctggagttaaaaaaggaacggcgtgtaattctggactgtgaaagggataaagtaaacgacattgtagaccaggttattaccattggaaaacacgttaaagggtaccactacatcattgcaaatctgggatttactgatggagacctattaaaaatccagtttggaggtgcaaatgtctctggatttcagatagtggactatgatgattcgttggtatctaaatttatagaaagatggtcaacactggaagaaaaagaataccctggagctcacacaacaacaattaagtatacttctgctctgacctatgatgccgttcaagtgatgactgaagccttccgcaacctaaggaagcaaagaattgaaatctcccgaagggggaatgcaggagactgtctggcaaacccagcagtgccctggggacaaggtgtagaaatagaaagggccctcaaacaggttcaggttgaaggtctctcaggaaatataaagtttgaccagaatggaaaaagaataaactatacaattaacatcatggagctcaaaactaatgggccccggaagattggctactggagtgaagtggacaaaatggttgttacccttactgagctcccttctggaaatgacacctctgggcttgagaataagactgttgttgtcaccacaattttggaatctccgtatgttatgatgaagaaaaatcatgaaatgcttgaaggcaatgagcgctatgagggctactgtgttgacctggctgcagaaatcgccaaacattgtgggttcaagtacaagttgacaattgttggtgatggcaagtatggggccagggatgcagacacgaaaatttggaatgggatggttggagaacttgtatatgggaaagctgatattgcaattgctccattaactattacccttgtgagagaagaggtgattgacttctcaaagcccttcatgagcctcgggatatctatcatgatcaagaagcctcagaagtccaaaccaggagtgttttcctttcttgatcctttagcctatgagatctggatgtgcattgtttttgcctacattggggtcagtgtagttttattcctggtcagcagatttagcccctacgagtggcacactgaggagtttgaagatggaagagaaacacaaagtagtgaatcaactaatgaatttgggatttttaatagtctctggttttccttgggtgcctttatgcggcaaggatgcgatatttcgccaagatccctctctgggcgcattgttggaggtgtgtggtggttctttaccctgatcataatctcctcctacacggctaacttagctgccttcctgactgtagagaggatggtgtctcccatcgaaagtgctgaggatctttctaagcaaacagaaattgcttatggaacattagactctggctccactaaagagtttttcaggagatctaaaattgcagtgtttgataaaatgtggacctacatgcggagtgcggagccctctgtgtttgtgaggactacggccgaaggggtggctagagtgcggaagtccaaagggaaatatgcctacttgttggagtccacgatgaacgagtacattgagcaaaggaagccttgcgacaccatgaaagttggtggaaacctggattccaaaggctatggcatcgcaacacctaaaggatcctcattaggaaccccagtaaatcttgcagtattgaaactcagtgagcaaggcgtcttagacaagctgaaaaacaaatggtggtacgataaaggtgaatgtggagccaaggactctggaagtaaggaaaagaccagtgccctcagtctgagcaacgttgctggagtattctacatccttgtcgggggccttggtttggcaatgctggtggctttgattgagttctgttacaagtcaagggccgaggcgaaacgaatgaaggtggcaaagaatgcacagaatattaacccatcttcctcgcagaattcacagaattttgcaacttataaggaaggttacaacgtatatggcatcgaaagtgttaaaatttaggggatgaccttgaatgatgccatgaggaacaaggcaaggctgtcaattacaggaagtactggagaaaatggacgtgttatgactccagaatttcccaaagcagtgcatgctgtcccttacgtgagtcctggcatgggaatgaatgtcagtgtgactgatctctcgtgattgataagaaccttttgagtgccttacacaatggttttcttgtgtgtttattgtcaaagtggtgagaggcatccagtatcttgaagacttttctttcagccaagaattcttaaatatgtggagttcatcttgaattgtaaggaatgattaattaaaacacaacatctttttctactcgagttacagacaaagcgtggtggacatgcacagctaacatggaagtactataatttacctgaagtctttgtacagacaacaaacctgtttctgcagccactattgttagtctcttgattcataatgacttaagcacacttgacatcaactgcatcaagatgtgacatgttttataaaaaaaggaaaaaaaacatttaaaactaaaaaatatttttaggtattttcacaaacaaactggcttttaaataaatttgcttccatattggttgaataagacaaaaacaattaaactgagtgggaagtgaataaaaaaaggctttaggtatcgattccatatttttcaaagccaaatatgtaaatgctaaggaaagtaaacaaagaggagattccaatcttgtaatttaatattgttattaaaactttaatgtatcctattctttaacatttggtgttaatataaaattacttggcaatgcttgacatttgaaataaacatttttctattgttttattgcaagtggtccaattaattttgcttagctacagtttggtcataaatcaagtgagtttaaagacactaccaagttgttaggtgcccagagaaaatttctcccttttaaaaaggccaggtgatttttcaaatgtaatcttgcccccaaagtaatatccgaatatctttttgacatgtctaaatatatatatatataaagaaatatttgttaacacaaaagcatttgatctatgtagataaatgctaatagatttaaaaagctaatattaacaaataccagaatacgtgaagttccatttttaaagtgtttgagcttacagaagagaaacattcattttaaatgaagtaaaaaatgccttgaaagtaattctttagatagttgcccattgattaaattccaaaaactaaatatgtttttagctttaaaattataaaagctgtcataaactttatatattatgaattttaaaatatgtttgagtctcctgcaatatagtttcatcccattgacatcaattaaaaataaccctaatatattatttttatatttattcctcagtgtgattgagtccaccaaaatcttaagctaaatttatgttgtttcatggtagctgttatgaaaatgggacccatctaaggagnaaaatcccattgttttctcaaattcaaatgccattctgtgttgacctagggtttgtttccccgttggattaaatngcttatggtggaccattggcctggtttcntcctttcntaatttcaaccccaggtttttgcccctttcccctaaantaaaccccnnnn

SEQ ID NO: 11322 - DNA, 1179 bp, Homo sapiens
  misc_feature 1157, 1159, 1179: n = A,T,C or G
acaggtgtctttttgattgaatgatttattttcctttgggtagatacccagtagtgagattgctaggttgattgttcattctatttttaattctttgagaaatctctattctgttttccataggggttgaactaatttgcattcccaccaacagagtataagtgttcccttttctctgcatccttgccaacgtctattattttatgactttcataataatagccattctgactggtatgagatggtatctcattgtagttttaatttgcatttctctgatgactagtgatgtggagctttttttaaagtttgctgggcacttttgtgtcttcccaaagcatttttaaatctctagaatgatctcacgtaattgcagtgctatattatttggagtagaaatttctaaaggcgaataatgctccttggacttaaagaatgtttgctctaaattagacagtatataaaaccgaaaatgctttcctgttcaaaagcatgaaacactataatctccatgcaccatgaagatatctttacacatttcttctcgggggctctggtttttgttctgatgtttgccattacaggtgaagcagcactgtgtaacaacaatttcctcagcgctataaaatggtaagccacacggcagtttgcttgtcataggagagtttagaaaagatctgctgggaaatttccacatcttcacagttctgtcctcctctgcaattatttattttcttttaatgtatcctaattgtatataatcattgctgtccaggcaaacttctctgttgtgtcccttctttcctttgtgtgtgtgtgtaatttagttattcatgctaagggaggctccctaaactccacctctttaaattaatagggatttttctcatcttaattctcatggttagaagatatgaatcaatataattctttcctaatacttacatgccttcgaaagagaagatttgacagttgcatgaagtgattggttttacacacgtaataccttgatgaagagagtttcttggttggtcgcagtggctcacacctgtaatcccagtactttgggaagccaaggtgggtggatcgcttgagtccaggagtctgagaccaatgtgggcacgatggtgaaaccctttctttacaaaaaaaaaaananaaaagattttaattaaagcn

SEQ ID NO: 11323 - DNA, 2135 bp, Homo sapiens
ccacttgtactcatcttcagcagtctagcatttatttcattagtccttgaggattcattaaatgatctgcaagaaaaccaaatgtccccacatcacaggttctgtgctctactctctgaccacttctctgagctgaggcagcctgcttggagtatgggcaccagcatggcttagctacttttaagataaaaagtggaggaaataaataggtagactaggtaaggcagaagagaaggctggcactttgggccctgacactagtgggcaccctgtggttctgggtgagatggaggacacggatggggtggggtgtgtggttggacacaatgaccagagctctgggtaccaagcagatccccatgtttgagattcaagggcacaaaggcctgctgtgaggcacgtgaacaaatgcaggactgagctccaggaacgcactctcccaactgtaccctcctgtgccagtgacagaaaaccagggaaaaacaccaagtattgtcagagacaaatgatgggggcaagagattggcggaattggaggtggttgactaccgcttgcttctagaatcaaggagaagctgacctaaatcaacctgctcttccacggaatcagtattctgagactgaacgccacctgacagatggaagactagctgcagtaaagtcagagcagaagccagggtgctagagtcatctgggcagtgtctggcttcctaactagataagtgggtcgggtcaattgcagagctgtgctcttccaaagttgtcacccatgaaccaggaccctcaggtggagcctctgaggtgccatgggttaggcttgtacacgactcacctgtgtgcggggccaggccccacccccctcaaccacggtggagcagagggggaagggaaaggcatctcacagacacagacatctacaccctcactctggggcagctttaggccaaaagccaacagagcacaaaggagagtgggcacttgggaaatcggtgcttaaattaccagccatcttcttgtctctaaacagagcctacaggcttcagcagtggaagtcgtttgtgaaggtctatagcagggcatgaggtggtgttaggtcaccctgaaggccagcttttgaccccgttgtgggaatcacggcaaatgccttactgggcccaggtacacagtggtgcccccagccccttccccatgtactctgcacactcaaaggcaagatgtcccgtgcaggggtctgaccccagaggaccacatttccacatgcatctcccctggatccacccagtggctgctgagcagcctcagtctcgacatagatccttcttgcaggcagcacctgctcctccggagtgctgtacctggggcccccataccagcattccagctgtgcagctccagctgggcagttcagatcttgggcctccagcctttgatgaactgcatgatcttcttgacctgcagcttggtgaggtggaagtcatctgccaggatgtcctcactgagctgcacaaagatgctaccatcgatgcgttctcgggcaaagaagctcaccacatcctctgagagcccgatgaaacgcagactgcgagagacctcctccagggagagtgcagacaggtcagcagggggctgccaggaggaggcatctcggactccaaagcctgtggctccatcccggggactggcaggaggcccttccaggcgcccttgggttagaaaaagtgctcctcccgcctcgggtccctgcagagcagctggtgacagtggggtggggacctggtgcagcaccaaaccttcaggctcaaaggccttggaggggccaagtggtgaaaggcggggtccaggcccaggtgtccccactgctctgggctcctgagaacgcagcagctcaggctctggagaactgccctgccccagctcaaagggatcgaagggctccaggactggttccttgcagtctccccaggtgcatgggtagcaatagagggagtaggtgtcggcgatggggagcctctgccactgcgggaacccgccccatcctggaggccaccgcagtagtaggagaggctgaagatgaaagaatgtaccggctgcagcttggggaagcgagggggaaccggggggctgctggagagccg

SEQ ID NO: 11324 - DNA, 523 bp, Homo sapiens
  misc_feature 521, 522, 523: n = A,T,C or G
ctccgagacggagtctctcactgtcacctgggctagagtgcaatggtgctatctctgctcactgcaacctgcgcctcccaggttcaagtgattctccggcctcagcctcctgagcagctgggattacaggcgcctgccaccacacctggctaattttttgtatttttagttagagacggggtttcactacgttggccaggctggtctcgaactcctgacctcatgatctgcccacctctgcctcccaaagtgctgggattacaggtgtgagcccctgtgcccagcctttttttatcttttaaaagtagcctgttccttcttttaaactaactctcatgtcatacaactaaaagaaataaagtgtctaaaaatatcttttcaatctatataatttaaaggtggtaggctttttatatttggtttgattaaggaaatattaataagccaattttgaaaattgttaattagtaaactcagagtcataattctctccagcacttcaaacattataattctttacnnn

SEQ ID NO: 11325 - DNA, 521 bp, Homo sapiens
aattaaagcggcggatggagatcaaattgcggggatgcaagttgttctccgtctataaatacgcctcgcccgagctgtgcggtcggcattgaggcagccagcgcaggggcttctgctgagggggcaggcggagcttgaggaaaccgcagataagttttttttctctttgaaagatagagattaatacaactacttaaaaaatatagtcaataggttactaagatattgcttagcgttaagtttttaacgtaattttaatagcttaagattttaagagaaaatatgaagacttagaagagtagcatgaggaaggaaaagataaaaggtttctaaaacatgacggaggttgagatgaagcttcttcatggagtaaaaaatgtatttaaaagaaaattgagagaaaggactacagagccccgaattaataccaatagaagggcaatgcttttagattaaaatgaaggtgacttaaacagcttaaagtttagtttaaaagttgtaggtgattaaaataatttgaa

SEQ ID NO: 11326 - DNA, 593 bp, Homo sapiens
  misc_feature 1, 2, 3, 4, 5, 6, 7, 8, 9, 582, 583, 584, 585, 586, 587,588, 589, 590, 591, 592, 593: n = A,T,C or G
nnnnnnnnnactctattagttgcttctctaagaaacaggatcattttgttaaattttttttttttttttaaagatgggaccacaggcatgcgccaccacacctggctaatttttttatttttttatttttgtagagacgaggtctcaccatgttgcccaggatgatgtcgaactcctgggctcaaggactcctccagcctcagcctctcgaagtgctgggatcacaggtgtgagccaacgcacctggccacactttgttaatttttgagatgtctgccaaatacccaattacgtattcataagaaatacagtttatctgtcattcttccaagtaaaaataatatttcatgaaaaaccaaataaaaataaggagaaacattggctagttcagctaacaactcaaataatccataagtgcttcttgagacatctcatcatatctcagaatgcggtgaaaacgcaatatgggtgcttcctatttcttcacacagaatattaaaaaggtgtatactcaaggattgagatgtgattaagtaatttttattccttcatcaaagacattcctaagtaaaactttttttnnnnnnnnnnnn

SEQ ID NO: 11327 - DNA, 1332 bp, Homo sapiens
ccacgcggtccgcttgacttcaaaagcaacaaccttaaaggccgtcatttcattagtattcctcattctgcatcctggcttgaaaaacagctctgttgaatcacagtatcagtattttcacacgtaagcacattcgggccatttccgtggtttctcatgagctgtgttcacagacctcagcagggcatcgcatggaccgcaggagggcagattcggaccactaggcctgaaatgacatttcactaaaagtctccaaaacatttctaagactactaaggccttttatgtaatttctttaaatgtgtatttcttaagaattcaaatttttatacaaatagttttattacaaatttgaattcttaagaaatacacatttaaagaaattacataaaaggccttagtagtcttagaaatgttttggagacttttagtgaaatgtcatttcaggcctagtggtccgaatctgccctcctgcggtccatgcgatgccctgctgaggtctgtgaacacagctcatgagaaaccacggaaatggcccgaatgtgcttacgtgtgaaaatactgatactgtgattcaacagagctgtttttcaagccaggatgcagaatgaggaatactaatgaaatgacggcctttaaggttgttgcttttgaagtcaagtcattcagtttgtgattagtgtttaaaaccctgaaaatatttaatacagaataaaaacaataagctcaaagtacatgtttcactataatagacaccatattcatgaacctgggtttggttttggcaacacataatttttggtttagaagtgaacaatgaaaacggatgtttcacattcaatatcctagtctttaaaaacctatgttaaaggacagcacagtctttcaaaggaagaaaactatgtaagctttattttaacagtggaagttaaactaaaccttgatctgcctaattgctgacatctatataaattactaatatatatatatatttaatttttgactatttttggaccatctttattccacaggaaaattgtgatttctgcaaaagcagctgcaaagtaccacacatagcagaaagacagaaatttatactggggggttggaagatatggctactgagtctgtaattccatttggaggttcaaaaaaccatttttacattgctattatttgtacagaccaagggacctaaattttgaaacagctagacagtgatataaacaaacatttatctctgggggtagaaaattaattataatacaagaatgaaaatgggcgaacagtatggaaggcacccacacctcctagcaccctttggttttctga

SEQ ID NO: 11328 - DNA, 2175 bp, Homo sapiens
  misc_feature 2157, 2158, 2159, 2160, 2161, 2162, 2163, 2164, 2165, 2166,2167, 2168, 2169, 2170, 2171, 2172, 2173, 2174, 2175: n = A,T,C or G
cgcgtccgtactccacttgaccttgcaatagtgtggatgaatatcagttttttacacaagctctgataactgtgcagagtcgagatgcagcctggtaccagctgctgatggcaccactcagcgaggatcagaggacagcactgcaggaggtgtacacactggcagagcaccgacggacggtggcagaggcaaagaagaagattgaacaacagggaggcttcacctttgaaaacaaaggagtcctctccgcatttaattttgggactgtgcccagcaacaactgaaggaaagaacatcagctgaccaaatgtcatcgctgcattttatttcacaagaggagtgtgagggtcaaggggatgaaatgaggggctgcttttagggccctcctgctgtgccagttaccatctggcattaggcagcacttttatctactctttcccctttgacctttgtcaccctgaaatatatattttaaacagctactgtaagtatgaaatgaaagaaaaacaatcattggacggaaaaggacaacccatatgttccaaaggctgaatgcccaaggttgttttagaggattggatagacttgcacgtctcaggtttttgccatgcagaatcaatggatttatgcggataacagtgccttctgttgtacatgaattatcagaaaaaaatttttggagtgcattgcaattttttttaaagcataaaacatatttctagatacaacataaaccttggttatatgtcaactattctgcattttactctgtgaatttattgttaggcagttactgcaagtcactctggtttcaaaatcttcacggctccctctgctcaccctgctgctggggggcttttttcaggggttgtattataaaatatgcactggctgtggtttttcataagatgttttgtggctttttaaagaagtgtcttactccctcttctctcatttttttctgccttgaaaaggggtggtatttcttttggggtcaacaaatacacatatcagtttcactcctaaccttgtaagttcaggactcattttcttggcagcaagtggcaggggctctttagtcactggagttaacagtaagtctgagtatattctgaataatgtaattatgcaattaattgataatcatacctaaagcacattgaacttctaagagacaggtgctacgtaagcacactgtctttctggatggggacttgtattttaaataacttatcattccagctatgttggactagggtccaaagcattttataatatttttttttaatctaggaaaaagacccaaacaaatctaacttcttgctttctcacctatttgaattttctcctacctaatttgtttgtgtctttattatagctcagtttgacttctcaaacttttcaagggttggggcagctgcacttttaggtggcctataggaaatattgcatatggagattacagtgtttttctgacctggttcaagaccagaacatgggtcatagggtttttattcagcaaaatgaaaacgtatcttcagaacttaacatattactggatgtgatacagattttgctttctgtgaaattgaaaattcacaaaaattcacagcttaaatttcccatcagtgactggaggaatttttttcaggtgcttcctatattaccatccctcatgcatattaactctttagaattttaggttaagtgatgtctatagaagtagcctggaaaaccatgagttttggagttcagtgaccccctgctttcctctgctcctcccttcccaaggcattgaagctgaatgtgccaactggcagttagaagcgaaagatggcattgggagaaattttagagagctttcaaactctttattctcatgttccacatggtctaattttaacataaataatatgccttcacactggattgtaaagcactgtgatttgagatccattcgtgatgtattgcctctgccgataacgggacagatttatgtgcttccatctgtttgacccgtattgctgttggtcccaggaccgaatgccggtccgcaaggagactttgatctaaaaagggggtccccaaaaaaaacaaagaatagctacacacagataaaaaaaagctctccgccattacatattgtctgagtaacannnnnnnnnnnnnnnnnnn

SEQ ID NO: 11329 - DNA, 710 bp, Homo sapiens
  misc_feature 1, 2, 3, 4, 5, 611, 612, 613, 614, 615, 616, 617, 618, 619,620, 621, 622, 623, 624, 625, 699, 700, 701, 702, 703, 704,705, 706, 707, 708, 709, 710: n = A,T,C or G
nnnnnctatatgcatgctctagcggccgcctttgtgatgtttatctgcacaattctcccttatcgtggccgcggccgaggcactgtccaactggatgctgccctggtggctgaaggcacacttcatgatgctgtccagggtcatcagggagacatgttgaaagagctccagacgtgagttttgggcaatgtgttcctcccatttgttcagcatcatccgaacactctcagacatcatggtgatgaatattttcagaatgctgatgttgaagccaggtttcacaatctggcggtgctttttccatttagaaccatccagggtcacaagtcctcgaccaacccaggattcaaggattttgtggctaacagcacttttgggatcttgtcttttcaggagaatcttggcatagtctgggtcatggacactgaagaacatcgtaaagggtccaacccacaagggaacagcacatgggtatttttccatcagcttatgatacacctcaaactcctttactgggtaaaactccttgtggccatagaaccagtgggcagggggtgcaggaaacaggtgcagggctctgatcatccatctcctcctctggtacctgcccnnnnnnnnnnnnnnnggtacgcgggtgaaaaaaggctctaacatgagttgatcttgagcccaatgttgaacagcttcagaccttacaannnnnnnnnnnn

SEQ ID NO: 11330 - DNA, 2632 bp, Homo sapiens
  misc_feature 1, 2, 3, 4, 5, 6, 7, 2631, 2632: n = A,T,C or G
nnnnnnngattcctgttcgtttgccggtaccggtccggaattcccgggtcgacccacgcgtccgggggaaaagatggcgattctgtcttataacctcctgggtcccatccagggacctaagagaaagtagcaggggaaggtttggtgtgtgggggtgggaggtgggcagaagtcttggggaggaatgggcaaaggaggttctcagtcaataaaaccaaagttctttaggttgggaaaaagcacatggtggagtgagaagtgtggaggggaagtgggaaattggacacatttgctattgatttgaattaagctagaaattaaggttggataaattcttccccttgaaggatctggaaagacaaggcagtaatgtgtcctcatgggtgcctgttaggaggtgggggtagtttaaatccgtttgtttagatgggaaagggaggaacttaagagggaaatccttttcctcttaaggtttatttccttccaagcagtcatatgtcatctgttacagtttgagaagagattgctgattaccccctgtcttttcctcatctaagtctttaattgtatttgtttaaagggaagagtgtggtgagaacagccgtcatgtgtgttgcattttctccaggtgaattggggcagagctgatctattttttaaccacagcaataaccatacgttggggtttgagtgcaccttgggaggggtgggaggacagacattttagccagaggctgtttcaaacaaaaccaaaaacctaagtagagcattacaggcctctgtggctgctgcgtttctgtagaaagcaacttattttattgacttttttttttaaggaaaagaaataaaaagaccccagcaagcaaaaacatttaaaaaatgattttttttcctcctacttaagtggttctttctccctttgctctacttttggagaatgaacttaacatcccggcttcttttgttaagccatagctgaccttaatctgtggttagtttattaaaataattaaaaatactttctaagaagagatatttttgatattaggactgatgttgaaacatataggggcaatttataaaaaggtagttagagaaatatattttagtgaactataaccacagagcacagatgactcccaatgagctgatctgtctttaggtttctccctttccctgacccttccctgttctctaggggctgggagtggggatgcggacacagtagggggagctccttcgcattttgcacaaagcacaagtctgaacagcctatgctctggccagagccatttctaagagctttaaaccggaagacctatcctgggccaattttcctttttctttatatttttttccgggaaaaaaagtcaactatgcaattgtatacactcccgggtgcatgtgaagaaggggaataagtgtacttatgtgtccagagtattaactggggctgtttttctgtgtttggatttctcttttgaggtatgtactcataacccatcccttggaacgtaatccccacatttgatctaaagcacttgagcgtgcatgcatgtgcgtgcgtgcatatgtgtgtgtgttttcctcctcggtagccagtcaagattgtccttgttggaaatgctcacggtttataaaggttattttctcctcaacaaactcagaagtcacctattttccaaatctgatttaataatttcctatggctattaattcttagggttttctttgaaaatagatttgtgttaaggaagcagtgagattccaaaggaagggatgtgtatatgtctaggcaggtctggaacctggtatgagatgagcactcccctaagttgcaaaatttaagggttactataaaactcattaatcaagatactataaaaaatgcagtatttaaaaaaattaatgcaaaaaatttatgttggataaaatagcgaaatcttacaggatctgacaggactgagattaggaggagggaagtgaggctgaattgaataagtatggggatgaatccttcttatttaaatttttgatacattgtccatcatagactttttacattaattgtgattttttaaaaatgttgcattaaaatagtatttatcttggttactgggttttttggcactccttaaattttgtgcccaaggtgagtgctttgctcacctcaccctagttacgtccctgtttctgtgatttgaacactagcgagaacaccactgtgtgcgcctccacccccatcacacaccaaacaacaggtggctcagacaccctgaatttgcacagctcacctagctttcctaatttaggccttcatatcatagaatggtggcctggaccaataggaatgaaaacagaccaggggttttcccagagaataaagccggaaaagttctgattctccaaacaaaaaaacacacaccaaccacaaaaaggggggggcgaaaaaaaccccgggggccagctccagccccggcttctgtaaaagggccagggggcgaaaaagaagacggcggctaacagcgcgaacacggctgggcgcggaagccaccggggcacggacacccgacgcgacataggttgggacgcgtcggagctagcaaacagacacaccgcgtagcgcaacann

SEQ ID NO: 11331 - DNA, 2542 bp, Homo sapiens
  misc_feature 2473, 2474, 2475, 2476, 2477, 2478, 2479, 2480, 2481, 2482,2483, 2484, 2485, 2486, 2487, 2488, 2489, 2490, 2491, 2492,2493, 2537, 2538, 2539, 2540, 2541, 2542: n = A,T,C or G
ggagtcgacccacgcgtccgaaggaaggcagcaattgacccgagggcgacctccccattgggaccaaacggaacttcgaaagtacgctgaggcgcctaccggatcggcacccttaaacgccaaacccagatcatcgaactactaacttgggttccagattttttaatctccacctcggctatcttgagcaatcgggcacttttaaaatggagaaatgagtgaatgtgggtgatctgcttttatctaaatgcaaataaggatgtgttctctgagacccatgatcaggggatgtggcggggggtggctagagggagaaaaaggaaatgtcttgtgttgttttgttcccctgccctcctttctcagcagctttttgttattgttgttgttgttcttagacaagtgcctcctggtgcctgcggcatccttctgcctgtttctgtaagcaaatgccacaggccacctatagctacatactcctggcattgcactttttaaccttgctgacatccaaatagaagataggactatctaagccctaggtttctttttaaattaagaaataataacaattaaagggcaaaaaacactgtatcagcatagcctttctgtatttaagaaacttaagcagccgggcatggtggctcacgcctgtaatcccagcactttgggaggccgaggcggatcataaggtcaggagatcaagaccatcctggctaacacggtgaaaccccgtctctactaaaagtacaaaaaattagctgggtgtggtggtgggcgcctgtagtcccagctactcgggaggctgaggcaggagaatcgcttgaacctgagaggcggaggttgcagtgagccaaaattgcaccactgcacactgcactccatcctgggcgacagtctgagactctgtctcaaaaaaaaaaaaaaaaaagaaacttcagttaacagcctccttggtgctttaagcattcagcttccttcaggctggtaatttatataatccctgaaacgggcttcaggtcaaacccttaagacatctgaagctgcaacctggcctttggtgttgaaataggaaggtttaaggagaatctaagcattttagacttttttttataaatagacttattttcctttgtaatgtattggccttttagtgagtaaggctgggcagagggtgcttacaaccttgactccctttctccctggacttgatctgctgtttcagaggctaggttgtttctgtgggtgccttatcagggctgggatacttctgattctggcttccttcctgccccaccctcccgaccccagtccccctgatcctgctagaggcatgtctccttgcgtgtctaaaggtccctcatcctgtttgttttaggaatcctggtctcaggacctcatggaagaagagggggagagagttacaggttggacatgatgcacactatggggccccagcgacgtgtctggttgagctcagggaatatggttcttagccagtttcttggtgatatccagtggcacttgtaatggcgtcttcattcagttcatgcagggcaaaggcttactgataaacttgagtctgccctcgtatgagggtgtatacctggcctccctctgaggctggtgactcctccctgctggggccccacaggtgaggcagaacagctagagggcctccccgcctgcccgccttggctggctagcttgcctctcctgtgcgtatgggaacacctagcacgtgctggatgggctgcctctgactcagaggcatggccggatttggcaactcaaaaccaccttgcctcagctgatcagagtttctgtggaattctgtttgttaaatcaaattagctggtctctgaattaagggggagacgaccttctctaagatgaacagggttcgccccagtcctcctgcctggagacagttgatgtgtcatgcagagctcttacttctccagcaacactcttcagtacataataagcttaactgataaacagaatatttagaaaggtgagacttgggcttaccattgggtttaaatcatagggacctagggcgagggttcagggcttctctggagcagatattgtcaagttcatggccttaggtagcatgtatctggtcttaactctgattgtagcaaaagttctgagaggagctgagccctgttgtggcccattaaagaacagggtcctcaggccctgcccgcttcctgtccactgccccctccccatccccagcccagccgagggaatcccgtgggttgcttacctacctataaggtggtttataagctgctgtcctggccactgcattcaaattccaatgtgtacttcatagtgtaaaaatttatattattgtgaggttttttgtctttttttttttttttttttttggtatattgctgtatctactttaacttccagaaataaacgttatataggaaccgtcaaaaaaaaaaaaaaaaannnnnnnnnnnnnnnnnnnnncataacccatcataaattaaacacaaggtgttgaacttcttaannnnnn

SEQ ID NO: 11332 - DNA, 4733 bp, Homo sapiens
  misc_feature 4657, 4658, 4659, 4660, 4661, 4662, 4670, 4697, 4698, 4699,4700, 4701, 4702, 4703, 4704, 4705, 4706, 4707, 4708, 4709,4710, 4711, 4712, 4713, 4714, 4715, 4716, 4717, 4718, 4719,4720, 4721, 4722, 4723, 4724, 4725, 4726, 4727, 4728: n = A,T,C or G
  misc_feature 4729, 4730, 4731, 4732, 4733: n = A,T,C or G
ccacgcgtccgggccggcgccggggccctacacgccagacctggctcggggtgggagtgcagaggcaaccaaaaaggaacccacacctccctccagggcccggggcgctgtcagacggggcagcaaccaggagattccctgggcctgcaggaagcccttccgcggaccgaaagattgttccccattttggagatgaagaaactgagactcaaagcagctgagtgaccttcccaaggacacacactgaactgggcggtgatcaggatctgaatgcacagggcgggtgttcagcgattgtttactacgttgaacgtgacctccaggaaagcagttctggccgagatcccctgacaacgcaaagcaagaagtaacgtggaaggaggctccccaagctggctggccattttgctgctgtgtgtggaggtgctgtcagtggcatgcccaaacccaaagctggaagaggaataaattacaagtggtcaaggttgcatccttttgagcccaggacctgcttgtaagccgagagggttctctggccctaatctagccaagcaccatggagagaatcagtgccttcttcagctctatctgggacaccatcttgaccaaacaccaagaaggcatctacaacaccatctgcctgggagtcctcctgggcctgccactcttggtgatcatcacactcctcttcatctgttgccattgctgctggagcccaccaggcaagaggggccagcagccagagaagaacaagaagaaagaagaagaagaagaagaaggatgaagaagacctctggatctctgctcaacccaagcttctccagatggagaagagaccatcactgcctgtttagttaggcaggaagcagaggtgtttcctttctggggctaagcctccttctgaccacacacagacatttcaggaacccctgaaataatgcactatgtccatgtccacagagtaactactcaaccaaggaacaaacctcagactaagtgtcccagtggagggaagtcccagggaccacgtggacaattcttggatactgtcttggcagctatgtgtccaatagcaatgctccttactgcagacccaggcatgcctcccacctgtctctggcataccccacatgcaaagcacaaagaacatttatccatacatctcaatatggttcccaagtgtgtgcacatgcacgtaacacacacacacacaaattcaggtagcaggtacgtgggcaagtatattctgctcatcaaatggtcattggctatgtactttgtgcagggaagtacattatctacagtcacaaaaatgtctcatgggaaagccttgccagattcagacacatatatacaatttcctaaccagcaaggcccccatacaccatctattccataaaccactcaggttacagatgcatgctttcctatttctaactctacacataaacttttactggaagtactcataattggacattccagcaacctgctacagtccccacccttgtgtgtcttgatacagacacaccaagtttctgtgcctctgacccctcacctgtgccaagatgtttaaagtgtgatggttcaaaattcattgaaagctcttttcttgtaactcatgacaaagtccgtcctcattgccactgagaggtgtttaatgtgatccaagacctctctgtgaaacattacccccgcaaaccactcagcaaagtgcctttctccaagcaagaacaaagagctcttggtggtgactgctagaaaattatggaagcccactcatttatgtcagtggactgcaactgtgtacctgtgcaatgtttacagatggaaagggtgaggagatgctacacctgagctaggtatctcctatataaccaaagtttccagcagggaaggaactagacaatcatcagtgcagtctcacagaaggcaacactggaagtgatgtcataaggttgtgatgtgtgcacggtatggcacaggtgggatgcagaggtaacagagtttaaatgaaagtaggatgaagctataaagaggtttatttatatttatattgaagctcaggcaagtgccttgcacacagtaggtacttataactaactgtggttactgttggatatgtgatgttgttaagggtaagcttgtaatacctcaccagttctccccgagtgatcttctcttctaagtgagcccactaattgctgcaatggatgaaattgggtgtttaatgctggagagcacatgtaggtgacacatgtgccttgaggtatgtgaggacatgtaaattagatccacagtgagctgaggagggctttccccgccagagtgaggttgggaagcagagttaatccacttataggatgaactgcttggtatttttattgtattgtgactgtattacaaagatggacaattcactccttgggagcaagttatgctctagaagtttatttacaaatatgctgggcagctctcttgaaatattttcccaaggaagctattctacacagtggcaaaattgctatctaattaataatgtagctaaactatgatatttatagtagcaaaaaactaaattctataagattgcattaaaggaaagatatattctatttgctcacttgggctgcttggtactcacctgccctccaggtgtactttaggcctgtggagggtgggcatttagtggtgacccttgcaccagggttttctaacagatgaccctgtgaatcataatttaaacctgcatatattttatagccagtcacatttgccctctcaccctatatggccataaactgcctaagcactcaggcctcccactcatcaacccctttgaccagagaaagaagcactctggttctctatccccttgtcacatagagagtttgtcatggggcctctggctgtgcccttcacataacagaatgacttgccatctgcctgcaccaaacccagggatgtggaagacatctccccacaactgccactgctcaccaggacaagctgcccttcctgtctccacctctcagtccccctagaatggatggctggggagaggtggaggctgacagctgagacgtagtgtcagatatgatctaggagggcggatcaccgggatccgggaccatacaagtaacatggtttccatggcaactgcttgctcctttgaattaagacagcagtcagttgtcattgccatgacaaggcctctatctccaggcacaatgtccctgctgtctcctaatccaatggacttgctctcaccccagggatgaaacacccagaaactcacttctcagtcacttccacagccgatgactcagaagagccaaacccagaatggggcctctcttttccccatcacagactcccctgacaacctttcctggcgtaactagaggagtcccagtgcaggataggccctaaacgttttgttaaataaacaggtgcatgaaaggagcctaaggccattgttgatatccactctcttctttccacttccttctcatctttttctccatgttttatgcttctctgattccctcttctgcctgcaccagaccagccccagccctttattcctctccattttcactccttccagcctctgtccctgaactgccactggcaacccatgggacctcaggaccagagactgcttgactcatctggggagggtaagttcacgggggacaaaaaaatgattcctaaagaagaggcttcctagaccagcacaggctcgagaaagacatcccctaggcctggacttctgagcagctttagccaggctccggacggcagccagaggaggcctttccccattgctcctttccccattgctcaatggattccatgtttctttttcttggggggagcagggagggagaaaggtagaaaaatggcagccacctttccaagaaaaatataaagggtccaagctgtatagtatttgtcagtatttttttctgtaaaattcgaacacacacaaaagaaaaatttatttaaataaaatactttgaaaatgaaaagtcttgatgtagtcagatggttactctcttaacattaggtattacccccactcagacatcactcagaaatgatcaatgcagggactctttctgtgacacaaatgtcccagccctccctggtcaccgccttcgccatggtagagtcgtaggtctgaggatgaggaatgtggctgtctcacccttgcttgcaaaacagatggccttggagaccagactccctcaaaggtgccagctacaggaaaaatacactgatgttccttggcaacacttacagaactttccatcaatgaggtccatcaatggcttcttaaaggaaaaggggggaaatagcaaaaacctaaggaagaatggacctttgagttaaatccagtgtttgttgggaaaggagggatcaaaaacctctatagtagccactagggcaaaaactgtgtgtatgtgtgtgtgtatgtgtgtgtacactgttcaatatggttcaatatggtaccaatagccacatgtgactatttaaattcattgcaatgaaataaaattaaaggtatactagctcaaaaaaaaaaaaaaaaaaaaaaaaaaaaaaaaaaaaaaaaaaaaaaaaaaaaaaaaaaaaaaaaaaaaaaaaaaannnnnngggggcgncccccaaaaaaaaaaaaaaaaaaaaannnnnnnnnnnnnnnnnnnnnnnnnnnnnnnnnnnnn

SEQ ID NO: 11333 - DNA, 914 bp, Homo sapiens
  misc_feature 1, 2, 3, 4, 16, 34, 40, 59, 111: n = A,T,C or G
nnnnaagccctcggtnctaatggaatgcctgggnattcantaaagtgcctggggaattnacaggccgtgagcccactgtgccctggcctgcccatctttatcctgaaaaanagagatagatttgtacttggaagtactatataccatacccaagaagacagactaaatatggcttcattgcaataaaaattttgataaattccattaactactgtgtatcagttaaaaatttatgcagtagctcaagatgtacctaataaatgccataaaaattaaggtgcttgccctgctggaaaaggctttccagctccatctaattaaattcagcagcattcattagatagctgttaaattctaccttctctttcatatctcccttctttgtattcccaaggtgagggttgagggttttgtctttccttaatattctgtgacctactgcttatgcttccattatgggtgattagaagctttatgttgtagaatgtgtatatttgtgacctacaggacatcttagttaggggatgtattttatctaccttgctatccattgcatagcctagtacacagccacagatgttcaatgtgatgaatatttctggctttttataaatagcccctttccttgttctattagagacaactattgcccatctaatcacaggagattatgtagcaccctttgtgtctgaagaaacttggggaaaagttacggtgtactcaatcagcttcattgctgcattgcaaagccccgcaattgcagttgttttagcaagggatagatggagaagatgaatgtgctttacaagtcaattactactgttcagatcatcttaccaaagggtggaggaagtggccgaggcccaaaaggtccgcagagctgaggtggtggtccatatcgaatgggtggtggt

SEQ ID NO: 11334 - DNA, 260 bp, Homo sapiens
actcgaagtggaaggactttcattttgagaagataccatttgatccagcagaaatgtccaaatgatatcaggtcctcaatcttcagctacagggaatgagtaactttgagtggagaagaaacaaacatagtgggtataatcatggatcgcttgtactcctcagcagagctggaggacagcaaggccaggaccagccccagcatgcagagcgctctggcagccatgaccaccgtgggctccgggacgcagctcaggactcc

SEQ ID NO: 11335 - DNA, 1201 bp, Homo sapiens
  misc_feature 1, 2, 3, 4, 5: n = A,T,C or G
nnnnnattaatgtatactttcagatattctcctggagcaagtatccaaccctgtccatccccacactccatataccgcaacatgtacttttgattctttgtccaaaagtagcaggtcaagacggtgagcaggatggcagtacaggtgcctgcagagatgcccactttcagccagaaatctatggttttgcagatggtgactctctgctcaggcagagaaatgccaccagagcatagcttgggttctcgccacacgtaagtagtcttctggatcccagccacacagctgctgacgatagcatggtagtcagccactgagcagagcgggcaagcagccgcgctctcccacaggaagtggaagttgcagccatcacaggtcccatctgagcacgttcctggcagcagcaaacttccagggacagttttctgtggactgcacctgacgcggatggtggttgatctcccagaactgcaggactgggtcacatcattggacctataaaagaagatcacgtccggtattcccaaggactccaggtggaaaagttcagctggggaggtgattccatccagagtcatatctgttgtcaccccaataagtcgatcagcaaggctgacaggctgtgaggaaaccccggccttgtagcctgtcacctctggggggatgatgactgcctggcagacgtaggctgtgatagatttggagaaccctgactcaccctcaggaatccggaggtcagtgacattgtcggtgcacacagacattttcctaccctggtttccacagagactgagggtaaagtgatggaagtatttcagccctttggaagtgaagcttggccctccagcaagagtgacagtgtttgccaaagcggagaagttgtagttgaaagtcctggtcggagtgttgcgtgagaaggtgcaatcgttgtagcacagagagtggatcttgttgttcttggtccctggaccacagggcacacaggcctggacaccataaggctggtgggctttcagaattgtgttagtggggcaggagtggcaggttcctgaatctcggtcaatatagtaaccagcaggacaagaggtgcaggaggagcccacatcagaggcttctagggcacagggacggcagtaggaggccacgccattcataacattggtgacattgatggagtagatcttggcaacgtcattggtgt

SEQ ID NO: 11336 - DNA, 4327 bp, Homo sapiens
  misc_feature 1, 2, 4326, 4327: n = A,T,C or G
nncgctttccaatactcgggactggggaacccgggagaatagaagcaggcaaggaccgccgtgggcacggggtcagtgagacagggtcctgctcgcggcgtcaaggaggagcgctgtgggtgggtagggtaggcgcgccccctcggccttgcctttccaaccactcttttttgcacgccaccgggtgtccccagcgcagccaatcggcttccgaagtaggtgagttgctgcctgaagagaaaagacaaactccagtatctttcattccattggccagacgcgccattccccaagtgagttctgttctccaaccaaagtgctggattccaagggactggaagggaaagtccctaaaaatcacgagttcaggcgtctgagacttggtgggaacggaccctcctcttagtgcccaagcctgttctaatttttaaaaactgatgtctattaagacccaatgttaactttatgaaaatggttcctaaggagattcacatctctgtgtccgaattctgtgtgcagcaaacatcatctcaagtgcgttttcccaactacgcttctttccaggataaaatactctaagtgacaaatgttgagtacattatcagctggagctctggagcctttgcttcctcaaatacgagcgggacctgcgttgagcgctggattccaggccgagtgctggcgaggcgcgcagttctctgctgtttaaaaagtatccctgtgctttgaagatactgctataatttgaaaatttgaaattagtgtttcagctgaaccatccgttcatcttcaagccatcatgagctgtaagaagcagaggtcacggaagcactcagtcaatgaaaaatgtaatatgaaaatcgagcactatttttctccggtctctaaagagcaacagaataattgcagtacttctctaatgaggatggagtctagaggagacccaagagccacaactaatacccaggctcaaagattccattcacctaagaaaaatccagaagaccagaccatgccccaaaataggacaatatatgttaccttgaaggtaaaccacaggagaaaccaagatatgaaacttaagctcacacatagtgagaatagtagcttatatatggctctcaacactctccaggctgtcagaaaagagatagaaactcaccaaggccaagaaatgcttgtgcgtggcacagaaggaatcaaagagtacataaaccttggaatgcccctcagttgtttccctgaaggtggccaggtggtcattacattttcccaaagtaaaagtaagcagaaggaagataaccacatatttggcaggcaggacaaagcatcgactgaatgtgtcaaattttacattcatgcaattggaattgggaagtgtaaaagaaggattgttaaatgtgggaagcttcacaaaaaggggcgcaaactctgtgtttatgctttcaaaggagaaaccatcaaggatgcactgtgcaaggatggcagatttctttcctttctggagaatgatgattggaaactcattgaaaacaatgacaccattttagaaagcacccagccagttgatgaattagaaggcagatactttcaggttgaggttgagaaaagaatggtccccagtgcagcagcttctcagaatcctgagtcagagaaaagaaacacctgtgtgttgagagaacaaatcgtggctcagtaccccagtttgaaaagagaaagtgaaaaaatcattgaaaacttcaagaaaaaaatgaaagtaaaaaatggggaaacattatttgaattgcatagaacaacgtttgggaaagtaacaaaaaattcttcttcgattaaagtagtgaaacttcttgtacgtctcagtgactcagttgggtacttattctgggacagtgcaactacgggttacgccacctgctttgtttttaaaggattgttcattttaacttgtcggcatgtaatagatagcattgtgggagacggaatagagccaagtaagtgggcaaccataattggtcaatgtgtaagggtgacatttggttatgaagagctaaaagacaaggaaacaaactacttttttgttgaaccttggtttgagatacataatgaagagcttgactatgctgtcctgaaactgaaggaaaatggacaacaagtacctatggaactatataatggaattactcctgtgccacttagtgggttgatacatattattggccatccatatggagaaaaaaagcagattgatgcttgtgctgtgatccctcagggtcagcgagcaaagaaatgtcaggaacgtgttcagtctaaaaaagcagaaagtccagagtatgtccatatgtatactcaaagaagtttccagaaaatagttcacaaccctgatgtgattacctatgacactgaatttttctttggggcttccggctcccctgtgtttgattcaaaaggttcattggtggccatgcatgctgctggctttgcttatacttaccaaaatgagactcgtagtatcattgagtttggctctaccatggaatccatcctccttgatattaagcaaagacataaaccatggtatgaagaagtatttgtaaatcagcaggatgtagaaatgatgagtgatgaggacttgtgagaattcagtctactggatttaagggaatggcttatggagttgttatttcataggcattgaaaatggttttctaaactccaaaatggtcatcttatcaataataataatattgaccatttcctatctgccaggcatttttctaagcacatgaagaaattagtcctaacaacactatgagatggactataacttgcccaaattttttttttttttttgagactgagtctcactctgtcgcctgggctggagtacagtggtgcgatctcagctcactgcaacttccacctcccaggttcaagcgattcttatgcctcagtctcctgagcagctgggattacaggcaaacgccaccacacccagctaaattttttttttttttttgtatttttagtagagacagggtttcaccatgttggtcaggcgggtctcgaactcctgacctcgtgatccacctgcctcggccttccaaagtgctgggattacaagtttgagccactgcacctggctaacttgccctattttaaagtcaagcaatgggaagaataacaagattatatagtaatcagtttcatgacactaaaagtcatatagtcatagggttttttcatctttcatatctttgcctaaattcatttgctacagtgcaggaaccaaaacttgttcatctcatgattccctacatctgacataaggaaagtaagtgctcagaaaaatgtgcaggtcaataagttgcaaaagttggggctgcaattaatgctaacataagagctaaatgcttgattagaaatgatctcaaaaccttttagaatttccaaaatcttcatattactgaaactgtcggaatatatgggtcttgaaattcagaagatgatagtcactcttcccatatttataggctattaaggcaagggatatcttaaacatcatattactttatttagatttctactactccaattattaatgttatgtatttctcattgttttacttcttcatggtattatgaagactatatagatgattcaaccaagcctgcaaatctccctcttgtggaattccactggacccaatctgttttccatttccattgcaatactactaaagccatacaatatcaagcaccctccctctaggtccagggactatcacagaagaagcaggcatgtaagattttaaggactggtttcgaggggtcgagtgtaggaaaacagcctgttgcattgtaagagtgatgtcatcttgaagagcagctggcatgatgactgctgtttgactcctgcataccaagatattctgcagcaatgtctttaaacagtgccggtagtacagataacccctcataaagatgcttatctaacctccccagtgttcaggtgtttcacaagaaagtctgagatatgactagctacacgttttgccaaaaatgcttgttatataaagggtacttttgggagggtgagtgccgccatttagtggctgctagaaacattgcttctgtttgtaagttcctattaaatgtttctttctgagaaaaaaaaaaaagggggggttaaaattcctgaaggggcagttacgtaccgtttttgtaaggggccaaaggggtaagagagggggttaaggtgggaacggtggttggagaaccttgggggatggacccaaacgaaaaagtgttgattggatggtaaaaacnn

SEQ ID NO: 11337 - DNA, 429 bp, Homo sapiens
  misc_feature 423, 424, 425, 426, 427, 428, 429: n = A,T,C or G
acgctggttttgcatcttctggagacgctcgttgccctcgcgcttctcctcggccaattcgcggaagaagtggctcacgccttccagagccacatcatcgcggtcgaaatagaagcccagagagaggtaggtgtaggaggcctgcaggtaccactacatcattgcaaatctgggatttactgatggagacctattaaaaatccagtttggaggtgcaaatgtctctggatttcagatagtggactatgatgattcgttggtatctaaatttatagaaagatggtcaacactggaagaaaaagaataccctggagctcacacaacaacaattaagtatacttctgctctgacctatgatgccgttcaagtgatgactgaagccttccgcaacctaaggaagcaaagaattgaaatctcccgaannnnnnn

SEQ ID NO: 11338 - DNA, 430 bp, Homo sapiens
  misc_feature 1, 2, 412, 413, 414, 415, 416, 417, 418, 419, 420, 421, 422,423, 424, 425, 426, 427, 428, 429, 430: n = A,T,C or G
nnagctccccgcggtggcggccgaggtacgcggggctctcttccacaagcacaacccttcttcagacgtccatatacacttctcccaaaatcctgtgcttaacacattgttactgagcacacaggcgtgctggggcaagcgacgcctgggaatatgaagcgaacgccacacactagaacgcgccctgggagctggcctccggtgggggacgcaggtgttgaagacataaccgcatgaccgagaaacctcagttttgctctgaaggccttcaactgcccggccgaggctcacccacaccaaggggaatcccttctcttaaagtcaactgatggtagatgtcaaccacagctacaaaacaccgtcacagcaacacctgggttagcgtttgattgaataaatgtgactggagccnnnnnnnnnnnnnnnnnnn

SEQ ID NO: 11339 - DNA, 544 bp, Homo sapiens
taggttgttcccgtgataatgctatgtgacattgctgttctcttctattcaccagtttgccttcctaataacctcttctcatatacattctttaggaaaagaccagtgccctcagtctgagcaacgttgctggagtattctacatccttgtcgggggccttggtttggcaatgctggtggctttgattgagttctgttacaagtcaagggccgaggcgaaacgaatgaaggtggcaaagaatgcacagaatattaacccatcttcctcgcagaattcacagaattttgcaacttataaggaaggttacaacgtatatggcatcgaaagtgttaaaatttaggggatgaccttgaatgatgccatgaggaacaaggcaaggcggcaaggctgtcaattacaggaagtacctgcccgggcggccgctcgatgactgtattctctcccttggatacccctatgcctacatcatattccttacctcttttgggaaatatttttcaaaaataaaataaccgaaaaattaacataaaagtcttattcact

SEQ ID NO: 11340 - DNA, 1524 bp, Homo sapiens
ccacgcgtccggacagactttacccgaggtaaaggaccactcaaaaatacatcagatgtcatcagtgctgccaagaaaattgctgaggcaggatccaggatggacaagcttggccgcaccattgcagaccattgccccgactcggcttgcaagcaggacctgctggcctacctgcaacgcatcgccctctactgccaccagctgaacatctgcagcaaggtcaaggccgaggtgcagaatctcggcggggagcttgttgtctctggggtggacagcgccatgtccctgatccaggcagccaagaacttgatgaatgctgtggtgcagacagtgaaggcatcctacgtcgcctctaccaaataccaaaagtcacagggtatggcttccctcaaccttcctgctgtgtcatggaagatgaaggcaccagagaaaaagccattggtgaagagagagaaacaggatgagacacagaccaagattaaacgggcatctcagaagaagcacgtgaacccggtgcaggccctcagcgagttcaaagctatggacagcatctaagtctgcccaggccggccgcccccacccctcggggctcctgaatatcagtcactgttcgtcactcaaatgaatttgctaaatacaacactgatactagattccacagggaaatgggcagactgaaccagtccaggtggtgaattttccaagaacatagtttaagttgattaaaaatgcttttagaatgcaggagcctacttctagctgtattttttgtatgcttaaataaaaataaaaattcataaccaaagagaatcccacattagcttgtttgttagtaatgctctgaccaagccgagatgcccattctcttagtgatggcggcgttagggtttgagagaagggaatttggctcaacttcagttgagagggtgcagtccagacagcttgactgcttttaaatgaccaaagatgacctgtggtaagcaacctgggcatcttaggaagcagtccctggagaaggcatgttcccagaaaggtctctggagggacaaactcactcagtaaaacataatgtatcatgaagaaaactgattctctatgacatgaaatgaaaattttaatgcattgttataattactaatgtacgctgctgcaggacattaataaagttgcttttttaggctacagtgtctcgatgccataatcagaacacactttttttcctctttctcccagcttcaaatgcaaattcatcattgggctcacttctaataactgcagtgtttcccgccttgggcttgcagcagaaaaacctgacaacatagtgtttgctaaggcagtaatttagactttaccttatttgtgattactgtagtgattgattgattgattactattaactacaaggtataatttactatcaccttatttaaattttatgaattaatttgaatgttttttacactaactaacttttcccaataaagtccactatgaaaaaaaaaaaaaaaaaaaaaaaaagcttgt

SEQ ID NO: 11341 - DNA, 791 bp, Homo sapiens
  misc_feature 1, 2, 3, 784, 785, 786, 787, 788, 789, 790, 791: n = A,T,C or G
nnncgtgctgcacagcctgcggcgcagcggaggcggaccgcagtcgagtctgcagagtgttggaatcgtccgcactaaagtcccctgcagcgtgaccatgtcgagaccccggaagaggctggctgggacttctggttcagacaagggactatcaggaaaacgcaccaaaactgagaactcaggtgaggcattagctaaagtggaggactccaaccctcagaagacttcagccactaaaaactgtttgaagaatctaagcagccactggctgatgaagtcagagccagagagccgcctagagaaaggtgtagatgtgaagttcagcattgaggatctcaaagcacagcccaaacagacaacatgctgggatggtgttcgtaactaccaggctcggaacttccttagagccatgaagctgggagaagaagccttcttctaccatagcaactgcaaagagccaggcatcgcaggactcatgaagatcgtgaaagaggcttacccagaccacacacagtttgagaaaaacaatccccattatgacccatctagcaaagaggacaaccctaagtggtccatgaagagtttgattttgttttgagcctggaggaaaaggaaccaagttaactgagatactgctgctggaatgggcgagacattgctgcaaagaagtcaagcttttttcagacaaaaggtgtgagggggcttgcttggtatgcttacctgggcttgtgtacctcagtggtttttgtgtacttttttcaataaaatatcaaagttgaagaannnnnnnn

SEQ ID NO: 11342 - DNA, 734 bp, Homo sapiens
  misc_feature 1, 729, 730, 731, 732, 733, 734: n = A,T,C or G
nagtctatatatatagtaagcggagaactagttttacagtgctcatttcaggtcttcagtaagtgtgtatgatgatgtcagaagtattcattggctcactttcaaatcactgaaaattcagccatgctaaggttggctattacgtgtattagcgtttccaagcgagtggtcttggctggggtgagattgtcagctgtctgttaggattagtcacaaccaacatggtgcaaatggtttccaacaacagcgcacttcaaggttaccttcataattcttttctgccagaacccaaaaaacaatactcttgagctactcagtgttccaattgttaaaaatttcctgaaattttccttcatgtattcaaagtgaaacataaagatctagaaggatggttgtgaaaagtatggactttatagtatctagtgggcattttcattgagcccaaatgataaattctgttttccaagtcttttaagtgaaaaaaaaaaagattttccttgttataatatattcctaaattctagagtattttcactctacttctatttcatttgttccttgtacatacttgactctgaaccaaaatcagtgataatcttagtttgaataataattcagatttaaaaaattgtatataaaatccaatttggtttatgcattttttagcgtttattggtccttttaaattttatatattgtaagagaatacttttattacagtactaatannnnnn

SEQ ID NO: 11343 - DNA, 758 bp, Homo sapiens
  misc_feature 1, 2, 3, 4, 5, 6, 7, 731, 747, 748, 749, 750, 751, 752, 753,754, 755, 756, 757, 758: n = A,T,C or G
nnnnnnnctaatgggggaataatttcaaattaacagcatttatgggaaccagcacaaagaacatatgattcgtatgcagattcagctactatagacatactgtcccattgctttttcactaatgcgcgtgctcctgctcatgctctctctcatgtatatatgtatgtatgtcttttcctgacctgttagtaagttgtgcccattaaagccttcttcgctgtgacactttagtgtgtttcttcgaagaaaaagggcactgtcctgcagaaccacaacacaattatcaacttcaacaaatctgtaataacaatgcactattcagattccatttttgttaattgacccaatccttagtgttttttccctacaatacaggatccagtttagaattatgtcctgcatttaattgcgtatctctatagtattctttaagccacatcagatcctcagcttttctttgtctctggtgacattgatatttttgtgaacacaaccttatcctgcttttcatttcttaataggctatgcttcacttgggtttatctgttctttccttacgattagattaagattgtgcaatcttggctggaatataacataagtgatgtgtgtttttcagggtgtcacaactggaggtacactgtctgtctttcaatggcgatattattttgatcaatccatgaagattttgtcttattaccatatggttactgtccccgcgttaattaatnctagaagactttcgannnnnnnnnnnn

SEQ ID NO: 11344 - DNA, 389 bp, Homo sapiens
agcggccgcccgggcaggtacagggcttgagagcagagctgcccatgtctgctttccctctgaaccctgacagcaaactcttctgaaggagcttttcactctatcaaggtatgataaaacttgaaaagagatggctggattgagtgcggggcgggggtgggtatcagaggtagagaagttccaaggtggccccataactttcctatatccttgaagaatcgtttttcatttgcagaataaaaaaggaagaaagtctacatatctgaaatgctcttcgatagaccagcagatggtggcataatcagtatggccaagaaccaagtgggactgccaatatctcactggatgcccagggagggctccacgtctggaacagggtggaatgatgt

SEQ ID NO: 11345 - DNA, 1322 bp, Homo sapiens
  misc_feature 1, 2, 3, 4, 5, 6, 380: n = A,T,C or G
nnnnnnggtattttgctgttgtgttgctggattggcttgtctggcgtgtttcctctctttgtatgcgttcggtcgcggtgcctgtggtttgagatacactctgatttgcagtccgtgttttggcatcatggcttttgtgcgcattgggtgaactgtttgctttgtggattagtggtgctggcttagttgtcactctgatctaggatttaacgtgtgctgatcgtgggcgctggccgttggcttactcttttttgccgtctcctgtgggtgtgtgaggtggcgtggggatccctgttgtgttccgggagtgttgtgatgtgtcctgtcgtgtccatagctgggtggaaccgcgtgtccccctcgaaatcccaaattttaanccgggttttgttgcaaggcccccaaccccaactaactcaggagctaggcaggagaatccccttggaacccggaaccggaagtttccattgacccgagattgggccaactgcactccacctgggagacagacaagactccgtctccaaaaaaaaagagtcgaaactattttttttttgagggaaaagaaaaataaactatagtttttgtcattaagtttactagtccaaaataatgtatagaattggttaccaagttggaagaatcaggaatatttatgataaaatcatggcattcctcaaagaaactattttcagtgcttcctaaagtctatagcaacatgatgtaaattataaaacttataactaaaacacaataaaagttttctcaattatttaaggtaaaaataaaaaccttggactgcttctcttcaattagtgatacctaaagttaagcagaggtgtgagttttcaggaactaagagtatgtgaatgacctctagtcagcaaatggttgctaggctctattttaaatttaggcccagttagccacttgggatccaacttgaaagaccggccctttcaggctcacattttttcacatagatcatattatatacacctttaaaatataatatacatttttaacataaatttttaaaataaaaattccaataataaaggcttcattttagccaatacacacaacctttacaatctcccaacctctaagactgtcactgcaaataaaagtgacagaggccaggtgaggtggctcacacctgtaatctcaacactttgggaggccaagctgggtggatcacctgagctcaggagttcgagaccaacctgggcaacctggtgaagacccacctttactaaaatacaaaaaattagccgggtgtggtgacgcccgcctgtagtcccagctactcgggaggctga

SEQ ID NO: 11346 - DNA, 853 bp, Homo sapiens
  misc_feature 1, 2, 3, 4, 5, 6, 7, 8, 9, 10, 11, 23, 27, 36, 37, 40, 41,43, 50, 51, 54, 57, 853: n = A,T,C or G
nnnnnnnnnnngctagggggttnatcnccatagacnnccnntnattgaannccnttnggatcgggaagcgcgccattgtgttggtacccgggaattcttggcacactttggccggggtcctctcagtggccagagaacagaaagaaaatctgactgtgcacgagcgaagggtgacaccgggcgtgcagcaccgacctgaaggcacctcttcgggggagcccgaaatttgaagattctctttcctgtcggagactacaaaccaaataaatagggggttttatgttactctggtagtgaaccgatggtggaaccagtttgtgaatttgccctggccagacaggctaatgttcctcatctctagcagtgttcacggaagcgacgagcacgggcgcctgcttagaaggacgctgatgcgctacgtcaatctcacctccctgctcatctttcgctcggtgagcactgctgtgtacaaaagatttcccacaatggaccacgtggttgaagcagaaagaactggcatgaaacccattctgccttcaagttttgagatgcagagcttttagttcctctgctaatagagcctcgtttgaatactctgcttgaaaggcaaaagacatctgcctcaacttcaatcaaggaaaaatagagcaactgtacagcaggcagaatctctatgatgactggaattttgtctatcaatggatgtaattaatcctttggctcgagggcaataaaattttgtcttaaagtagcagatcctgctccatcaaagcacaatcaatgggagcaatgcaaactgtatctattgcgagatgattactctgattgaaagatgcgggggtggggtaccaan

SEQ ID NO: 11347 - DNA, 2736 bp, Homo sapiens
  misc_feature 2719, 2720, 2721, 2722, 2723, 2724, 2725, 2726, 2727, 2728,2729, 2730, 2731, 2732, 2733, 2734, 2735, 2736: n = A,T,C or G
tatagggagtcgacccacgcgtcccgaggccgggaagaggaaaagctcggacctaccctgtggtcccgggtttctgcagagtctacttcagaagcggaggcactgggagtccggtttgggattgccaggctgtggttgtgagtctgagcttgtgagcggctgtggcgccccaactcttcgccagcatatcatcccggcaggcgataaactacattcagttgagtctgcaagactgggaggaactggggtgataagaaatctattcactgtcaaggtttattgaagtcaaaatgtccaaaaaaatcagtggcggttctgtggtagagatgcaaggagatgaaatgacacgaatcatttgggaattgattaaagagaaactcatttttccctacgtggaattggatctacatagctatgatttaggcatagagaatcgtgatgccaccaacgaccaagtcaccaaggatgctgcagaagctataaagaagcataatgttggcgtcaaatgtgccactatcactcctgatgagaagagggttgaggagttcaagttgaaacaaatgtggaaatcaccaaatggcaccatacgaaatattctgggtggcacggtcttcagagaagccattatctgcaaaaatatcccccggcttgtgagtggatgggtaaaacctatcatcataggtcgtcatgcttatggggatcaatacagagcaactgattttgttgttcctgggcctggaaaagtagagataacctacacaccaagtgacggaacccaaaaggtgacatacctggtacataactttgaagaaggtggtggtgttgccatggggatgtataatcaagataagtcaattgaagattttgcacacagttccttccaaatggctctgtctaagggttggcctttgtatctgagcaccaaaaacactattctgaagaaatatgatgggcgttttaaagacatctttcaggagatatatgacaagcagtacaagtcccagtttgaagctcaaaagatctggtatgagcataggctcatcgacgacatggtggcccaagctatgaaatcagagggaggcttcatctgggcctgtaaaaactatgatggtgacgtgcagtcggactctgtggcccaagggtatggctctctcggcatgatgaccagcgtgctggtttgtccagatggcaagacagtagaagcagaggctgcccacgggactgtaacccgtcactaccgcatgtaccagaaaggacaggagacgtccaccaatcccattgcttccatttttgcctggaccagagggttagcccacagagcaaagcttgataacaataaagagcttgccttctttgcaaatgctttggaagaagtctctattgagacaattgaggctggcttcatgaccaaggacttggctgcttgcattaaaggtttacccaatgtgcaacgttctgactacttgaatacatttgagttcatggataaacttggagaaaacttgaagatcaaactagctcaggccaaactttaagttcatacctgagctaagaaggataattgtcttttggtaactaggtctacaggtttacatttttctgtgttacactcaaggataaaggcaaaatcaattttgtaatttgtttagaagccagagtttatcttttctataagtttacagcctttttcttatatatacagttattgccacctttgtgaacatggcaagggacttttttacaatttttattttattttctagtaccagcctaggaattcggttagtactcatttgtattcactgtcactttttctcatgttctaattataaatgaccaaaatcaagattgctcaaaagggtaaatgatagccacagtattgctccctaaaatatgcataaagtagaaattcactgccttcccctcctgtccatgaccttgggcacagggaagttctggtgtcatagatatcccgttttgtgaggtagagctgtgcattaaacttgcacatgactggaacgaagtatgagtgcaactcaaatgtgttgaagatactgcagtcatttttgtaaagaccttgctgaatgtttccaatagactaaatactgtttaggccgcaggagagtttggaatccggaataaatactacctggaggtttgtcctctccatttttctctttctcctcctggcctggcctgaatattatactactctaaatagcatatttcatccaagtgcaataatgtaagctgaatcttttttggacttctgctggcctgttttatttcttttatataaatgtgatttctcagaaattgatattaaacactatcttatcttctcctgaactgttgattttaattaaaattaagtgctaattaccattaaaaaaaaaaaaaaacatggggccgccaaattaaacactgggcgcagagcaagcccttcgacaccaagacaaaaaaaaccgcctaaaaacccataaaaaaaacagggggggggcccttaatttttttaaaaaaaaaacccccccaaccttcccctagatttggaacataaaaataaagcccttgggggtttaaaatttttttttgcccgttaaaaggggccccaaaaaaaccatggccttcccaatttccaaaaaaaaacctttttttccccggcctcaaaagggggggggccccaacctccaagggggtcttttaaggggggggacccccnnnnnnnnnnnnnnnnnn

SEQ ID NO: 11348 - DNA, 2624 bp, Homo sapiens
  misc_feature 1, 2, 2622, 2623, 2624: n = A,T,C or G
nnacttatgccgtgggcggaatgcacacaatgagatcttgaagagccacatcactgtcccctccagaaagtatgaggatgtgggggaaggatggtggcagaacactggaggacacctggggcccatgggacacacacccgatttctcttccctccttgacagtacactcggctgcagactccctcctccttccccactctggccaccctgaaagaagaaggacagcgtaaggcctgggcctcctttgaccctaaggcccttctgcccctcccggaggcctcctacctgcccagctgccaactcaatcgccgcctggcttggtcctggctctgtctgctgccctctgggttctgcccagcccaggttttacttggggttctggtggcttcatctcataaaggttgtctgcaacttcgggaccaaagtggttccctgccctgcctgctcctggccaagcactctcaacccctcagtgacccacggctgataggctgcctggtgcgggcagagaggtttcagttgatcgtagagagggacgtgagaagcagcttcccttcctggaaggagctgagcatgccaggcttcatccagaagcagcaggccagagtctatgtccagttctttctggctgatgccctgatcctgcctgtgcccagaccctgccttcattcagcaacaccctcaacacctcagacagatcccaccggcccagagggaccccacctaggacagagccggctcttcttgctctgccacaaggaggccctcatgaagcgtaatttttgtgtccccccaggagcaagtccagaggtgcccaagcccgccctcagtttctatgtgttggggagctggcttgggggcacccagaggaaggagggtactggatgggggctgcccgagccccagggaaatgacgacaatgatcagaaggttcacctcattttctttggctcttcagtccgctggtttgagttcttgcacccgggacaggtgtaccgactcgtagctcctggccccgctacaccaatgttgtttgaaaaggatggttcatcctgcatatctcggcgtcctctggagttggctggctgtgcatcctgcctcactgtccaggacaactggactctggagcttgaaagctcccaggatatccaagatgtgctggatgcaaacaagtcattgcctgaatcctcactgaccgacctgctcagtgacaatttcacagattccttggtgtctttctccgctgagattttgtcacggacactatgtgaaccccttgtggcgtctctctggatgaaactggggaacacgggggccatgagaaggtgtgtgaagctaacagtcgctcttgagactgctgaatgtgaattcccccctcacctggatgtatatatagaagacccacacttgcctccctcactaggactacttccaggagcccgggtccacttcagccagttggagaaaagggtttccagatctcacaatgtttattgttgtttccggtcatccacttatgtgcaggtcctgagttttccccctgagaccaccatcagcgttcccctgccccacatctacctggctgaacttctgcagggtggtcagtccccattccaggccactgcctcttgccatatcgtctctgtcttcagccttcagctcttctgggtgtgtgcttattgtaccagcatctgccggcagggaaagtgcactcgcctgggctccacttgccctacgcagacagctataagccaggccatcatcaggctcctggtggaggatgggactgccgaagccgtggtgacctgtaggaatcaccatgtggcagcagcactagggctgtgtcctagagagtgggcctccctcctagatttcgtccaagtgccaggcagagtggtcttgcagtttgcagggcctggagcccaacttgagtcttcagccagggttgacgagcccatgaccatgttcctctggacactttgtactagcccctctgtcctccgtcctattgtgctttcttttgagctggaaaggaaaccgtcgaagatcgtcccattagaacctcctcggctacagcgattccagtgtggagagctccctttcctgactcacgtgaaccccaggctccgattgtcctgcctttctatccgagagtcagagtactccagctctctggggatccttgcttcctcctgttaactgaactgcaaggatggcctgagagtccttccttgctgaaaacctgaaggcctaggtcctggctcctctccctacttgttctgtgattgaaccaaggactccagattcacaaactgctactccactataatttcccttctttggtgttctggtgccagcctgccttggcaaaattgtggcaacaggaaatcatggccctattaatatgtcctctgattgggacaaggcacctgcattcacaggcggccctgagcacctgggttctgactttgtcgcaggagctgagggaacaaaagacttgctcgctgtggggtgatggtgacaggcctattgacctgcaatgaagccctctggtgtcatttccaaaaatgaaaaaaaaactcgagggggggcccggtacccaattcgccctatagtgagtcnnn

SEQ ID NO: 11349 - DNA, 1875 bp, Homo sapiens
  misc_feature 1697, 1872, 1873, 1874, 1875: n = A,T,C or G
ttcccgggtcgagcccccccccccccccccggtggccgcatggcgtgctgtggtgcaggtggccgaagggggcgttactgttgcgactggcatccgcatccggcagatgtagatggaaccaaagtccagaagttacgcgtcacccttgctctacagccaaacatgcaggactctagtaacccgcgaaatgatgggatagcgttgcaaatccttaaaagagtcttaacgaaatcctggctgacattgacttctccactgcaaccatcgagttcattgtctcctaaaccttgccatggaggcctgtggcacctgagccagccattatcatcaccagcacttccatgagctacaagctggacccactgcagtcctcctgacacactgaaatcagagcctgcacacaaagcagcagatgcttcaatgcgaaggtcatttccaggtccttgacaggcgtgcatctgggccagatccatggcaataaccttcaggttgaggctagagggcttcagatgggcagcttcgaatgacaggagcaaggaacaagaggccggaaagggagggtgacattttcagcatctataagatcaactttagaaacatttgggggttgacaaattcccatcaagctctgtggatcttgtacaactgctcaccaccggcttctcatcagcacatgattggtgcagggttctgaggatgattttgagatgttccctgatgtggtcttgtgaggagatttcatgacagatggcaggaagcttcgtggagagatttctgaagacactcctgagctcccaacaccgggcaactctcttccagaggatagtggggtggagggtagaagagaggcaaagtcaggtttgtccttcggatccccttcattctccttttgccaccgtaaaccaacttttgcttacagttagacaccagttttcggcagatgaaatccctctgatttcaggcattttgtcaattaagctgctcagcaacaataggataaacttatgaaaagaaaggagtagcagtcccacagacaaagcatccagcccctgcactgagacagtatagggaagggacttggtcctggcagacaggacagataatcaacatcctagtgggcctcacacatgtgggcatattcttttccataccttcttgtctgttttaacaagctaaccccagtcacagtagcagagagagggtccatcctaacttagctgaccaggctggattcctaatcataaaaccaaaaaaggaagaacctaaccatttctctctttcagctatgtgttccaagattactgaagcaggattctggccttcctgataagaacatgaccagatccagctggtttgcaacaagatgaacttcagtgctgagctttcaccaagtttttctcactacaatctcatgtaatactaaaatctccacccaagatggaggttatctgccattttctgtacatgtgttaccagaaaggggtcctgatccagaccccaaaagagggttcttggatctcacgcaacaaagagttcggggcgagtccatagagtaaagtgaaagcaagttcatcaagaaagcaaaggaataaagaatgcctactccataggcagagcagtggctttggctgctcagctgcttgtacttgttacttcttgagtatatgctaaacaaggggattgattactccttggtntagcagttttctggggaaagggagtgggccaattcccagaactgaggtttctcccctttttagaccatatagggtgactttcctgatgttggcatggctttggtaactggcatggcgctcagggagggctttaactggtatgcttgaggaggtgaccccgggctttgtgcccccnnnn

SEQ ID NO: 11350 - DNA, 1850 bp, Homo sapiens
  misc_feature 1, 26, 107, 1839, 1840, 1841, 1842, 1843, 1844, 1845, 1846,1847, 1848, 1849, 1850: n = A,T,C or G
ncagagagagactgagacgcaggganggaggggagggggtacgcgggagaccgagggtggcagagaccgagacaaagctcccgagaggggagctgaagcggggaganacagagccgaggacgcgcgtttggggaggacgcagaagccgccgaaacaataagggcgaccgacaccttagacagggagagacagaaacctcgatcggctgccggccgtcgcgccgagggacgatggagaagctgggccagatcggccggagcaagcgggttgttattgaagatgataggattgatgacgtgctgaaaaatatgaccgacaaggcacctcctggtgtctaactcccccaaagacaatgagttaagggagagaataagaacggcggtaacagttattggcaaaaagcatgaaaagagaaagcactttgaaatttattactagcttgctacccacgatgaaatcaacaacctgtatctggtatcaggccgggagacagatgaggcgagaggaggaggaggaggaggagaaggctctgggctcctctgcaaaaataaaaataaaaaaataaataaaattttaaaaataataaaaattcactatatacacatataaagaaataaaaagaagtctcagttgcagctatttgtcaaaattaatatccatttctttttatatacggtgaatattgcgcaattatagatctggattttgaaccacttaatgaagcggcaacaccaggtgttttgaggtgttggcattcttcgctgatttggctgttcccaatgtttacattatttaatcttgcaaaaatggttctgtgcacttggatgtgaaatgctgtccagttttattttttttatgttgttatccttggatgtacaaaaaattcagaaaatgatctctgtagatattctgttttattttggtcatctttagaagttatcaggaatgtgtttaaaacaagaagagaacttttctaaggaatgatacatagaaaagattttattttaaaatgagttgtaaagcttgtgtttctttgttgctgcaagctatctgcccaagttaatgcaaatggacacattttttatgtcagaaaaacacacacacacacacacacacacacacacacacacacgaaaaacaaagaaaaaaatgcttgagctttttctaacttccccttgcagtctgttgtgtgagcagcctgtttatttctctaatattatgtcagtttattctctttaatggactgtaaaaaaatgtaatcacaagagtgccaaatatcttgaaatgccaaaaggcattttagtttcttttctctgtgctctgagtccacgtacaggaatgcttggagtgtcttttctgttatttatagggattctcttaaggcacaccagctgcctgttttgcatggtatttgcaaaaatgcctcttgcgtgaggaaatcttttaccattttttgtttgcaactttggacctcaagaggtttcccttcccttccccgttccctcttttcttaattcaatattctgtatgttgcaccttgaaccagcacacagggctatttctccaatgtacaataaaagaattgttcctgtgtctcaacacagaaaacacaaaaaaacatcttggggggaacaggacagaaaaagtttacaccatggggcgcggggccaatgtaagaaaagggaaagggcacaggaacgggcaagtgggtgaccaccaaaagccggggcgggtgaaacaaggtcgggcacagcaacaggcagccaaaaccccccgccgggaaagaagacaaaagagaaacaaacaccatggacaagacgaaaacaaaaaacaaccgcnnnnnnnnnnnn

SEQ ID NO: 11351 - DNA, 1485 bp, Homo sapiens
agttgggccaccgtcgcggactcgcgcgcgtagcccgaagacaggactcggccgcggcccgcgcagcggctgaagcgccggggcagtaacggcggacgtcaagcaagtccggccgtcggttactcagggcccaggaatcacggccgccccgccgcattctcagcggcaacatgtctgcgacggcggccctagggctgccgggagagccgcggcgacgtcagttcctcctttcggggctctgattggtcagagcgcccggcgcttctggttggccggccctgctatcatcccagagtgcattgcggggccgcttcctttccgctcggctgttttcctgcgcaggagccgcagggccgtaggcaggccatggcgcccagccggaatggcatggtcttgaagccccacttccacaaggactggcagcggcgcgtggccacgtggttcaaccagccggcccggaagatccgcagacgtaaggcccggcaagccaaggcgcgccgcatcgccccgcgccccgcgtcgggtcccatccggcccatcgtgcgctgccccacggttcggttaccacacgaaggtgcgcgccggccgcggcttcagcctggaggagctcagggtggccggcattcacaagaaggtggcccggaccatcggcatttctgtggatccgaggaggcggaacaagtccacggagtccctgcaggccaacgtgcagcggctgaaggagtaccgctccaaactcatcctcttccccaggaagccctcggcccccaagaagggagacagttcttgcggccaaccccacttaactcttctcattcaccaacaggctgaagaactgaaactggccacccagctgaccggaccggtcatgcccgtccggaacgtctataagaaggagaaagctcgagtcatcactgaggaagagaagaatttcaaagccttcgctagtctccgtatggcccgtgccaacgcccggctcttcggcatacgggcaaaaagagccaaggaagccgcagaacaggatgttgaaaagaaaaaataaagccctcctggggacttggaatcagtcggcagtcatgctgggtctccacgtggtgtgtttcgtgggaacaactgggcctgggatggggcttcactgctgtgacttcctcctgccaggggatttggggctttcttgaaagacagtccaagccctggataatgctttactttctgtgttgaagcactgttggttgtttggttagtgactgatgtaaaacggttttcttgtggggaggttacagaggctgacttcagagtggacttgtgttttttctttttaaagaggcaaggttgggctggtgctcacagctgtaatcccagcactttgaggttggctgggagttcaagaccagcctggccaacatgtcagaactactaaaaataaagaaatcagccatgaaaaaaaaaaaaaaaaaaacggacgcgtggtagaccgctgctata

SEQ ID NO: 11352 - DNA, 245 bp, Homo sapiens
ctccaccagaaacacgtgcactttattgaatgccattgtagaaaagtgcgtgaagataaagggctgatacaggactgggctccgggggcagggcgaggtggagtatgtgggattcaggtcatgggcagagctcctggcctggatgatgcctcctgatctatcgataggcttggaagatcaacacccggatgatgatgagcagaatggtcatgaggatgtccacaatcagggctcagatcccgcgt

SEQ ID NO: 11353 - DNA, 535 bp, Homo sapiens
  misc_feature 1, 2, 3, 531, 532, 533, 534, 535: n = A,T,C or G
nnngcagctccaccgtggaggcggtcgcccgggcaaggtactcggggccagcagccagagtgagcatataaaatgcagttctgatcctgtcacctctctgcttaaaactcttcagaggttcaccatcgcttccagaaaaagatcaatactcctgacgtggcaacctgtcgagactcaggaccgctaggaaatcagctcttgtttacccctctatccattacactacgatccagctgggtttaggcatcacttcctctgagcaatcctccctgatgtcatgaggcagtgctgagtgccttctctggaccctctgtttacttgcctgttaaatcctgaacatctggaagggagtcgtgttcagcaacatatctacgccttgcagcacggtgcctggcctgcagctggtgttccgtaaacagctgctgactgacgggatgcatcgccaattctagatttgagtcaattctagagaccaccatggtggagagtgcatatgcaggcacgccagttaactgatctggcttagcccannnnn

SEQ ID NO: 11354 - DNA, 1357 bp, Homo sapiens
  misc_feature 1, 2, 3, 1353, 1354, 1355, 1356, 1357: n = A,T,C or G
nnnataccggggcaaattccgttgggccccccaaggtcccagagacgacttcccggttccccgttttattcctagcgcttaaaagggggaatggccctggaattataccccccctttttttttccagggtttggctttttattgacacaaacacacaaaggcagctgtggtaatggggtggtggggtacacaaaagcagaaatcgcacttcacacatttaggcctcatttagacaatgaggaggctgagcctgtccctccacctcccattgcaatggttggggcaataaccctccctaatcctagctcagtgagtagagggagtgacctccctacccaggaagtccccattttggttgcaatggcccaggtcctgaccatcccactctgtacttccctgctccatctccccacccatgtaaacagagttttgggctgagtttgataagctgcctctctgctttgagaaggcagtagggcctcccctaactgcaaggggaatgtgcttggatttttactttggtcccagtacaagaaacagacagcactgcctttcagagctctggctagtaaatgccacacatatctgcaaggctgaggaagcttccccgcctttctcctcaaccaccatagagacgggacatggcacagaccacgatgagggcacctgtttttgccctgcctccccaggaggcttggggctgccccacccaatggcacatacacagatttttggcagtgttgtgggactggggaggagagaaaccccagctccaccagaacaaggaaggcactggggagtacaggggaggagaaggaggtgggaaacaggatcctccctccccgccgccacacacacacaagcacaggttttcgttgctaaggcactgagaacaaatccagagaactcagtgaagggtgggggctctgtatccttcccagagttgtgacctaggggagtaggtctgattcccgccctgttggaagaggcagccttggttaagaatggcagaaaacctggagatggaagaagcccaattgtgcttaagaagttggggacagaggacgagattgggaactggtcaagcccagaggcgggcactggtcagcccaggctgaagggacactagggagagacaggtacatgctggactcacagagattggccccctattctgagctgacgtttcaattctttggggaggtggcggggcagggacgggaggaaagatgaggcagaagtgaaagcacatggaacacaacaggggcaataaccctccctaatcctagctcagtgagtagagggagtgacctccctacccaggaagtccccattttggttgcaattccccannnnn

SEQ ID NO: 11355 - DNA, 1927 bp, Homo sapiens
agtcgacccacgcgtccggaaaagccccttgtgcccgctttctgccatccgcgctgtctcgtgtctccctttttccattaaatgcctcttttcttgcgggtctcatctcgggaatagtgcactacggggacatacctatccccaactatcctaggcccgagaaccagcccttgccttcgcgtaacaggcggagactcgctgaggcgagttgcacttctaattgggcgtgaggtcttgtcaatccccaagttcttccaatcagaagtccggtccatccagccttccgctccccattggcctgtgtggaggaagaggggtgggtaagccgaagtcgctgcgctcagtgcgcaggcgcgaagaagctggcaggggcacgagccgggggcgggtttgaagacgcgtcgttgggttttggaggccgtgaaacagccgtttgagtttggctgcgggtggagaacgtttgtcaggggcccggccaagaaggaggcccgcctgttacgatggtgtccatgagtttcaagcggaaccgcagtgaccggttctacagcacccggtgctgcggctgttgccatgtccgcaccgggacgatcatcctggggacctggtacatggtagtaaacctattgatggcaattttgctgactgtggaagtgactcatccaaactccatgccagctgtcaacattcagtatgaagtcatcggtaattactattcgtctgagagaatggctgtatcaagtgggttggctgattccattcttctgttaccgactttttgacttcgtcctcagttgcctggttgctattagttctctcacctatttgccaagaatcaaagaatatctggatcaactacctgattttccctacaaagatgacctcctggccttggactccagctgcctcctgttcattgttcttgtgttctttgccttattcatcatttttaaggcttatctaattaactgtgtttggaactgctataaatacatcaacaaccgaaacgtgccggagattgctgtgtaccctgcctttgaagcacctcctcagtacgttttgccaacctatgaaatggccgtgaaaatgcctgaaaaagaaccaccacctccttacttacctgcctgaagaaattctgcctttgacaataaatcctataccagctttttgtttgtttatgttacagaatgctgcaattcagggctcttcaaacttgtttgatataaaatatgttgtcttttgtttaagcatttattttcaaacactaaggagctttttgacatctgttaaacgtctttttgttttttttgttaagtcttttacatttttaatagtttttgaagacaatctaggttaagcaagagcaaagtgccattgtttgcctttaattggggggtgggaagggaaagagggtacttgccacatagtttcctttttaactgcactttctttatataatcgtttgcattttgttacttgctaccctgagtactttcaggaagactgacttaaatattcggggtgagtaagtagttgggtataagatctgaacttttcatctgcagaggcaagaaaaatatttgacattgtgacttgactgtggaagatgatggttgcatgtttctagtttgtatatgtttccatctttgtgataagatgatttaataaatctctttaaatactaaaaaaaaaaaaaaaaaaaaactcgagggggggcccggtacccaattcgccctatagtgagtcgtattacaattcactggccgtcgttttacaacctcttgacgtgggaaaaccctgggttacccaacttaattgccttggagaaaattccccttttccccgctgggcgaaataacaaaaagaggccgccccgaacggcctttccaaacaaatgccccaccctgaaatggggaaaagggcaaattgg

SEQ ID NO: 11356 - DNA, 543 bp, Homo sapiens
ccaccgcggtggcggccgagtacctcagcacagcacagccacgctacaaaaacgtggccagactcttgtttacgtcagtccctgaccacatttctagtcagtgggtgaagtctttcaaccagggtctctggctaccttgactgctgttgtctggctgacagaggtctcaggcttccctgagtcagggctgccagggggaggaccagattgtcatctttgctttttgggcgacccagccatttcagccttagggcttcagagtgtctgaggtgaccaggggctgaagtgaacccccagcacagcacagctgctctataaaaacgtggccagactttttttttaaagcaagtccctgtgcttgttcctcctgactaggtaagactcctcaacttgcctccagccacatcttataggtgtgttcagattggcaacaggttcgtacctcagtggtacagagctcccagagaaagtgggcaggctatcatcttcccttttaaatatgaggcaattagggactggagggacccccagcataccacagca

SEQ ID NO: 11357 - DNA, 1490 bp, Homo sapiens
  misc_feature 1, 2, 3, 4, 1489, 1490: n = A,T,C or G
nnnncgcggccgcgtcgacacggctgcgagaagctctctcctgcccgtagtagccatggcggccatgagtttgttgcggcgggtttcggttactgcggtggcagctctgtctggccggccccttggcactcgcctcggatttgggggcttcctcactcgtggctttccgaaggctgctgctcctgttcgacacagtggagaccatgggaaaagactatttgtcatcagaccttctagattctatgacaggcgttttttgaagttattgagattctacattgcattgactgggattccagtagcaattttcataactctggtgaatgtattcattggtcaagctgaactagcagaaattccagaaggctatgtcccagaacactgggaatattataagcatcccatatcaagatggattgcccgtaatttctatgatagtcctgaaaagatatatgaaagaacaatggccgtccttcagattgaagctgaaaaggctgaattacgggtaaaggagctggaagtgcgaaaattgatgcatgtgagaggagatggaccctggtattactatgagacaattgacaaggaacttattgatcattctccgaaagcaactcctgacaattaagcatttttttctccaaatacaaagtatattctctttatgtggaaaataattataaatatattctgtattttggtctccgcggaaaacaaaagagctctgacattactgctctcagggtggtcacgatgaggcgttggggagtgggttggtccatcccaagagtttaatggtctataaccgggggcacgagaggcccaatgtgactgaggggggttccgcagctttctcttcttttgaacgcttctctgctctgcgctatgcccacaatatgtctacacaccgtgacacaaggcaggggaagagacccgagaacggccgacacgcaaaaaacacacagagacaggcgggagcgatgtggtgtcgccgacgcaggggaggacgaggaggaggggaggaggatcggaggggggggcggaagagggggaagggagagtgagagagaggataggcaaggagagagaagacgaaggagcacaacgaagaagagagacgcaacaaagaggcaagagagggcaaaggcagagacgaggggacagcgagagaggagggcgcacagctaagcagaacggagagaagagacgcacgaagacaaggagagaacaagccgcaagacaaggacgcaggcagcaggagagaacccgcgacgcggcgagcgcagcagggcggacgaaacgagaagccgagggcgagcgacaggaacccgcgaaagccgacgaaaagccagaacacggcgcaaggcaatggcgaagcaggagagaggcgcaggaacgagagagcagaagaagcgagcaagaaggagagcaacagggagagaggagcaagaacaggaccaacgagcaacgaaccgaaccccaaaggcggaann

SEQ ID NO: 11358 - DNA, 237 bp, Homo sapiens
  misc_feature 1, 3, 10, 235, 236, 237: n = A,T,C or G
ngncatgcangtggtgtcgtgcccggttcactgcagcctccaactcctagcctcaagtgatcctcctgtctcaacctcccaagtaggattacaagcatgcgccgacgatgcccagaatccagaactttgtctatcactctccccaacaacctagatgtgaaaacagaataaacttcacccagaaaaaaaacacaaatgatgattgtctaaaaaaaggtttaaatatatggttccnnn

SEQ ID NO: 11359 - DNA, 975 bp, Homo sapiens
  misc_feature 1, 2: n = A,T,C or G
nnacgcgggatcaaaagcaagtgagaaacttgctacattacaaaacaagttatgtagctagatattgggttgaatcttttgatattttaagaaactatccacacagatcagagagttgatagacgtattaaaacatagtgatgaattatctgggagatcagtctctgacaaacttcaaaataccaaatctgatgagtaatgtggaaattaatttatctaagcaatgtgctacacacaaaccttactgtgtcttcagggctgagtttaagtgtaggcttttgcatgtttgttatgatttgaaatatattactaaattctaacttcgtttttccatttattcattaattctttcagaaaacacttattgtttaatttccaattactaatgatgtttctcataaagatggctgttttcccccaacttctcgctgagaacaaagaaagctgaaaatatctacatttctaatcctaacaataagaaaaaggtatataaaattaaaacaatcacttctattaaagccataataaagctaagattacactgtaatcagctacttttaaattgaaggacagacagatgccaccaagcagaggtggattgcaagcactagattacacagcatagttaagaagattttggctaaaactttttaagccactattcagatagtttgagttactgtaaggatatagcatccctgggaggtgcaaaattaaggcaagtttccccctgatccccatacttgcaggctcttctccacagattccactgtctgcttctaagaaggattgatggcaagaggaaaaatggaaaaattctcctaagattagaattgggtaggggagcagtcaccactatgggaagggcaaaaaaatcctactcagaatattatgacctgaagaaaaagaaggcttaatcttgataaaaggcagcaaatactaatgtcctaactgcataggtaaagaaccatttgc

SEQ ID NO: 11360 - DNA, 695 bp, Homo sapiens
  misc_feature 1, 2, 695: n = A,T,C or G
nnattgaagctctgcaccatgtgatatgtctggagacagaacctttgcgggtgattaggtcatgcgggtggggccctagtgaatggggttagtgtccttacaagaagagacaccaaagctgactccctctctccaatgtgagcacaagtcagaaggcagctgcctgcacatcagaagagacctcagaatgaatatgcagccagcaccttgagcttcccagcctctagaacagcaagaaataaatttctgttgtgtaagcctcccagtccatggtgttttgttccaaactgcccaatacaatggtctcccccagggaaatggagaacacgtgcttctcagtgcagtaggagagttctggaggctggaagtctggggtcaaggttgtggccaatcctgtgtctggcaaggctgcttcctggtttgcagacaccatcttcctccctgtccccttcctctcctagacttcctccataggagttcggcaggcactcctggtcttcctttatcttcttgcagaaagatggcccggcaggtccgtccaaacacaaagactggacgcagagacccggagaacagcaaaacggagattttcaatgacagtcttgcaagactgggtgtctggctggcatgcagccaccccgcgtacctggccgggcggccggccgccgcggggagctccaattcgccctaagtan

SEQ ID NO: 11361 - DNA, 1589 bp, Homo sapiens
  misc_feature 1, 2, 3, 4, 5, 6, 7, 1589: n = A,T,C or G
nnnnnnngcgcccctgtattttttggccccccccctctttttttttttgtgtcccgtgtgctctttctttgcgtttttttgtttttttgttcttgttgttctttttttttttttgtttgaaatattgactttattaggaaaacatttgatagttctattcggtcatataatcaatcacctaattttaaaactatgtggccagaggacatcaattacaatatggatttttcattcattcaacgaatatttgagcacctacaagtgccagacattggaggtacagggtaaacaggaggatccttgctctcacggagcttacattctagcaggaggacaatattaatgtttataggaaaatgatgagtttatgacaaaggaagtagatagtgttttacaagagcatagagtagggaagctaatccagcacagggaggtcacagagacatccctaaggaagtggagtttaaactgagagaagcaagtgcttaaactgaaggatgtgttgaagaagaagggagagtagaacaatttgggcagagggaaccttatagaccctaaggtgggaaggttcaaagaactgaaagagagctagaacagctggagccgttctccggtgtaaagaggagtcaaagagataagattaaagatgtgaagattaagatcttggtggcattcagggattggcacttctacaagaaatcactgaagggagtaatgtgacattacttttcacttcaggatggccattctaactccagggggtagactggactaggtaagactggaggcaggtagacctcttctaaggcctgcgatagtgaaagacaaaaataagtggggaaattcaggggatagtgaaaatcagtaggacttaatgagcaagccagaggttcctccacaacaaccagtacagatgtccagtagacctactggatatgcaggcctgcagctcaggggagagctgggttaagaaccgtcaaggcagtaatcatctgcatttagatggcgagtgaagccatgacaggggctgaaatggcccagcaagaataaatcaaaccatgagaaacacatacatttaagaataaggagatgtggtcaggcgcggtggctcacacctgtaatcccagcactttgggaggccgaggcgggtggatcacttgaggtcagtagtttgagaccagcctgggcaacctagtgaaatcccgtctctgctaaaaatacagaacttagctgggtgtggtggtgcgtgcctatagtcccagctgcttgggaggctgaggcacaagaatcgcttgaacccgggaggtggaagctgcagtgagccgagatcacaccaccgcactccagcctgggcaacagagaaacaccctgtctcaaaaaaaaaataataataaggagatgtcatgggctcgggggagggggaaatggggagcgctgttgtttgaatggtatagtttcagtttgggactgagaacaaattctggaaattaatggtggtgatggctgcacaacagtgtgagggcactttatgccactgaagtaacagatgcctttcaaaaataagcccgctaaaatatcaccaagcatan

SEQ ID NO: 11362 - DNA, 3344 bp, Homo sapiens
catatagcggatcgacccactgattactgtatttttagtcactagttgctttctggtttgcaagatgcagtggttcctccctctcctgaatccttttctacatgatgccctgctgaccatgcagccgcaccagagagagattcttccccaattggctctagtcactggcatctcactttatgatagggaaggctactacctagggcactttaagtcagtgacagccccttatttgcacttcaccttttgaccataactgtttccccagagcaggagcttgtggaaataccttggctgatgttgcagcctgcagcaagtgcttccgtctccggaatccttggggagcacttgtccacgtcttttctcatatcatggtagtcactaacatatataaggtatgtgctattggcccagcttttagaaaatgcagtcatttttctaaataaaaaggaagtactgcacccagcagtgtcactctgtagttactgtggtcacttgtaccatatagaggtgtaacacttgtcaagaagcgttatgtgcagtacttaatgtttgtaagacttacaaaaaaagatttaaagtggcagcttcactcgacatttggtgagagaagtacaaaggttgcagtgctgagctgtgggcggtttctggggatgtcccagggtggaactccacatgctggtgcatatacgcccttgagctacttcaaatgtgggtgtttcagtaaccacgttccatgcctgaggatttagcagagaggaacactgcgtctttaaatgagaaagtatacaattctttttccttctacagcatgtcagcatctcaagttcatttttcaacctacagtataacaatttgtaataaagcctccaggagctcatgacgtgaagcactgttctgtcctcaagtactcaaatatttctgatactgctgagtcagactgtcagaaaaagctagcactaactcgtgtttggagctctatccatattttactgatctctttaagtatttgttcctgccactgtgtactgtggagttgactcggtgttctgtcccagtgcggtgcctcctcttgacttccccactgctctctgtggtgagaaatttgccttgttcaataattactgtaccctcgcatgactgttacagctttctgtgcagagatgactgtccaagtgccacatgcctacgattgaaatgaaaactctattgttacctctgagttgtgttccacggaaaatgctatccagcagatcatttaggaaaaataattctatttttagcttttcatttctcagctgtccttttttcttgtttgatttttgacagcaatggagaatgggttatataaagactgcctgctaatatgaacagaaatgcatttgtaattcatgaaaataaatgtacatcttctatcttcacattcatgttaagattcagtgttgctttcctctggatcagcgtgtctgaatggacagtcaggttcaggttgtgctgaacacagaaatgctcccaggcctcactttgccgcccaggcactggcccagcacttggatttacataagatgagttataaaggtacttctgtagggtcctttttacctctgctcggcagagaatcgatgctgtcatgttcctttattcacaatcttaggtctcaaatattctgtcaaaccctaacaaagaagccccgacatctcaggttggattccctggttctctctaaagagggcctgcccttgtgccccagaggtgctgctgggcacagccaagagttgggaagggccgccccacagtacgcagtcctcaccacccagcccagggtgctcacactcaccactcctgtggctgaggaaggatagctggctcatcctcggaaaacagacccacatctctattcttgccctgaaatacgcgcttttcacttgcgtgctcagagctgccgtctgaaggtccacacagcattgacgggacacagaaatgtgactgttaccggataacactgattagtcagttttcatttataaaaaagcattgacagttttattactcttgtttctttttaaatggaaagttactattataaggttaatttgcagtcctcttctaaatagaaaaccatatccttggctactaacatctggagactgtgagctccttcccattccccttcctggtactgtggagtcagattggcatgaaaccactaacttcattctagaatcattgtagccataagttgtgtgctttttattaatcatgccaaacataatgtaactgggcagagaatggtcctaaccaaggtacctatgaaaagcgctagctatcatgtgtagtagatgcatcattttggctcttcttacatttgtaaaaatgtacagattaggtcatcttaattcatattagtgacacggaacagcacctccactatttgtatgttcaaataagctttcagactaatagcttttttggtgtctaaaatgtaagcaaaaaattcctgctgaaacattccagtcctttcatttagtataaaagaaatactgaacaagccagtgggatggaattgaaagaactaatcatgaggactctgtcctgacacaggtcctcaaagctagcagagatacgcagacattgtggcatctgggtagaagaatactgtattgtgtgtgcagtgcacagtgtgtggtgtgtgcacactcattccttctgctcttgggcacaggcagtgggtgtagaggtaaccagtagctttgagaagctacatgtagctcaccagtggttttctctaaggaatcacaaaggtaaactacccaaccacatgccacgtaatatttcagccattcagaggaaactgttttctctttatttgcttatatgttaatatggtttttaaattggtaacttttatatagtatggtaacagtatgttaatacacacatacatatgcacacatgctttgggtccttccataatacttttatatttgtaaatcaatgttttggagcaatcccaagtttaagggaaatatttttgtaaatgtaatggttttgaaaatctgagcaatccttttgcttatacatttttaaagcatttgtgctttaaaattgttatgctggtgtttgaaacatgatactcctgtggtgcagatgagaagctataacagtgaatatgtggtttctcttacgtcatccaccttgacatgatgggtcagaaacaaatggaaatccagagcaagtcctccagggttgcaccaggtttacctaaagcttgttgccttttcttgtgctgtttatccgtgtagagcactcaagaaagttctgaaactgctttgtatctgctttgt

SEQ ID NO: 11363 - DNA, 348 bp, Homo sapiens
acgcggggaacacatccaagcttaagacggtgaggtcagcttcacattctcaggaactctccttctttggccaggattgctactctgcagtcactgggagcaactggactctccggattgaccaagttcatcctgggctccattgggtctgccattgcggctgtcattgcgaggttctactagctccctgcccctcgccctgcagagaagagaaccatgccaggggagaaggcacccagccatcctgacccagcgaggagccaactatcccaaatatacctggggtgaaatataccaaattctgcatctccagaggaaaataagaaataaagatgaattgttgcaact

SEQ ID NO: 11364 - DNA, 811 bp, Homo sapiens
  misc_feature 1, 2, 3, 4, 5, 6: n = A,T,C or G
nnnnnnactcatatgcttcagttaattatatatgttgaacaggtaggaagcagtgctgtttttatttattttaatatgttattcatacatttggttctttctgtaggcagctgaatttttttttttttgagacgaagtcttggtattgtcccccttgctggagtgcaatggcatgatctcggctcactgcaacctctgcctcctgggttcaggcaattctcctgcctcagactcctgagtagctgggattacaggcgcctgccaccacgcccggataatttttgtatttttagtagagacagtgtttcactatgttggctgggctggtctcgaactcctgccctcaggtgatccgcctgcctcagcctcccaaagtgctgggattactggcgtgagccactgctgccagccggcagttgaattttaagactgtggagctggctgaggcagtagatgaaacaagatttcttgatgttccttccaggtttattatgcatgtatctttagagctgatttttttttaaagactgtgtttattgtatttcagatgctgagatgaatcgtcacctgtgtgtttggctttttagacatccatctcttaatggttacctccagtgtcacatccagctccattctcatcaatttagacagatacatcttgatacaaggctgcaagtttttagacaaaacaggaattgcattcttcatctgttaagtaagaattggtccaggagatattgccatcaagacaccaagatgctctggaagcataaagcactacagaaatatatggagaacctgagtaaggagt

SEQ ID NO: 11365 - DNA, 1088 bp, Homo sapiens
  misc_feature 1, 2, 1084, 1085, 1086, 1087, 1088: n = A,T,C or G
nnacccacgcgtccggaacccggaaatgcacaagcctcttgatgcataaaaacagctgggctcccttggagacagagcgccatgggaaaccgggtctgctgcggaggaagctggagctgcccatcaactttccagaagaaaaagaaaagaggaagccaaacaagacggacactgaagccgcagccacaacagctgcagcagaatctcccaaagggccatgaaacaacaggacatacgtatgaacgggtgttacagcagcaagggtctcaagagaggagtccaggcctcatgtcggaagacagcaacttacattatgctgacattcaagtgtgcagccgtccccatgcccgggaagtgaaacacgtgcatttagaaaacgctacagagtatgcgacccttcgcttcccccaggccacacctcgctatgacagcaagaacgggaccctggtgtgagcgcttgggaggaaggcccagtccatcgttaaccactacacctgtgggggagaacctactgctttggggaattgggtggcaacccagggatgttgtccacgttttaagcttaaagaactccaaagcccctggaattgtgggcgtcccattttctcccctggcctcttacttgccactgttaggttggagttaatagttggtttagctatgggtggatagctaaacttagctatccacatgaggttaggtggagtgtgcacggcaggtaggtcttcgaccccagcagtgtggctcctgctcttgcacaggtgcagaaagagcggtcacaacgttagcccaataagccacggggctgatcatggtggactctaatcaatgggatcctttttcacacgccttaagtccaaagctgacaggggcaggtgtcccgggacaagccattctgaagccttctacatgccgacaccaggcggcgggactgagccaatccacccagcgcggagtagcggtcacaacctaacgacacagggggcaacaggcccgcacagtcggaacacgtgcagcacaccgacgtgctaagccacccacgcggcgcgaaaaccaccggacgagacccctacagcgcgtatannnnn

SEQ ID NO: 11366 - DNA, 2029 bp, Homo sapiens
  misc_feature 1, 2, 3, 4, 5, 2029: n = A,T,C or G
nnnnnacacagtccaatgatgctaaaaagcaagcacatatgtaagtctgcaaaataaccagctgacagcatgacgacaggataaattccacacataccattactaaccttaaatgtaaatgggctaaatgctcccattgaaagacacggggcaagctgggtaaagaaccaagacccactggagtatgccgtcttcaagcaacccatctcacgtgcagtgccatacataggctcaaaataaaggaatggagaaaaatatttcaagcaaatggaaaacagaaaaaaggtgttgcactcccagtttctgacaaaacagactctaccaataaagataaaaaaagagaaggacattacaaaggtggtcctgacctttgataaatctcattattgcttgataccaacctgggctatttgtattgcccaaaccaataggataatttgctgaggttgtggagcttctcccctgcagagagtccctgatctcccaaaatttggttgagatgtaaggttgattttgctgtacaactccttttctgaagttttactcatttccaacaaggaaggcaagttttcctgcttccatgacgatggagagcaggcacctcctttcctgagtttcagcttgcttctgacagggaaggtgagtgtaagttttttccagcttctaagatggcagagaacgatcaccagcctgagccttatttccaggtaagtagctgaattagagttttgtcttaaaatttttccttaatgactaaaatttaagattacccaccagctgcttttaatttctccttaccattagaacactcagtaatcatatgaattgtgcatttgtttgttttgcttaactctttctgtttgtttatgtttggggttttattgttgttgtttcacttttctcccatctcttcctgacttggtcaaatccaaaggaatgttccaaattgtggggagcaaggcatctgaaatggctaaaactcctgtggctgcaaaaatagactcaacaagtttccaactaaccacccgaatgcaaccagacaaaagcacgaaagcaaaggaaaaaacccaataaatagagacgtggcgaacaaccacgcacacaaaatcaagcagcacaaaaaagggtgggccgccgcgaaactatacaactgttgggcccgagaagaaacgacagcctcacaccggcagtggttccaaagcggggctcaacgtgttactgcccacccgacaccagcaacaagcacgacagctcgcaccacaccaggagagcagagacagcggcaaggacaacacgcgagcggccaaggcgccgaccagcgaagaaacaaacaaccccagagagacacacagaagacgcagagacaagaagcaaaatcgcgacccgcgcagagacgcgacacgcgcacgcacggacgaagacagggaacggaaccgcagagcaagcacgaacacgacacacagcaagcagccaacggcggccgcaacaagggagccagcagcgggagagaaaggagagggaggacgccgaccccgagcacgaaccggagaaccccaccaggcaagacagagagaagcgagcgagacagaaggcagagagggtcgcgacggagcgcgggaagcgcgcagaccagagcgcgagagagctagaaagcccgaggacagcgggcagacggccaggcgagcagaagcacagacggacgcgcgagagaggagcagcgaaagacggccaagaggcgtagcgagcggaggcagaaggcgaagccaaaggagcagcagcaccgaagcgaaagacagagacacgaagactgacgagcagaccagaacgacgaaacgcaaggagcacgagagaggacgagcagcaggccgagccgagcagggagcggaacgcaggagcagagaggaaggcaggagcagcaaccagcacaaacggacagagggcggagaggacgaccagcacgacggcacagggggagacgcgaggacggcgcgaagcgacagcacgggcgcacgtaaagaacagaagcggn

SEQ ID NO: 11367 - DNA, 230 bp, Homo sapiens
aggtactgagcgcgcgaggctctacagagtgaaggtttaaatccaaggtcatggcaaaacatctgaagttcatcgccaggactgtgatggtacgcgggggactcggggtcgcctttggagcagagaggaggcaatggccaccatggagaacaaggtgatctgcgccctggtcctggtgtccatgctggccctcggcaccctggccgaggcccagacagagacgtgtacct

SEQ ID NO: 11368 - DNA, 1171 bp, Homo sapiens
cctcgctggcttaggctccgcggcctccaagctgtagctatgacggcgcgcgggactccgagccgcttcttggccagcgttctccacaacggactgggtcgctatgtgcagcagctgcagcgtctgagcttcagcgtcagccgcgacggcgcctcgtctcgcggcgccagggagttcgtggagcgggaggtgatcgacttcgcccgacggaatccagggtcgtaatatatgtaaactcgcgtccgtgctgcgtgcccagagtagtggccgaataccttaacggggctgtgcgcgaggagagcatccactgcaagtcggtcgaggagatctcgacgctggtgcagaagctgggccgaccagtcgggcttggacgtgatccgcatccgcaagcccttgccacaccgacaaccctagccatccagggccagttggcaccccttcaccaacaagccgaccacgttccgcgggctacgccccccgagaggttcaggatcgctgccccagcccaggtgcaagcacagtgaagagttgccccaccaactgcagccccaggctttggactgttactccggtaaaggtggttcttcccctttgggattccaagcccaggcaaatggaacccattcaatgggcaagttgacagaggttctggcttggcgataatggaagagctgcctgtttctttcccagtgcctggcttctggggggcagtgacccttgtgaaaccactcatttttatggcaagtgggcatccctaaaacctgagatgaggaagacttcaagggttttacaggacccttgttttttaatccaaattgttatatgatctcaaacccagtgagaggtctgaaggctgcttctgaagaaatcctgatgtctatgggacaccacgtacacagcgaaggccggagagacagggcaggccctcatactggaggacaccgagtgtaacgcaggtacaacgctaccacgggccagtgcacaacaaaacaacagtgcgacgcacaaaatcacagcggcgcgccagaccaccaccgtgacagcgccacggagacacaaccgaggcgagaaaaacgcgagaagacgggatcgacaacagggagacacaaccagccaacatgacgcagagccaaaaacccaagcccccgccgcgcgaacgtcgcaacgacga

SEQ ID NO: 11369 - DNA, 224 bp, Homo sapiens
  misc_feature 1, 2, 223, 224: n = A,T,C or G
nnaactctgcttatcctctgctttctctgttttcccgtatggaggggtagacatggaaagaaaggcagatcatgattaaaggttacagaaggagaagtagcaaggctttaatcctagagcccatcctcccagagaataaatggtaaaaatgtttgcctttgtgccttgggaagcgctaggctcctgctgctctttcatcaaaaaaaaaaaaaaaaaacaaagnn

SEQ ID NO: 11370 - DNA, 1008 bp, Homo sapiens
ggggatgatgcgactcagggagtcgacccacgcgtccggcaccaccacttgacctgggacagtgaatcgacaatgccgtcttctgtctcgtggggcatcctcctgctggcaggcctgtgctgcctggtccctgtctccctggctgaggatccccagggagatgctgcccagaagacagatacatcccaccatgatcaggatcacccaaccttcaacaagatcacccccaacctggctgagttcgccttcagcctataccgccagctggcacaccagtccaacagcaccaatatcttcttctccccagtgagcatcgctacagcctttgcaatgctctccctgggggaccaaggctgacactcacgatgaaatcctgggagggcctgaatttcaacctcacgggagattccggaggctcagatccatgaaggcttccaggaactcctccgtaccctcaaccagccagacagccagctccagctgaccaccgggcaatggccctgttcctcagcgagggcctgaagctagtggataagtttttggagggatgtaaaaagttgtaccactcagaagccttcactgtcaacttcggggacacccgaagaggccaagaaacagatcaacgattacgtggagaagggtacattggacatcctggactgattctgtaattttcgtatcttttttctcccatgttccctttatttgtcttttggttcttgctttttgggagattttcttaacttgatctacctgaggctcagtcctcatctgtaaaaatcgctgataaaaggacctaccacctagcgttgctgtgaggtgtcagtgaaataaaatgtaaaatgcttagcacagtgaactttaaataaatggtagttgtggttgcacatttgatttaaattgtgatcccctgaatcggttcttctcatatattcataaaggggtcccttggccgctctagaactatgggtattcccccgggctgagggatttcaattcaacccttag

SEQ ID NO: 11371 - DNA, 1755 bp, Homo sapiens
  misc_feature 1, 2, 3, 1755: n = A,T,C or G
nnncgtcgcggcgggggctggaggacaggtttgtgcgctggacgcaagcaccaggcgcagcctcgctcgccgagacccggccagaacgtgttacgagtcagtttttagtgaaaaaacattgagctaggagccaagacccatctcttcactattttggtattgtgcaagtcatcttacctctctggatctcagttgtctcatctgtaaaaaggagataaaaattatttacctgcctgaacatgaggtggaggaccatcctgctacagtattgctttctcttgattacatgtttacttactgctcttgaagctgtgcctattgacatagacaagacaaaagtacaaaatattcaccctgtggaaagtgcgaagatagaaccaccagatactggactttattatgatgaatatctcaagcaagtgattgatgtgctggaaacagataaacacttcagagaaaagctccagaaagcagacatagaggaaataaagagtgggaggctaagcaaagaactggatttagtaagtcaccatgtgaggacaaaacttgatgaactgaaaaggcaagaagtaggaaggttaagaatgttaattaaagctaagttggattcccttcaagatataggcatggaccaccaagctcttctaaaacaatttgatcacctaaaccacctgaatcctgacaagtttgaatccacagatttagatatgctaatcaaagcggcaacaagtgatctggaacactatgacaagactcgtcatgaagaatttaaaaaatatgaaatgatgaaggaacatgaaaggagagaatatttaaaaacattgaatgaagaaaagagaaaagaagaagagtctaaatttgaagaaatgaagaaaaagcatgaaaatcaccctaaagttaatcacccaggaagcaaagatcaactaaaagaggtatgggaagagactgatggattggatcctaatgactttgaccccaagacatttttcaaattacatgatgtcaatagtgatggattcctggatgaacaagaattagaagccctatttactaaagagttggagaaagtatatgaccctaaaaatgaagaggatgatatggtagaaatggaagaagaaaggcttagaatgagggaacatgtaatgaatgaggttgatactaacaaagacagattggtgactctggaggagtttttgaaagccacagaaaaaaaagaattcttggagccagatagctgggagacattagatcagcaacagttcttcacagaggaagaactaaaagaatatgaaaatattattgctttacaagaaaatgaacttaagaagaaggcagatgagcttcagaaacaaaaagaagagctacaacgtcagcatgatcaactggaggctcagaagctggaatatcatcaggtcatacagcagatggaacaaaaaaaattacaacaaggaattcctccatcagggccagctggagaattgaagtttgagccacacatttaaagtctgaagtccaccagaacttggaagaaagctgttaactcaacatctatttcatctttttagctcccttcctttttctctgctcaataaatattttaaaagcataaaaaaaaaaaaaatatgggcgccggcccagaaagtctaaacatccttgggccggccaagagagaaagggcaagcggcccagaaccgggagaggggggctcccaaaaaggggggcgggggaaaccgggtgggctgccaacagccacan

SEQ ID NO: 11372 - DNA, 354 bp, Homo sapiens
accgtggaccacggcccttgggtcaacagcaccggcggctggcttgcatggttggcttctcaactttgattgttccattgtttccattttcatgggggtccaagggtgggatctggcggctgattccttgaaaaagctcttcgatattaatagcattttttgcacttgtctcaaccacgatggcacctatggattcagcgtattccttagcatccttcaggggaacctccctccaggccttcgttccagatcttgccccttcctggaatttcctcctccaacacatccgtaactgcctgtggcacatacctcacctgggacacatgtcgtcccatgcctttcctagtcacaacc

SEQ ID NO: 11373 - DNA, 1361 bp, Homo sapiens
acgcgggggattttttgattttccaatttccacaatgtgatggtgttttcgacagagttcctcagtggtccctggataagaatgttaaggaaattggtgtctcaactttggtgctatctgtagcattctgtccaactcaggcattgaggcagccagcgcaggggcttctgctgagggggcaggcggggcttgaggaaaccgcagataagtttttttctctttgaaagatagagattaatacaactacttaaaaaatatagtcaataggttactaagatattgcttagcgttaagtttttaacgtaattttaatagcttaagattttaagagaaaatatgaagacttagaagagtagcatgaggaaggaaaagataaaaggtttctaaaacatgacggaggttgagatgaagcttcttcatggagtaaaaaatgtatttaaaagaaaattgggagaaaggactacagagccccgaattaataccaatagaagggcaatgcttttagattaaaatgaaggtgacttaaacagcttaaagtttagtttaaaagttgtaggtgattaaaataatttgaaggcgatcttttaaaaagagattaaaccgaaggtgattaaaagaccttgaaatccatgacgcagggagaattgcgtcatttaaagcctagttaacgcatttactaaacgcagacgaaaatggacagattaattgggagtggtaggatgaaacaatttggagaagatagaagtttgaagtggaaaattgagagaaaggactacagagccccgaattaataccaatagaagggcaatgcttttagattaaaatgaaggtgacttaaacagcttaaagtttagtttaaaagttgtaggtgattaaaataatttgaaggcgatcttttaaaaagagattaaaccgaaggtgattaaaagaccttgaaatccatgacgcagggagaattgcgtcatttaaagcctagttaacgcatttactaaacgcagacgaaaatggaaagattaattgggagtggtaggatgaaacaatttggagaagatagaagtttgaagtggaaaactggaagacagaagtacgggaaggcgaagaaaagaatagagaagatagggaaattagaagataaaaacatacttttagaagaaaaaagataaatttaaacctgaaaagtaggaagcagaagaaaaaagacaagctaggaaacaaaaagctaagggcaaaatgtacaaacttagaagaaattagaagataaaaacatacttttagaagaaaaaagataaatttaaacctgaaaagtaggaagcagaagaaaaaagacaagctaggaaacaaaaagctaagggcaaaatgta

SEQ ID NO: 11374 - DNA, 1732 bp, Homo sapiens
  misc_feature 1, 1732: n = A,T,C or G
nagttgtgggtcttcctttgcaacgtttcttcttcgctgtgcctctggtcgccatcacaaactgcattaggaaatgagagcgagcatgtggcctggcttcttgatggagatcgtcctcgctcttttcataaagggtcctagatgaacaccgattccctcctgtggtgattggctatggcagccagtgtcccgtgtcctctccatatgaggagtgagggcctgcagatccctccattggccagcctggttctgggagagagatactgaactcagcttggccctggtcccatttcttccagtacccgctggtggtctctgccctcaccagagctggaaggacttgatgtggtttgaccacatcactgtaggattttctcccagatggggatgaccagctgcatcactccccagagtccttccggagaaataaaagcataggcatggcggctaagggaagaaggcataagaaggcagattgaggattgttaagaagactccgcccttgcccccagctctgcctaccatagtattgctcccttttggtcactgatgcacatgactaagaagagttctctcctgagtaactacatgactttggagatctttgtcattctcttcactgcttatcttccagaactcatgattacccacacatgcctttttaccaggcagtaagaaatgcagcccccctaggtagtagcatggtcccctccttggcccactccactcttgccctcaacctctttcaaccaaacattatcacccaccttaagaaattaaaaaataattctgtcccagtctgtctgaacttagtacatgatccaggatgtgatgggatcttagggcttggctggaaggtttctccagtcagccatctagcagagctgcagatctgggctgggctgttggctaaagtgctcttcacagacacctcattcggctcttccttcagcttcttcacttatttcttactcagtcactactcagctccttgtccatgtgtccttgaagccatcctaggtcttattctgattctgaattcttcagtcacccataagcttgtccttaccgggagtcagtgggtgtgtgttcccaggtggacttaaccattcttctcctttatgatcctttcccttgggtggacaagtgtgatttggttgtaaggccatttttcaagttgcctatacattgataaaagaaatcccactaacggaagtagactgcatgccagatttcagtgtctttctccaggggccaaggttggacccagaagtgcatggggtgcttggtgtcgttcagtgatgtagtaaggatacacggttccagacacggcacaagaaatgccttccttggcagttcagcaccttttctacaaatctttattctctgtgagcatgacaccctaccgtttttttcaaccggttgtcgttaaatcctaaaaaataagttgttctacctttctgttctacagacccacagatgcagggcagtcagcggtggcagtgtttgaaccatcaattgggaggggaaggtggtttcctgtgcaggaggggcaggtcagattgcaggatagttgtgctcaggcgcaggtgggcaggcacgctaaacacattggttttccccctcagaccattcccggagtaataaatccagttggagcagcagtgatgagaagaggggatcgacacgttccgatcacaacaccagtacctgcccgggcggccgccacccn

SEQ ID NO: 11375 - DNA, 1376 bp, Homo sapiens
  misc_feature 1, 2, 3, 4, 5, 1376: n = A,T,C or G
nnnnngaacaccaaaaagtaaaaagtctgggtaataaaatctacagtagggaaagaaaatgcttctgataacttcagtgaagcttgcagtttcaggaagccttaccaaaggacgtgtctgaggatccagctaccaagtcaggattgttacccccaccacctgcgctccctccaagaccttgtccatcacagtctgaacaagtgtcggaggccgagttactcccacagctgagcagagccccatcccaggctgcagaaagtagtccagcaaagaaggatgtactgtattctcagccaccatcaaagcccattcgtaggaaattcagaccagaaaaccaagctacagaaaaccaagagccttccactgctgcaagtgggccagcttctgcggcaaccatgaaaccgcatccaacagtccaaaagcagtcttccaaacagaagaaggccattcaaactgctatccgcaaaaataaagaggcaaacgcagtgctggctcggctgaacagtgagctccagcagcagctcaaggaggttcatcaagaacgaattgcattggaaaaccaattggaacaacttcgtccggtcactgtgttgtgacccccccatggttcaagtgacagtgggtgaccttgtctgccaagatctttcttttgaatgttttgaacccaactacttgtcatagatgtttgactgtgtcaaaagctgtgagcagcaaaatataatccatatgaccttttctcttgcacttcacttgtatgttttactgtggtggaaaaaatacttcaactgattatcacacttgaaatgctaattatcagtggaatttgtctcctattcttaagtacttctgcaaggtattagatgctgctccttaccaaaaatcagtcttctagcaaaaataaaaaaataacttaggaggcattaagaaaaaaaaaaaaaaacaaaaaaaaaacaaaacaaagacaaagacacagaacaacagacgacaagacgaccgacccaaccgctacagcggcgagcgagagcggcgagaagcaggaacacaaagccaacacgagcgcgacaaagaaccagaagcggggcgggggagcaaccacacggcgagagccgcaccgacgacacgcaaccaaaacaccaaaacgatattaggaaacatgcaggagcacaacaagaacacgataacaaatcaaacaggcgacggagaacgcaaccagaaccaacgacgaacacaaaagaaggtagaagcagagaagagaagaagacacaatcacgaggggaacagaaacgaccacaccacaagaaaaaaccacaaacaaaaacaagcagcaagtgaggaacagaacaacacccgcgaaagagcaaggtaggcaacaaacn

SEQ ID NO: 11376 - DNA, 350 bp, Homo sapiens
acctcagccagcagaacatcgctgggacgtgcctggcctaaggcatcctaccaacagcaccatcaaggcacgttggagctttcttgccagaactgatctcttttggtgtgggaggacatggggtacccattatcttagaaaatctagtttaaactgttttctttcaccgcaaaagaattaaatgggaaaatcatttgtttatctctaagttatactaattagtagaaccaaacaaattatcttcttttaaaaaataaatcttataggaaaatagacagtccaaagtcatgtctttgaacagtggattggatctgtgccagtaatgacaaaattatttttttgacttgctt

SEQ ID NO: 11377 - DNA, 4341 bp, Homo sapiens
gcgtccggtggaggtggccctggccggggaggaggggcggcggcgaatgctgggagagtccgacgagcgctgcactaacgcaggatccggctgccgaaggtcctcgccaggatgaagttaaaggaagtagatcgtacagccatgcaggcatggagccctgcccagaatcaccccatttacctagcaacaggaacatctgctcagcaattggatgcaacatttagtacgaatgcttcccttgagatatttgaattagacctctctgatccatccttggatatgaaatcttgtgccacattctcctcttctcacaggtaccacaagttgatttgggggccttataaaatggattccaaaggagatgtctctggagttctgattgcaggtggtgaaaatggaaatattattctctatgatccttctaaaattatagctggagacaaggaagttgtgattgcccagaatgacaagcatactggcccagtgagagccttggatgtgaacattttccagactaatctggtagcttctggtgctaatgaatctgaaatctacatatgggatctaaataattttgcaaccccaatgacaccaggagccaaaacacagccgccagaagatatcagctgcattgcatggaacagacaagttcagcatattttagcatcagccagtcccagtggccgggccactgtatgggatcttagaaaaaatgagccaatcatcaaagtcagtgaccatagtaacagaatgcattgttctgggttggcatggcatcctgatgttgctactcagatggtccttgcctccgaggatgaccggttaccagtgatccagatgtgggatcttcgatttgcttcctctccacttcgtgtcctggaaaaccatgccagggggattttggcaattgcttggagcatggcagatcctgaattgttactgagctgtggaaaagatgctaagattctctgctccaatccaaacacaggagaggtgttatatgaacttcccaccaacacacagtggtgcttcgatattcagtggtgtccccgaaatcctgctgtcttatcagctgcttcgtttgatgggcgtatcagtgtttattctatcatgggaggaagcacagatggtttaagacagaaacaagttgacaagctttcatcatcttttgggaatcttgatccctttggcacaggacagccccttcctccgttacaaattccacagcagactgctcagcatagtatagtgctgcctctgaagaagccgcccaagtggattcgaaggcctgttggtgcttctttttcatttggaggcaaactggttacgtttgagaatgtcagaatgccttctcatcagggagctgagcagcagcagcagcagcaccatgtgttcattagtcaggttgtaacagaaaaggagttcctcagccgatcagaccaacttcagcaggctgtgcagtcacaaggatttatcaattattgccaaaaaaaaattgatgcttctcagactgaatttgagaaaaatgtgtggtcctttttgaaggtaaactttgaggatgattctcgtggaaaataccttgaacttctaggatacagaaaagaagatctaggaaagaagattgctttggccttgaacaaagtggatggagccaatgtggctcttaaagactctgaccaagtagcacagagtgatggggaggagagccctgctgctgaagagcagctcttgggagagcacattaaagaggaaaaagaagaatctgaatttctaccctcatctggaggaacatttaatatctctgtcagtggggacattgatggtttaattactcaggctttgctgacgggcaattttgagagtgctgttgacctttgtttacatgataaccgcatggccgatgccattatattggccatagcaggtggacaagaactcttggctcgaacccagaaaaaatacttcgcaaaatcccaaagcaaaattaccaggctcatcactgcagtggtgatgaagaactggaaagagattgttgagtcttgtgatcttaaaaattggagagaggctttagctgcagtattgacttatgcaaagccggatgaattttcagccctttgtgatcttttgggaaccaggcttgaaaatgaaggagatagcctcctgcagactcaagcatgtctctgctatatttgtgcagggaatgtagagaaattagttgcatgttggactaaagctcaagatggaagccaccctttgtcacttcaggatctgattgagaaagttgtcatcctgcgaaaagctgtgcaactcactcaagccatggacactagtactgtaggagttctcttggctgcgaagatgagtcagtatgccaatttgttggcagctcagggcagtattgctgcagccttggcttttcttcctgacaacaccaaccagccaaatatcatgcagcttcgtgacagactttgtagagcacaaggagagcctgtagcaggacatgaatcacctaaaattccgtacgagaaacagcagctccccaagggcaggcctggaccagttgctggccaccaccagatgccaagagttcaaactcaacaatattatccccatggagaaaatcctccacctccgggtttcataatgcatggaaatgttaatccaaatgctgctggtcagcttcccacatctccaggtcatatgcacacccaggtaccaccttatccacagccacagccttatcaaccagcccagccgtatcccttcggaacaggggggtcagcaatgtatcgacctcagcagcctgttgctcctcctacttcaaacgcttaccctaacaccccttacatatcttctgcttcttcctatactgggcagtctcagctgtacgcagcacagcaccaggcctcttcacctacctccagccctgctacttctttccctcctcccccttcctctggagcatccttccagcatggcggaccaggagctccaccatcatcttcagcttatgcactgcctcctggaacaacaggtacactgcctgctgccagtgagctgcctgcgtcccaaagaacaggtcctcagaatggttggaatgaccctccagctttgaacagagtacccaaaaagaagaagatgcctgaaaacttcatgcctcctgttcccatcacatcaccaatcatgaacccgttgggtgacccccagtcacaaatgctgcagcaacagccttcagctccagtaccactgtcaagccagtcttcattcccacagccacatcttccaggtggccagcccttccatggcgtacagcaacctcttggtcaaacaggcatgccaccatctttttcaaagcccaatattgaaggtgccccaggggctcctattggaaataccttccagcatgtgcagtctttgccaacaaaaaaaattaccaagaaacctattccagatgagcacctcattctaaagaccacatttgaggatcttattcagcgctgcctttcttcagcaacagaccctcaaaccaagaggaagctagatgatgccagcaaacgtttggagtttctgtatgataaacttagggaacagacactttcaccaacaatcaccagtggtttacacaacattgcaaggagcattgaaactcgaaactactcagaaggattgaccatgcatacccacatagttagcaccagcaacttcagtgagacctctgctttcatgccagttctcaaagttgttctcacccaggccaataagctgggtgtctaaaaggacagcttctcttccactcaatattgccatttttccaaagaaacatgttaaaaaaaaaaattataagacatggactagtcctcattagcatgtttgcatagcaaccagtcaagagcatttacactatttctgctgatatactcaccttagaactgctcagaaccctggtgctttatttttgttttaatcttttgttgccagtgatgattttcctattctgcaaatagtgtatttcctggattacacatagtatggtttcctgaagtattctgataaatgtgttttttaaaacctcaatatactttttagaaaaggagcatctggttatgcataaagcagagctaaaactaaatttctttcatgtcctccctacttcctcagtgtcaatcagattaaagtgtgtaatcctattttatgtgtgtatagtcttttttgaaacagctgcttaaaatttagtttattttttgtgtcttaggattcctgagtaaataactacatctcccaactgctacatgggttttaccagatattaataaaaatgggatccctggctttaactataaa

SEQ ID NO: 11378 - DNA, 2906 bp, Homo sapiens
accacgccaccggagaagggagccctgggagacgtggcccttccagggttgccttcggtcaagccacaagggtcttgcagggacccggcggagaaagagaagggggggcaggcattgccaagcattgccttcaggcaatggcccgcctacggatctcccgggtccttctccggtggcgtggtaccacgccaccggagaaggggatctgaacccgactccctttcgatcggccgagggcaacggaggccatcgcccgtcccttcggaacggcgctcgcccatctctcaggaccgactgacccatgttcaactgctgttcacatggaacccttctccggtggcgtggtaccacgccaccggagaaggggatctgaacccgactccctttcgatcggccgagggcagcggaggccatgcgcccgtcccttcggaacaggcgctcgcccatctctcaggaccgactgacccatgttcaactgctgttcacatggaacccttctccacttcggccttcaaagttctcgtttgaatatttgctactaccaccaagatctgcacctgcggcggctccacccgggcccgcgccctaggcttcggagggaaccagctactagatggttcgattagtctttcgcccctatacccaggtcggacgaccgatttgcacgtcaggaccgctacggacctccaccagagtttcctctggcttcgccctgcccaggcatagttcaccatctttcgggtcctaacacgtgcgctcgtgctccacctccccgcccgccggaaaggctagcctttccggcgggagatttacaccctctcccccggattttcaagggccagcgagagctcaccggacctccgccggaaccgcgacgctttccaaggcacgggcccctctctcggggcgaacccattccagggcgccctgcccttcacaaagaaaagagaactctccccggggctcccgccggcttctccgggatcggtcgcgttaccgcactggacgcctcgcggcgcccatctccgccactccggattcggggatctgaacccgactccctttcgatcggccgagggcaacggaggccatcgcccgtcccttcggaacggcgctcgcccatctctcaggaccgactgacccatgttcaactgctgttcacatggaacccttctccacttcggccttcaaagttctcgtttgaatatttgctactaccaccaagatctgcacctgcggcggctccacccgggcccgcgccctaggcttcaaggctcaccgcagcggccctcctactcgtcgagccaatccttatcccgaagttacggatccggcttgccgacttcccttacctacattgttccaacatgccagaggctgttcaccttggagacctgctgcggatatgggtacggcccggcgcgagatttacaccctctcccccggattttcaagggccagcgagagctcaccggacgccgccggaacccgcgacgcctttccaaggcacgggcccctctctcggggcgaacccattccagggcgccctgcccttcacaaagaaaagagaactctccccggggctcccgccggcttctccgggatcggtcgcgttacacgcatctggagctcgcggccgcccatctccgccactccggattcggggatctgaacccgactccctttcgatcggccgagggcaacggaggccatcgccccgttcccttcgggaacggcgctcgcccatctctcaggaccgactgacccatgttcaactgctgttcacatggaacccttctccacttcggccttcaaagttctcgtttgaatatttgctactaccaccaagatctgcacctgcggcggctccacccgggcccgcgccctaggcttcaaggctcaccgcagcggccctcctactcgtcgcggcgtagcgtccgcgagggggtttgtgggtagtagcaaatattcaaacgagaactttgaaggccgaagtggagaagggttccatgtgaacagcagttgaacatgggtcagtcggtcctgagagatggggcgagcgccgttccatcttggcctcggctctaagaacctaaatccctgcctgggatgcgtgcggagttcaatccagtatcgcctggcggtgctccccggaggcgcctgcgggaaaattcagctttccctctccacgacaggaggcgctgttttcgtggaaatcccccggctgcgaacctgggatccctgacctggatcaagtctccgaagctggcagagtccattctgcatcaccggtcttgggctttgaagaagcctaggagaaattccgcttcggccatcacgctatgaaaagtggatttttttttcttaagtcaatttttttttttttgaaaatatgagacttagtaggtttgggaagtgggctaaaagaacatttgatattgtaattgaccccccctttaaggtgacagtgtttttcccctacttaaagcgccaacttttttgtgcactataaaagctattactatccataaattgttactctcggtagaaaataacctagtcttgctcggtgttattgaagagccaagagggtattggagaatcacctccagaaggaacaaggaagctcattagcactgaaagtcccccggatcaggcccaggaagctaagcatccgtatactttacaaatggaactaaagtcagctactaatggggactttgcacaaaagaattagtttctgacacacaattcgcagatacatttacacaaactgatgggacaacttgcagtcacaggagcaggctgcattagggagggttcctgccctactgagttccaggtgcatttaatttcactcattcctttccttataatgtgacgtttctacccccccaccctttttg

SEQ ID NO: 11379 - DNA, 2522 bp, Homo sapiens
accgagtcagtgtggacaacgaagacagctacatgcttgtgatgcgcaatatgtttagccaccgtcttcctgtgcacaggaagtatgacctcaagggttccctagtgtcccgggaagccagcgataaggaaaaggttaaagaattgcccacccttaaggatatggactttctcaacaagaaccagaaagtatatattggtgaagaggagaagaaaatatttctggagaagctgaagagagatgtggagtttctagtgcagctgaagatcatggactacagccttctgctaggcatccacgacatcattcggggctctgaaccagaggaggaagcgcccgtgcgggaggatgagtcagaggtggatggggactgcagcctgactggacctcctgctctggtgggctcctatggcacctccccagagggtatcggaggctacatccattcccatcggcccctgggcccaggagagtttgagtccttcattgatgtctatgccatccggagtgctgaaggagccccccagaaggaggtctacttcatgggcctcattgatatccttacacagtatgatgccaagaagaaagcagctcatgcagccaaaactgtcaagcatggggctggggcagagatctctactgtccatccggagcagtatgctaagcgattcctggattttattaccaacatctttgcctaagagactgcctggttctctctgatgttcaaggtggtggggttctgagacacttgggggaattgtggggatattctagccaccagttctcttcttcctttgctaaattcaggctgcaggctccttccatccagataactccatcctgtcgagtaggctctttctgaccctcagaaatacattgtcctttttcctctttgcccatttttcttccctctcttcctccccatgagaagtctgcttgtagtattagaatgttattgttgactctctcccaagtgccttgatctttgtaatatctcctgttgtttctatgatataggagctaggggaagggggttgtttgccttcttcaggacctgactggacagatggacctggctcaagcaactactctggatgcactttgctgtgtgggatgaactaaaagtgtctgaattttgctgataactttataaaactcactatggcatgcttccctcctggtgggccctaggatggatgacactcaagatactacagatgtgggtgcaggcatgcacacacacgatggaatatggccattcctacacaggtggggtagagagtgggtcagcagcctggcacctcacagaggtgggacctaagaggactcatgattatgcagagaattggattgggtctctgtcatagattgagtaatctcttcccttacctcaattccatctccacccatctctacatctgggcacagcaacccagagatggccaaaagcattcaagcctgggggaagatgtttgactattgctgctcttcaccagaacctcacacctctcctgggactggaacccttcagtgggtgtgtggccagttttggaggctggaatgatgggccagggtgtaggattcattctccatgtaaagtttcctttcatcctgcctagccatccccaaggtttatttccagaagaaaggaatatctctacttggatcaattctggttatttcaagaggatggaggcctcaagtgtgggaacttcccctactccctggatgtgtgtacctagcacacttccttctcccacccctttttccagttggatttgtttttctgttctcttctgtcctgtcttatactgcaactgtgtctcctaggggacagatggccttctttgtcatcttcactctccacccccagagaggagtcagagccataactcaatcactcagcccctccaaagatagttgatgtgtgataatctcataatgttgagaaccctgatgagatacattgtcttcctctccctacaatgcctctggggccaaggcacccattcttcttgctatcctccatcccccttgaggcttccactttttttttttttagacataaagctgggcatcagcaactggcctgtggtgatgcaaagctgctttgctctgtatctggctggactgatctgtctcacaagaagccatgaggccatagggagaagctccctctccccttcatcttctgctccaaaggtggtagcaagaggagtacccagttaggggttggagcccccatataacatcttcctgtcagaagactgatggatctttttcattccaaccatctccctttcccccgatgaatgcaataaaactctgtgacaccagcaaccattgctctttagaaatgggttttctgatcatatggctgatgtgttatgggcagtatggatgtcttcatttgttgcttctgtttttcatcttttttgttttattaataaaaatttatgtatttgctcctgttactataataatacagggaataaattattcaatccaaatttctgtac

SEQ ID NO: 11380 - DNA, 1617 bp, Homo sapiens
  misc_feature 1614, 1615, 1616, 1617: n = A,T,C or G
acgcggggtttaacaggcagcatccaccgcaggcttactgtacacatgctagggtccaggacagcaggaccaagccagcagaaacagcctgagcccaccgcagactggcctggctatactggacaatgccactcctcctgtacacctgtcttctctggctgcccaccagcggcctctggaccgtccaggccatggatcctaacgctgcttatgtgaacatgagtaaccatcaccggggcctggcttcagccaacgttgactttgccttcagcctgtataagcacctagtggccttgagtcccaaaaagaacattttcatctcccctgtgagcatctccatggccttagctatgctgtccctgggcacctgtggccacacacgggcccagcttctccagggcctgggtttcaacctcactgagaggtctgagactgagatccaccagggtttccagcacctgcaccaactctttgcaaagtcagacaccagcttagaaatgaccatgggcaatgccttgtttcttgatggcagcctggagttgctggagtcattctcagcagacatcaagcactactatgagtcagaggtcttggctatgaatttccaggactgggcaacagccagcagacagatcaacagctatgtcaagaataagacacaggggaaaattgtcgacttgttttcagggctggatagcccagccatcctcgtcctggtcaactatatcttcttcaaaggcacatggacacagccctttgacctggcaagcaccagggaggagaacttctatgtggacgagacaactgtggtgaaggtgcccatgatgttgcagtcgagcaccatcagttaccttcatgacgcggagctcccctgccagctggtgcagatgaactacgtgggcaatgggactgtcttcttcatccttccggacaaggggaagatgaacacagtcatcgctgcactgagccgggacacgattaacaggtggtccgcaggcctgaccagcagccaggtggacctgtacattccaaaggtcaccatctctggagtctatgacctcggagatgtgctggaggaaatgggcattgcagacttgttcaccaaccaggcaaatttctcacgcatcacccaggacgcccagctgaagtcatcaaaggtggtccataaagctgtgctgcaactcaatgaggagggtgtggacacagctggctccactggggtcaccctaaacctgacgtccaagcctatcatcttgcgtttcaaccagcccttcatcatcatgatcttcgaccacttcacctggagcagccttttcctggcgagggttatgaacccagtgtaagagaccacccacccagagcctcagcactgtctgactttgggaaccagggatcccacagaaatgttttggagagcgggaggtttcccccaatctcctccaagttcttctccctccaaccagagttgtgtctaactttaggcatcttttaataaatgtcattgcgactctgaaaaaaaaaaaaaaaaaactcgagggggggcccggtacccaattcgccctatagtgagtcggattacaattcactgggccgtcgttttacaacgtcgggacnnnn

SEQ ID NO: 11381 - DNA, 701 bp, Homo sapiens
  misc_feature 1, 696, 697, 698, 699, 700, 701: n = A,T,C or G
ncgcgtggggcgagcgggaggcgcgggctctctctagcagggcgctgcagccatgaagaggctcttagctgccgctggcaagggcgtgcggggcccggagcccccgagccccttcagcgaacgggtctacactgagaaggactacgggaccatctacttcggggatctagggaagatccatacagctgcctcccggggccaagtccagaagctggagaagatgacagtagggaagaagcccgtcaacctgaacaaaagagatatgaagaagaggactgctctacactgggcctgtgtcaatggccatgcagaagtagtaacatttctggtagacagaaagtgccagcttaatgtccttgatggcgaagggaggacacctctgatgaaggctctacaatgcgagagggaggcttgtgcaaatattctcatagatgctggtgctgatctaaattatgtagatgtgtatggcaacacggctctccattatgccggttaatagtgagaattttggcaggggggggcaaacttgttgtcccatggtgcagtcatcgaagtgcacaacaagaaggaacatctgcaggaacacctgatgaggctgcacccttggcggaaagaacacctgacacagctgaaagcttggtggaaaaaacacctgatgaggctgcacccttggtggaaagaacacctgacacggcnnnnnn

SEQ ID NO: 11382 - DNA, 976 bp, Homo sapiens
tccctatgccatttccacaggctcagggtcaagcaagtcatgtggcaactggtcagaaaagatactgtcaaacctctcaaatgacccctgggtcttagatcccacaaaacaatgaattcaagaatgaaaaaaaaaatgaaggaatgtaggactgaaaaaaagcagcccttctccaccccgcgtacgcgggggggatctgaaccaccttgtctcagccaccatgagtggtgtcaccacctgcctccgtttccctggccagctcaatgctgacctccgcaagttggcagtcaacatggtccccttcccacgtctccatttctttatgcctggctttgcccctctcaccagccgtggaagccagcagtatcgagctctcacagtgccggaactcacccagcaggtcttcgatgccaagaacatgatggctgcctgtgacccccggcacgtgcgatacctcaccgtggctgcatgtcttccgtggtcggatgtccatgaaggaggtcgatgagcagatgcttaacgtgcagaacaagagcagcagctactttgtggaatgcgatccccaagcaatgtcaaggacagcggcctgtgacaatcccagctcgtggcctcatagatgggagtcacctttcattgggaataggacaaggcatccaggagggtcttcaaggggatgtcggaagcaggtcattggccatgtgcccggccaggaagcgctttccttcacatgcgtacccaagggcgaagaggcatgggacgaaaaaggagtaaaccagaggggtgtaacacgacatgtaaaagaccctgtcttgcaaatctacagggaaccagagagggggccccgcgaaaaacagaggagagacacataagagggggccacacaaagcgcctacgagaaacaccaacaaacagaaaggaggcagagagacacaacagcggaacagaaacaggccgactcataccgcacaaagaggta

SEQ ID NO: 11383 - DNA, 429 bp, Homo sapiens
acgcgggggcccctgcgggcctctctccgtcgccatggaaacgaaagcggccaagtagagctccgtcctgacgcgccgcctcccgtgggctccggccggctaagccgcggcggacaactatgctgaaagccaagatcctcttcgtggggccttgcgagagtggaaaaactgttttggccaactttctgacagaatcttctgacatcactgaatacagcccaacccaaggagtgaggtttgagtcctgctggccggccctgatgaaggatgctcatggagtggtgatcgtcttcaatgctgacatcccaagccaccggaaggaaatggagatgtggtattcctgctttgtccaacagccgtccttacaggacacacagtgtatgctaattgcacaccacaaaccaggctctggagatgataaaggaagcc

SEQ ID NO: 11384 - DNA, 402 bp, Homo sapiens
  misc_feature 402: n = A,T,C or G
actggacagagctaggaaagcaaacccatttgcttcttcctgcaggaaaccccttgaggttaagaccccacaatcacatgaggatggagtggctcaccctcagtcaacaggccagactcaaggggttcctggcaagtcatttctccctcaggccttcggtttcctcacctacaagatgagagggctggaccagatggaaattcagggggtaagggggatgtcctcgctcagcccacccccacccccacgggaccctggagcctccatcccagttcccaccacgcgcctgctccacaaatcctacccaaggtgctgtcatctatatgatctcagtattttaaacatcagcttccagcccatatggtggttcatgcttgtaatatcagctgttgaagaggcgcn

SEQ ID NO: 11385 - DNA, 762 bp, Homo sapiens
caggttatcatccagcgggtaaggaaggtgttgaggtgggggccggtgttcaaatactggggcgatgccgccgccttttttttcgtgcgtgagagggggcagtacaggcacgtggggaatggactcacccgcgagatcatcaccgagttcttggaaaatgaaggcagaaggtttgccaggttacatttacccagactgtccaataggtggaacctatgatttgaagagggttctgggtcaaatgggcatcactaaggttttcaacaatgggggtgacctttcgggggtctcaaaggaggcaccccttaagcttttcaaggccgtgtataaggttgtggtgaccattgaagagaaagggactgaagctgctggggccatgtttttagaggccatacccatgtctatcccccccgaggtcaagttcaacaaaccctttgtcttcttaatgattgaacaaaataccaagtctcccctcttcatgggaaaagtggtgaatcccacccaaaaataactgcctctcgctcctcaacccctcccctccatccctggccccctccctggatgacattaaagaagggttgagctggtccctgcctgcatgtgactgtaaatccctcccatgttttctctgagtctccctttgcctgctgaggctgtatgtgggctccaggtaacagtgctgtcttcgggccccctgaactgtgttcatggagcatctggctgggtaggcacatgctgggcttgaatccaggggggactgaa

SEQ ID NO: 11386 - DNA, 597 bp, Homo sapiens
  misc_feature 1, 584, 585, 586, 587, 588, 589, 590, 591, 592, 593, 594,595, 596, 597: n = A,T,C or G
nacttttaagaaaaggcggggtttaactatgttggtcaggctggtctcaaactcctaacctcgcgatctgcccgccttggcctcccgaagtgctggaattacaagcatgagccaccatacccggcctgatacttttgcttttcttattgaggtataaaatgtaagcaccttaaaattcccttcccttatatgaacactgcattttgctggatttttcagacacttaatttcaacaaccaagtgaataactcttaacatggaaattagagcttggtcccagtgactcagagctaaggctaatattgagcctgcagaagaaatttaataacggccttgttagttttttctggggagtctctcctgcagatgtcccagccttctcactgaagccatggaagaagcctatctgctgagagaagctacagagtcctggaaagctgggggctcacaggcagatgcagttaaggttaacataaaaggggattgggagggtcttgctgatgatgaagttgttattgttttaaggcagtttctagactttgtaatgtataaccaagttcaatttatttaaaaaatttgaattnnnnnnnnnnnnnn

SEQ ID NO: 11387 - DNA, 4895 bp, Homo sapiens
  misc_feature 4893, 4894, 4895: n = A,T,C or G
agggagtcgacccacgcgtccgccgacgcgtcgctgcaaagcacctgtgagcttgcggaagtcagttcagactccagcccgctccagcccggcccgacccgaccgcacccggcgcctgccctcgctcggcgtccccggccagccatgggcccttggagccgcagcctctcggcgctgctgctgctgctgcaggtctcctcttggctctgccaggagccggagccctgccaccctggctttgacgccgagagctacacgttcacggtgccccggcgccacctggagagaggccgcgtcctgggcagagtgaattttgaagattgcaccggtcgacaaaggacagcctatttttccctcgacacccgattcaaagtgggcacagatggtgtgattacagtcaaaaggcctctacggtttcataacccacagatccatttcttggtctacgcctgggactccacctacagaaagttttccaccaaagtcacgctgaatacagtggggcaccaccaccgccccccgccccatcaggcctccgtttctggaatccaagcagaattgctcacatttcccaactcctctcctggcctcagaagacagaagagagactgggttattcctcccatcagctgcccagaaaatgaaaaaggcccatttcctaaaaacctggttcagatcaaatccaacaaagacaaagaaggcaaggttttctacagcatcactggccaaggagctgacacaccccctgttggtgtctttattattgaaagagaaacaggatggctgaaggtgacagagcctctggatagagaacgcattgccacatacactctcttctctcacgctgtgtcatccaacgggaatgcagttgaggatccaatggagattttgatcacggtaaccgatcagaatgacaacaagcccgaattcacccaggaggtctttaaggggtctgtcatggaaggtgctcttccaggaacctctgtgatggaggtcacagccacagacgcggacgatgatgtgaacacctacaatgccgccatcgcttacaccatcctcagccaagatcctgagctccctgacaaaaatatgttcaccattaacaggaacacaggagtcatcagtgtggtcaccactgggctggaccgagagagtttccctacgtataccctggtggttcaagctgctgaccttcaaggtgaggggttaagcacaacagcaacagctgtgatcacagtcactgacaccaacgataatcctccgatcttcaatcccaccacgtacaagggtcaggtgcctgagaacgaggctaacgtcgtaatcaccacactgaaagtgactgatgctgatgcccccaataccccagcgtgggaggctgtatacaccatattgaatgatgatggtggacaatttgtcgtcaccacaaatccagtgaacaacgatggcattttgaaaacagcaaagggcttggattttgaggccaagcagcagtacattctacacgtagcagtgacgaatgtggtaccttttgaggtctctctcaccacctccacagccaccgtcaccgtggatgtgctggatgtgaatgaagcccccatctttgtgcctcctgaaaagagagtggaagtgtccgaggactttggcgtgggccaggaaatcacatcctacactgcccaggagccagacacatttatggaacagaaaataacatatcggatttggagagacactgccaactggctggagattaatccggacactggtgccatttccactcgggctgagctggacagggaggattttgagcacgtgaagaacagcacgtacacagccctaatcatagctacagacaatggttctccagttgctactggaacagggacacttctgctgatcctgtctgatgtgaatgacaacgcccccataccagaacctcgaactatattcttctgtgagaggaatccaaagcctcaggtcataaacatcattgatgcagaccttcctcccaatacatctcccttcacagcagaactaacacacggggcgagtgccaactggaccattcagtacaacgacccaacccaagaatctatcattttgaagccaaagatggccttagaggtgggtgactacaaaatcaatctcaagctcatggataaccagaataaagaccaagtgaccaccttagaggtcagcgtgtgtgactgtgaaggggccgccggcgtctgtaggaaggcacagcctgtcgaagcaggattgcaaattcctgccattctggggattcttggaggaattcttgctttgctaattctgattctgctgctcttgctgtttcttcggaggagagcggtggtcaaagagcccttactgcccccagaggatgacacccgggacaacgtttattactatgatgaagaaggaggcggagaagaggaccaggactttgacttgagccagctgcacaggggcctggacgctcggcctgaagtgactcgtaacgacgttgcaccaaccctcatgagtgtcccccggtatcttccccgccctgccaatcccgatgaaattggaaattttattgatgaaaatctgaaagcggctgatactgaccccacagccccgccttatgattctctgctcgtgtttgactatgaaggaagcggttccgaagctgctagtctgagctccctgaactcctcagagtcagacaaagaccaggactatgactacttgaacgaatggggcaatcgcttcaagaagctggctgacatgtacggaggcggcgaggacgactaggggactcgagagaggcgggccccagacccatgtgctgggaaatgcagaaatcacgttgctggtggtttttcagctcccttcccttgagatgagtttctggggaaaaaaaagagactggttagtgatgcagttagtatagctttatactctctccactttatagctctaataagtttgtgttagaaaagtttcgacttatttcttaaagcttttttttttttcccatcactctttacatggtggtgatgtccaaaagatacccaaattttaatattccagaagaacaactttagcatcagaaggttcacccagcaccttgcagattttcttaaggaattttgtctcacttttaaaaagaaggggagaagtcagctactctagttctgttgttttgtgtatataattttttaaaaaaaatttgtgtgcttctgctcattactacactggtgtgtccctctgccttttttttttttttaagacagggtctcattctatcggccaggctggagtgcagtggtgcaatcacagctcactgcagccttgtcctcccaggctcaagctatccttgcacctcagcctcccaagtagctgggaccacaggcatgcaccactacgcatgactaattttttaaatatttgagacggggtctccctgtgttacccaggctggtctcaaactcctgggctcaagtgatcctcccatcttggcctcccagagtattgggattacagacatgagccactgcacctgcccagctccccaactccctgccattttttaagagacagtttcgctccatcgcccaggcctgggatgcagtgatgtgatcatagctcactgtaacctcaaactctggggctcaagcagttctcccaccagcctcctttttatttttttgtacagatggggtcttgctatgttgcccaagctggtcttaaactcctggcctcaagcaatccttctgccttggccccccaaagtgctgggattgtgggcatgagctgctgtgcccagcctccatgttttaatatcaactctcactcctgaattcagttgctttgcccaagataggagttctctgatgcagaaattattgggctcttttagggtaagaagtttgtgtctttgtctggccacatcttgactaggtattgtctactctgaagacctttaatggcttccctctttcatctcctgagtatgtaacttgcaatgggcagctatccagtgacttgttctgagtaagtgtgttcattaatgtttatttagctctgaagcaagagtgatatactccaggacttagaatagtgcctaaagtgctgcagccaaagacagagcggaactatgaaaagtgggcttggagatggcaggagagcttgtcattgagcctggcaatttagcaaactgatgctgaggatgattgaggtgggtctacctcatctctgaaaattctggaaggaatggaggagtctcaacatgtgtttctgacacaagatccgtggtttgtactcaaagcccagaatccccaagtgcctgcttttgatgatgtctacagaaaatgctggctgagctgaacacatttgcccaattccaggtgtgcacagaaaaccgagaatattcaaaattccaaatttttttcttaggagcaagaagaaaatgtggccctaaagggggttagttgaggggtagggggtagtgaggatcttgatttggatctctttttatttaaatgtgaatttcaacttttgacaatcaaagaaaagacttttgttgaaatagctttactgtttctcaagtgttttggagaaaaaaatcaaccctgcaatcactttttggaattgtcttgatttttcggcagttcaagctatatcgaatatagttctgtgtagagaatgtcactgtagttttgagtgtatacatgtgtgggtgctgataattgtgtattttctttgggggtggaaaaggaaaacaattcaagctgagaaaagtattctcaaagatgcatttttataaattttattaaacaattttgttaaaccaaaaaaaaaaaaaaaaaaactacggcgctgcaagcttattaacctttagtgagggttaannn

SEQ ID NO: 11388 - DNA, 1010 bp, Homo sapiens
gagtcgacccacgcgtcctcttggggaaaggaaggttcgtttctgagttagcaacaagtaaatgcagcactagtgggtgggattgaggtgtgccctggtgcataaatagagactcagctgtgctggcacactcagaagcttggaccgcatcctagccgccgactcacacaaggcaggtgggtgaggaaatccagagttgccatggagaaaattccagtgtcagcattcttgctccttgtggccctctcctacactctggccagagataccacagtcaaacctggagccaaaaaggacacaaaggactctcgacccaaactgccccagaccctctccagaggttggggtgaccaactcatctggactcagacatatgaagaagctctatataaatccaagacaagcaacaaacccttgatgattattcatcacttggatgagtgcccacacagtcaagctttaaagaaagtgtttgctgaaaataaagaaatccagaaattggcagagcagtttgtcctcctcaatctggtttatgaaacaactgacaaacacctttctcctgatggccagtatgtccccaggattatgtttgttgacccatctctgacagttagagccgatatcactggaagatattcaaaccgtctctatgcttacgaacctgcagatacagctctgtttgcttgacaaacatggaaagaaagctctcaagttggctgaaggactggaattgtcacgaacaaaaatctccaagcccttcttgtctgtcaggccttgagaactttgaaaccagaagaagtgtgagaagaactggtagtggtggaagcatagtgaacccactgattacgtattggttcatgtcacaccacctatttttagaacaacacgtcttagaaatctggttcacgtgttccttgtgaacacctttgttctcccttctgccagctttctacaacaacatgtcgggggtctgtctcctaaaaaaaaaacattgcgccgccacaatttac

SEQ ID NO: 11389 - DNA, 926 bp, Homo sapiens
  misc_feature 923, 924, 925, 926: n = A,T,C or G
actactcgattgtcaacgtcaaggagtcgcaggtcgcctggttctaggaataatgggggaagtatgtaggagttgaagattagtccgccgtagtcggtgtacgcggggattcccatggctggccagaggaggaacgcttttgtgttctcatcggagctgcatgggaagtctgcattacagcaaagtgacctgcatgcctcaccttatggaaaggatggtgggctctggcctcctgtggctggccttggtctcctgcattctgacccaggcatctgcagtgcagcgagacccatccactgtggaggacaagtgtgagaaggcctgccgccccgaggaggagtgccttgccctcaacagcacctggggctgtttctgcagacaggacctcaatagttctgttccctgaacgtcattgtggacgggaatggagagttcattgtcaggatggccctcttccaagaccagaactacacgaatccttacgaaggggatgcagttgaactgtctgttgagtccgtgctgtatgtgggtgccatcttggaacaaggggacacctcccggtttaacctggtggcctggcctatggtcctcctgactgttctgagagctccgctgagcatctggccttgaagtttgtgttcttccctctggcaatggctcccttcagcacttctgctttccactccaattcacacaggcttggtattaacagaatcaaggccaggctaggttaggaaaagggaagagctttcaccttctttaaaactctcggctgggcgcagtggctcatgcctgtaatcccagcattttgggaggctgaggcaggtggatcacctgaggtcagcagttcaaaatcagcctggccaaaatgctgaaactccgtctctactaaaaatacaaaaattagccaggcatggtggcannnn

SEQ ID NO: 11390 - DNA, 4174 bp, Homo sapiens
  misc_feature 1, 2, 3, 4, 5, 6, 100, 120, 217, 4166: n = A,T,C or G
nnnnnncacaaggtcgttttactaaacggaaacttaagaaaaagaaaagccacatcagccggcacaagcctctctaactttgtgtgccctgaggctcatnagatgcgaagtcctggcganaagatagggtcgcccgcagtggcttcctaaagcgcagatccaggccggctcccagcgtggaatccgacccatgtacttcgcctctccacgtggcatnagatgctctgccggctgtcaccgtgaactccagccctcgcggagccgacactgacctggctacttcagagttcggagggaaatagcgtctccgtaccctcgccccacctgggctgctcctcggaccgccgctcgtcccagactccaggaggcgccaccaggcctcgctgaccccgctccatatctccgggagccctcagctggtcggccgcggcgaccggaagctccggactgaggtactggttccgcccgccgctcttccagccgagactcggcagcggcggtcggagcggctgccacgccgcacctgcccgcgagggggcgcgccaggcccaggccgcagccgactgccgcgctctctgcccccgccctccgccatccccggactgcgctcacctgtctgggccgctggcctgggaggcgggggccggcgggagccaagccgaggaaagggcggagcggctctccgggcgcgtcatcggagcaccatggcggagctaggagctggcggcgacggccacaggggcggcgacggcgcagtgcgaagcgaaacagcacccgacagctacaaagtgcaagataagaaaaatgcctccagccgccctgcctctgcaatttcaggacaaaataacaaccactcaggaaataaaccagaccctccgcctgtgttacgtgttgatgaccggcagcggctggcccgggagcgacgtgaggaacgggagaaacagctagctgcaagagaaatagtgtggttagaaagagaagagcgagccaggcagcactacgagaagcacctggaagagcggaagaagaggttggaggagcagaggcagaaggaggagcggaggagggctgctgtggaggagaagcggaggcagagacttgaggaggacaaagaacgccacgaagctgttgtacggcgcacaatggaaaggagccagaagccaaaacagaagcataaccgttggtcgtggggaggctctctccatgggagccctagcatccacagtgcagatccagacaggcggtcagtttccaccatgaatctttcgaaatatgttgatcccgtcattagcaagcggctctcctcttcatctgcaactttactaaattctccagatagagctcgccgcctgcagctcagcccatgggagagcagcgttgttaacagactcctgacgcccacacattcgttcctggccagaagtaaaagcacagctgccttgtctggagaagcagcatcttgcagccccatcatcatgccctacaaagctgcacactctagaaattcgatggatcgaccaaaactctttgtaacaccacctgagggctcttctcgcaggaggatcattcatggcacagcgagctataaaaaagaaagagagagagaaaatgtactcttcctcacatctggcacccgaagggctgtatctccatctaatcccaaagcaagacaaccagctcgctcccgactttggcttccgtccaagtctcttcctcatttgcctggcacacccagaccgacatcctccttgccacccggctcagtcaaagctgctcctgctcaggtccggcccccatcccccggcaacatccgccctgtcaagagggaagtcaaagtggagcctgagaagaaagatcctgagaaggaacctcagaaagttgccaatgagccctcactaaagggcagagcacctttagtgaaggtagaagaagccacagttgaagagcggacacctgctgaaccagaagttggccctgctgctccagccatggccccagctccagcctcggccccagctccagcctcggccccagctccagccccggtccccaccccagccatggtctcagccccgtcatccactgtgaatgccagtgcttctgttaagacttctgcaggcaccaccgacccagaggaggccacaaggcttctagctgagaagaggcggctggcccgagagcagagagaaaaggaagaaagggagaggagggagcaggaagagcttgaaagacaaaagagagaggaattggctcaacgtgtggctgaagagaggacgactcgccgtgaggaggagtcgcgcaggctggaagccgagcaggcccgggagaaggaggagcagctgcagcggcaggcggaggagcgggcgctgcgcgagcgggaggaggcagagcgcgcccagaggcagaaagaagaagaagctcgcgttcgtgaagaagcagagagggtccggcaggaacgagagaagcatttccagagagaagagcaagagcgcctggagagaaagaagcgacttgaggagattatgaaaagaaccaggagaacagaagctacagataagaaaaccagtgatcagagaaacggtgatatagccaagggagctctcactggaggaacagaggtgtctgcacttccatgtacaacaaacgctccgggaaatggaaagccagttggcagcccacatgtggttacctcacaccagtcaaaagtgacagtggagagcactcccgatttggaaaaacaaccaaatgaaaatggtgtatctgttcagaatgaaaattttgaagaaattataaacttacccattggatctaaaccatccagattagatgtcaccaacagtgagagcccagaaattcctttgaatccaattttggcctttgatgatgaagggacacttgggcccctgcctcaggtagatggtgttcagacacagcagactgcagaagttatatgagtgtttcttctgaagaaccaaagctgaaatttaatgagaatttctacaattaatggaattcctttcctgctataaaggagcatcccctccacccgttttctagagttcttgaccatcattttgaaaagatttattaaaactagctaaagacaacagactggatagcttttctaataattttcatcaataggaaaaaagaaatacgtctcattcttcaatactttaaaatggctttttccagtgtgctccttcttagcaatcaatatttttctgcattctttaaaagacaagagaatttggttataaaagaaatgggctgactaggcatgatttttttggtcttaaaagcttaacatgtaaaattggcaaaaaaaattttttaccttttataatacttgaaaaataagtacctctttgttctacaagtagaatgaataggagaagagtttaagcctgtttttttaaaatattattgcaaagagctctatttgtagaagcaaattataggcagattaccaggttcttataaatacagcttgtacatggacattctgcaaacccagctgtcacatttttcttgcaactccttttgcaaaagcagactaaaatgttttaaaatgtgaaaaaacattattttttcaaagcaagaaaataatttactgccctcttacataatgtatttataaagtttttccagataaactaatcaaataaattagaataatgtgacaacattacaaatttaatttgttagctgcattccttctgatgttaccacgatagaatgttactgatgattcagggctatttctgaagtctgtatgttgctgctgtccccagtgatggtggacttatctttgccttacctgatcacaaattatgttggggaaaataaagatttaatatttctttaaatagaaaaagaatttggttttgctcgtttaagagcaatgagaaaatgatggaatgttgactgtgtttggcacacaggacacggaccttcatggaagtccttgctctgcgtggcatctgtcagcttttcacctttcattcttattcttcacttttgctgctgagcctagctgcgaactgcgttctggatatccggtttcctcagacctgtatgacaagagggggctttgcgggcaaaataaccgcgtggcctacaaagggcgcggggacttactacagcgtatttgttgtacgaatatncgctgctc

SEQ ID NO: 11391 - DNA, 1017 bp, Homo sapiens
  misc_feature 1, 2, 3, 4, 1016, 1017: n = A,T,C or G
nnnnagcaacaaggctgtttatttcacctgggtgcaggcgggctgagtccgaaaagagtcagcgaagggagataggggtggggccattttataggatttggttaggtagtggaaaattacagtcaaagggggttgttctctggctggcaggggtgggggtcacagtgctcagttggggagcttttgagccaggatgagccaggagaaggaattttacaaggtaatgtcatcagctaaggcaggaacaggccattttcacttcttttgtcattcttcagttacttcaggccatctggatttatacgtacaggtttgggcccagaggcctgacaggaagggcagtaggagaggtggtcgtagatgatgggccagagggcgcagggcctagcaggccatggaaaggactctaggttttacgctaggtaaaatgaggaggcactgcagggctttgagcagcagagtaacacagtctaacttactttttttttttaatggatcctaccagctgctaagttaagaataatttccagtgagggcttttgtagtaaattagagatgatgctggtttgtcaatctccccttccagcagaggaatgtgtgggtaagagagtcacaatgtttctgaacaaagccatagctcctaagtggtgaagctgggcctagagcccctgtttcctgacagctggcctggcggtgggctctgtacagcattgattcccagccagcagcacaccctgaaaagtcacatagcagtgggagtgcagatgcttaccccctccccatcagaaccactcagttggaatcttcagggttggggccaggtcagcagcagccgcagaagatactctggtcttcctgcttcagcagacaaaggtttctaagcccaaacgtgaggcatgaggataaatgaaattgtaaatggaagcagaaaaatgtccaggtctgagttcctctgctgtgttttagtcagtttcagtgcagtattttagctctaaacaatgctttttaggtctgann

SEQ ID NO: 11392 - DNA, 1332 bp, Homo sapiens
acgcgggggtaactgaaaatccacaagacagaatagccagatctcagaggagcctggctaagcaaaaccctgcagaacggctgcctaatttacagcaaccatgagaaaaggccacttaaggatgcagcaagaaggagccatctgcaatccaggaagaaattccttgccaggaaccaaattggttgtcaccttcatctaggacttctagcctcgagaacttacaaatggtgatgatcatcaggtcaaggatagtctggagcaattgagatgtcactttacatgggagttatccattgatgacgatgaaatgcctgatttagaaaacagagtcttggatcagattgaattcctagacaccaaatacagtgtgggaatacacaacctactagcctatgtgaaacacctgaaaggccagaatgaggaagccctgaagagcttaaaagaagctgaaaacttaatgcaggaagaacatgacaaccaagcaaatgtgaggagtctggtgacctggggcaactttgcctggatgtattaccacatgggcagactggcagaagcccagacttacctggacaaggtggagaacatttgcaagaagctttcaaatcccttccgctatagaatggagtgtccagaaatagactgtgaggaaggatgggccttgctgaagtgtggaggaaaaaattatgaacgggccaaggcctgctttgaaaaggtgcttgaagtggaccctgaaaaccctgaatccagcgctgggtatgcgatctctgcctatcgcctggatggctttaaattagccacaaaaaatcacaagccattttctttgcttcccctaaggcaggctgtccgcttaaatccagacaatggatatattaaggttctccttgccctgaagcttcaggatgaaggacaggaagctgaaggagaaaagtacattgaagaagctctgaccagtatatcttcacaggcctatgtctttcaatatgcagccaagttttatcgaagaaaagggtctgtgggataaagctcttgagcttctttaaaaatgggccttgggagacaacacccacttctggccttcctggcattcaccaaatggggggctttgctacagggcacaaatgatccaaatcaaggaagctacaaactggcagcctagaggggcaagatagggaaactgtggacagattggttcaattggctatatgcaaattttgaaaagactataatgttaaagcgaaccatttggagatgggcctatgttgacctggctgaaacgtatgcagaaataggccaccacagaaaggctgaggaacatttttcagaaagggttac

SEQ ID NO: 11393 - DNA, 292 bp, Homo sapiens
  misc_feature 1, 2, 3, 4: n = A,T,C or G
nnnnacgcggggagctcacaaagagtcaccgcagaaacacttctggcacaccttccatagcagtgtctggaacctctctctcctcagatcagagtcgatctgagttagatttgagtgagtcatttacagaagactcagaggatactgtaagcataagaagcaagtctgtccctggggctttagacaaggactccttggaagagactgaagaaagcattgatgccttagtgtcctcgcagttatctacaaacactcaccgtctggcaagtggcctatcaactaccagccttaa

SEQ ID NO: 11394 - DNA, 681 bp, Homo sapiens
  misc_feature 680, 681: n = A,T,C or G
atatcatgggttattaaagttcacgtgattcatgtgaaattaactgtcctttttgctagtgccaaaacagtgccttctctgcacactttacttgtttataaagttctcccacatgtccttaaatatcaagggggaaagtatggatattcgcgtagcaataatgccagcaaaggtcattttcattttttagtcatatagatatgaaaataagttcatatagatatgaaattgcttgactttattgttttggggagatttttttttccttacatgattatattaaacactttaaaatagccttccggtttctctggcctccacctgattaatgggccctttatctttggtgtcccctaggagtgtccagttgttttattgctgtattttgttattgcagtaccttaataaaaattgttgatagggccccaaaaccccacagaaattcctatgtcctgtaaaaacccaacaaaggcattggacttgtgtgaatgtacagggtttttttagtagtaattttaaatttaaatgttttaagtgatcatcagtgttcctttttacttataaaagttggattcttgttttagaatgttgtaataaataaaaactgctgctttaccactgtaaaatatgctttctgatgtggtgtatttttaaaataaatttttaatatttaaaccaann

SEQ ID NO: 11395 - DNA, 676 bp, Homo sapiens
  misc_feature 1, 2, 3, 4, 5, 6, 7, 8, 9, 10, 11, 12, 13, 14, 15, 16, 17,18, 19, 20, 21, 22, 23, 24, 25, 26, 27, 28: n = A,T,C or G
nnnnnnnnnnnnnnnnnnnnnnnnnnnnctctcaaatacataggggcttttcccctgggcagtttgcattccacaattacttgtttagggttttccaagctcccagtgctgggctgtgtctccgtgcctgccccaggggctttcatggtaaagagagatgagaaaaagagccataaagccataaacttgagttgtgagcgaagcttcttaggccatccatcagtcaaagagctggaaaagatgttgtccccaagatcctacctagtggggaaaaccaagcaggagggcgctttctgaaaagcctgtgaaggtgattccccagcccacccaggtccccccattcatcctgaggagacagcggggaagcacgaggttaaaagtgaaaaaaagaaacagaacttcagactctgttatttgttatgataacactgtattcttttcagcatggctaaattattctttatagtagttttcagattaattcatttcaaaagaaatcttactcagaagtgcactgtataaaagcgtgctctccacgcagagacgctctgagggagcaggggagagcccacttctgagggaccctggggctccatacatcagtgtgaagcccgctgagcccttgtgctcaaaggcctcattgaagccagcttccaaaggctgtcccctaaaatgt

SEQ ID NO: 11396 - DNA, 2051 bp, Homo sapiens
cagagacagactttattgcttacattggacccttgagataagtgaggattccccctaaatgtttcagaatcatcttagtctcatcctttctttctctccagccagagaaatcttgggaaattgacctgaaacaactggaatatctaattgatgaaaagacagcttgtctcattgtcaataatccatcaaacccctgtgggtcagtgttcagcaaacgtcatcttcagaagattctggcaggtacgtccagcagacttcacagaggacgaggtggggacagaatccttcagctgttgtgtgaaatgacaaaaaccagtcattccctaagttccaagcctggggtggaggtggggagctccactgatgtctctcatcaatactgtgccataggagtggtaggcctggccttaatttctggcacaggaaattggcctgttctccctccttctgataagttggcctctccctcctgttggtataggttggaattgagatggaacatttcccagaatttgagaacgatgtggagttcacggagcggttagttgctgagcagtctgtccactgcctcccagcaacgtgctttgagtacccgaatttcatccgagtggtcatcacagtccccgaggtgatgatgctggaggcgtgcagccggatccaggagttctgtgagcagcactaccattgtgctgaaggcagccaggaggagtgtgataaataggcctgcatccattctcctgaggatgtgtcccatctagggaaggctggactaggccttgcggctccttagggactcaggtggccctactgggagaggggcctcaaatgcaccatgtcaagggttcaagattgttcctgcttttccccaagtacaaccacacccacactcagatcctcctcattcacatcgcagattctcccttgctctgcgctgctagagtgactcactaattcattaatctgcctccctctcgtaagatttccttctttttttcttgaaagaaccaggtgaacaaagtttaccagaaagcagttgagacaagaaaataagagctcaggatgagggaaaagaaaaagattgagagaatttgtgcccccaaccatttcctcagactctaagaaagaacacgctctctccaggcaggtctgaagctcaactctcttattgcctcacttcaggtatacctcactttacacaatagaattataactggaaagaagttggggacacatgtatttggtgattacattttaaacacattaggaaaagttgctatttgaactttttattgatttttggggggagtaaagaattattttgtgatgcaaataaatatcctttaattgatcgacttgccaaatttagatttgtgtgcatcaggctttctttttttttctttttttagagaagttcaatataagcttttcttttctttgtttctttctttctttattttgagatggagtcttgctctgtcgcccatgctggagtgcagtggcgcgatctcggctcactgcaacctccacctcctgggttcaagcgattctcttgcctcaacctcccaagcagttgggactacaggcgtgagccaccatgcccggctaatttttgtatttttagtagagacagggtttcaccatgttagccaggctggtctcaaactcctgacctcaggcaatctgcccgcctgggtctcctaaagtactgggattacaggcgtgagccacctcgcccagcggcatcaggctttcttaaagtgagagcacgcctgtactagagcaagcaggaatcagagaccttccagaaatactactgtgtaagggccagaaatatcttcacttgtcattgttatataatcattattacttttgctgtaatgttaatattgatttattaatatatattatcttttcatacattttctaagaaacatttatattgataagatcttttattttgccaagggcataaattattgtttttcttttttttttttttaataaatttcaccaagtaaaaaaataaaaaaaaaaaaaaaaaaaaaaaaagt

SEQ ID NO: 11397 - DNA, 1823 bp, Homo sapiens
  misc_feature 1814, 1821, 1822, 1823: n = A,T,C or G
acgcggggggaggtggatttagagatacctcccctccttctgctcagctgccttgcagtaattaaactctttctctgctgcaacacccctactgttctccgtgtattggcttttctgggcagcaggaaggaaaagctgatgcgatgctctcagtgccgcgtcgccaaatactgtagtgctaagtgtcagaaaaaagcttggccagaccacaagcgggaatgcaaatgccttaaaagctgcaaacccagatatcctccagactccgttcgacttcttggcagagttgtcttcaaacttatggatggagcaccttcagaatcagagaagctttactcattttatgatctggagtcaaatattaacaaactgactgaagataagaaagagggcctcaggcaactcgtaatgacatttcaacatttcatgagagaagaaatacaggatgcctctcagctgccacctgcctttgacctttttgaagcctttgcaaaagtgatctgcaactctttcaccatctgtaatgcggagatgcaggaagttggtgttggcctatatcccagtatctctttgctcaatcacagctgtgaccccaactgttcgattgtgttcaatgggccccacctcttactgcgagcagtccgagacatcgaggtgggagaggagctcaccatctgctacctggatatgctgatgaccagtgaggagcgccggaagcagctgagggaccagtactgctttgaatgtgactgtttccgttgccaaacccaggacaaggatgctgatatgctaactggtgatgagcaagtatggaaggaagttcaagaatccctgaaaaaaattgaagaactgaaggcacactggaagtgggagcaggttctggccatgtgccaggcgatcataagcagcaattctgaacggcttcccgatatcaacatctaccagctgaaggtgctcgactgcgccatggatgcctgcatcaacctcggcctgttggaggaagccttgttctatggtactcggaccatggagccatacaggatttttttcccaggaagccatcccgtcagaggggttcaagtgatgaaagttggcaaactgcagctacatcaaggcatgtttccccaagcaatgaagaatctgagactggcttttgatattatgagagtgacacatggcagagaacacagcctgattgaagatttgattctacttttagaagaatgcgacgccaacatcagagcatcctaagggaacgcagtcagagggaaatacggcgtgtgtctttgttgaatgccttattgaggtcacacactctatgctttgttagctgtgtgaacctctcctattggaaattctgttccgtgtttgtgtaggtaaataaaggcagacatggtttgcaaaccacaagaatcattagttgtagagaagcacgattataataaattcaaaacatttggttgaggatgccaaaaaaaaaaaaaaaggggggcagataaaaaaataatacaataaggaggggccaaagataaagggttaacacaaagttttggtaaaaagggggtcccatatagggagtcgattataagctaggagggccgggttaacaacgtcgtgcgtgggaaaacggtgtagctggggatctggtgaggggaaccttacttctggggggtgaccatattggaccaaataccctaagagagttaagagtcctagggtacatataaaagtttcaagtgtatagggtgttaacctagatgattatgttgtgtggagagtgggctacagagttgattctgaccatttcttccgcgtcngataaannn

SEQ ID NO: 11398 - DNA, 1761 bp, Homo sapiens
  misc_feature 1, 2, 3, 4, 5, 6, 7, 8, 9, 10, 11, 12, 13, 14, 15, 16, 17,18, 19, 20, 21, 22, 23, 24, 25, 26: n = A,T,C or G
nnnnnnnnnnnnnnnnnnnnnnnnnnaacaaagggaacgggggcccctttttttttttttttttttaaaaaaaagaaaacaatgtttattaggatattctggggtgagaggatggccaaagggactatgtacattctgtagtgcttgagcaataggctaacagaaaattcgaacatcacaaaaccacttccaaagtccatattgcaaaacttgtacttctacaggagatgttcttccaagggtgttggcaataaaggctgttgcaaaacagctatgtgaggcagccatgtgggagtgaccccaggagaatgctccggtgtcctctggaaagcagatacacaggacgatggacaaatgtgtcatcttctaccagtgggaagctcagtaaacacacaatataacatggagacccgcccgaagcctaactggaggcttctcaacaaagctcagtcgacccctcacccctgttccgaggagactgggtgtctgaacccctcactcaggaatgaattctaaaaataccctaaaaatcagaagccgccttctactctaccgtgctataaacctgcatgaaacagaacgaacataagctgaaacacaccctcgggttaagagtgaaaaatgcaacaccatccaaaagagtacaagaaaaaaaccccacagcctaaatctcacacagcttctcagcaggagttggattaaactgagaaaataattttaatatcaagggataatgcacgcaagatgggaaaactttaaagcaaactctgcagtgaaaagtgtttcccccactcccttgggcgagggaagggagaagaagatagataatgaggagaactataaggccctggattcaggtttctgaaactgttttttttttttcaaccctcggaggacaatcagctcttcctgaatccagaaaagcacatcagaaatgcccaatgacagaccacagccaaatatggcagggcaaactgatttggttctgcgatttccattctcctctccacatccgagaaatgccttcagctacagctaaaaaataataataataaaaaaaaattcccgatcaagcatgcttggcacaccaggaagctaatgctggatcatatagccctccaatcattgtgtgtgtgtgtgtgtgtgtgtgtgtgtgtgtgtgtgtgacagagagagagagagagaaccacgctttattggcggagccttatgtgccagcgaactgagaaggtccagggtaccttcacctgcactgccacagtcacccggtctcgccccaggtaatcaacctttactgattttcaacggccctggttccctatactcaggacatccactggattttctaattcttcttcctacttcactctagtcttaggatctgtgttatgcttgcaggtgtcaggggtcaatgtgcacattcgaagttttgctcctttgagcactgctgactgtttgctttcctcagctaaagcagctctggcatctcctattcccacctgcaccatggccggtacctgacagctgtgacttccccgccgctgtgcctacctggccaagctcatggccctctgaggcccagaggagtggctgcccaagtgctcagaggtggccttttaggctcaggatgaaggtgggtgtgtttgccttctctatcatggaagagctggatttgccattgtttgcacgtggcccaggacttacccctgggagactgagtctcagtttcatgaatgatttgtaaagagaatacagccggac

SEQ ID NO: 11399 - DNA, 2382 bp, Homo sapiens
  misc_feature 1, 2, 3, 4, 5, 6, 7, 8: n = A,T,C or G
nnnnnnnnaagtaaaatagctatttattcagcctgttgtcatgccaacatgttctgtgcatataccactataattagcacaccctttgtaacaggcaaaattgtacatcaagttgtatgtcatgttacctgattatataaaaatgtaaaatgaaaatgaattatcaattccttttaacattcctagtaaacaattcagcagtagacatgaggcacaaaatcttagtaaaatatgacacagggagagcaataatgtaactcttatttaaacttaacttgtcataatttgttattaatatacaaagacaacaaacttttaaaacattacatttactaagattctggcaataagacacagcataccaggcttgccactcaacttgttattgtaagtctcagcttcaatatgaagccgttttttttttttaatcaaaaccctgctttttacatgctaaatatcttggcaagtaggccattaaacatagtaatgaacttaagacagcaagagtgaggagttaacaaaagctaaacattgcagcctaaacaaaattcatacaaaaaaataaactatcactagttacataaaattttcctgactggttaaaacttagtataaaacatgcattttagaatctttagctatcaagttcaaaaagtaccaatgtctatttaaaataattcctctcccaagccaaagtgtagtcaaaattaattcaaatgacataacacattctaatgctaaaaaatattcattattactaaagtggaggtaaatcccagagcttttggggctttctcatgctgcaaatggctgtttctctggttcactcaaagcagcatatgacagcatccaaagatgacactaagctcagtaaagggcaagactgctggtagccagctctgacctccccgtgaagcatggctactgtgtccataatacaggatgtgtgaggatcaaaggcacactattctgctagctaaagagatagcaaaccaccccccaaccctaaaagctccttccccaggtaaataaaagtatacgaggggaaaaaattaaaatacacttatctacagagtaagggttttgaaatattaatgtaatccctccttcaaaaattctaactagagtcatctggtcatttctgattacatcttaaagatgtatccagattcaatttctgttggtttatccttagacgcttctagtcaaaagtattaattttattcccaaatatcttaaccactagtacgactgcagtgtattatctcccagagttatcaagcactggaagagaaaaaaatagatgttcaagcagcaggcaacatttatggccctttcacacagtggcatctgagtggctactgaatagtccaggaataattccaaaaacaagaaaattcatgcattttagtaaatatgttgtagttttcacagttgaaatttcctcagacattgcactttctttataagggaatcctgatttttcttaatgttatggtgagtcaggacttgaactagcagccttctttttcttcttcttactgtgtttcttatgcttctttttcttttttgttttttctgttgctttttctcgttcttcactgcttttcttcttttttgctcgcacctcctcaatatactctgattctgacaaggactcagatgataaaggtttatcttcagaatacatctttctctttttgctgagtcctttaatatccttttctttctcagttccatcttttgacttctttttcttttttaaactatccttactgtctgattcagtttctgacatggagctttcagaagatttatgtgaacggttcttctttttctttctccgttttccttgtttcttatcctcatcttcagaatcagaagaactgctggaagaatcagagcttgataagaagaagatgaatacctaccagatttcttcttttcttttttctttctctgtctttttttggatgagctctcacttccacttaacaatttctctctgtgtttttccagttctttcttccagttctcattcattttttcttcaaattcagccaaagccttggagcctttcttttccttttctagttgctcttttacttcttcccaggtaggccttggtcgattcagataatcctgtattgttggccctgaagactggattggaccccttgatctcgccattgctattgggttcatataggccacccgattgtcccgcttccccatggtgctggatcgcgcgcacagtagcacaccgagggaaaccgggccggagagacttaccctttaatatcttatagacttggtcccacctctcattacccttctttttcactagtgttcctattattgtatgctcatttctacccgcgt

SEQ ID NO: 11400 - DNA, 1139 bp, Homo sapiens
  misc_feature 1: n = A,T,C or G
ncagccgtcacgttgattagaagggcgacgtgactgttcttcccagaccccaattttgtgcgtgactccgtcaacactttctagcgcccccttgccgggtttacttcggctttccagtgccaatgcctggttcttgagttgtaaccggctgagcccctttgatgaagaagtcctcagtgcccccgagttctgaacgttaagtctttaaaataggctagctcactttgagtcattttgaaaggttgggagatggcctggtttaaaggtaccagactagacatgggcttccttactatgtcccgacacagacagataggcatcactattcaagaggactggggcttgcaaccacagattagcatcttatttgccatttaggtcccagattgcttgagcccaggagttcaagaccagcctgggcaacatagcaagacctcatctctacaaaaataaaaaaaaaattagccaagcatcatagtgcacgactgttgtcccaactactcaggaggctggggcaggacgattgcttgagcccaggagcttaaagctgcagtaagtggtgacttgccactgcactccagcctgggcaacaaagcaagactctgtctcaaaaaagaagagaaagctgaaagggttagagactcagcagatgtttctagataagaccagtttgtgacagatacagctgcattgttctataccactctttaccttcactgttcacactcagatacctccactagtaagggagacaagcaggttcgtgctaggtgagcctttccagaagagtactgcccagcccttcttcatcccagccttaacacactcaacaacccatttcttccaactgcaaaaaatctaaatgatactgtcccttttgtagtcagagaagtacatcttagatccccagctcagtctagctcagagaagaaaacaagaaaaatagagctctttcctcttaaagctaacccctgagtcacatactgtcacctaccccctctccctgccgcccccccaacacacacacactggtatttgagtggtaataaggtaaatgcctgacaacctattcttccacagaatccctaggctttctgtgtcaacagcttcccttagaagccaaatttgtgagcggacgc

SEQ ID NO: 11401 - DNA, 1322 bp, Homo sapiens
acgcggggaggataccatgatgggtgctggggtggcagctgtgtggtgcagccctgttggcagtgggcatctgggtgtcaatcgatggggcatcctttctgaagatcttcgggccactgtcgtccagtgccatgcagtttgtcaacgtgggctacttcctcatcgcagccggcgttgtggtctttgctcttggtttcctggactgctatggtgctaagactgagagcaagtgtgccctcgtgacggtgtgtgaaacccagctccacaggctgatgaccaagagtcccctcgcctttgacaccaggccctgggattcccaaaccctgctttggacccccctaggctcaggcttctgtctcacttttccgggggggggattagggcaaggagggcatgagggactgtctctccctaaaacccagacccctgttccccactcagttcttcttcatcctcctcctcatcttcattgctgaggttgcagcttgctgtggtcgccttggtgtacaccacaatggctgagcacttcctgacgttgctggtagtgcctgccatcaagaaagattatggttcccaggaagacttcactcaagtgtggaacaccaccatgaaagggctcaagtgctgtggcttcaccaactatacggattttgaggactcaccctacttcaaagagaacagtgcctttcccccattctgttgcaatgacaacgtcaccaacacagccaatgaaacctgcaccaagcaaaaggctcacgaccaaaaagtagagggttgcttcaatcagcttttgtatgacatccgaactaatgcagtcaccgtgggtggtgtggcagctggaattgggggcctcgagctggctgccatgattgtgtccatgtatctgtacctgcccgggcggccgaggtaccaggtgaccccaggccaggctccacgcacgttcatctacagcacaaacactcgctcttttggggtccctgatcgcttctctggctccatccttgggaacaaagctgccctcaccatcacgggggcccaggcagatgatgaatctgattattactgtgtgctgtatatgggtagtggcacttgggtgttcggcggagggaccaagctgaccgtcctaggtcagcccaaggctgccccctcggtcactctgttcccgccctcctctgaggagcttcaagccaacaaggccacactggtgtgtctcataagtgacttctacccgggagccgtgacagtggcctggaaggcagatagcagccccgtcaaggcgggagtggagaccaccacaccctccaaacaaagcaacaacaagt

SEQ ID NO: 11402 - DNA, 1299 bp, Homo sapiens
  misc_feature 1, 2, 1299: n = A,T,C or G
nnaccttgagggggcagtgaagctgcttgcctctggtgtgaagacccactgcccaccctgcaacccaggcttcttcaaaaccaacaacagcacctgccagccctgcccatatggttcctactccaatggctcagactgtacccgctgccctgcagggactgaacctgctgtgggatttgaatacaaatggtggaacacgctgcccacaaacatggaaacgaccgttctcagtgggatcaacttcgagtacaagggcatgacaggctgggaggtggctggtgatcacatttacacagctgctggagcctcagacaatgacttcatgattctcactctggttgtgccaggatttagacctccgcagtcggtgatggcagacacagagaataaagaggtggccagaatcacatttgtctttgagaccctctgttctgtgaactgtgagctctacttcatggtgggtgtgaattctaggaccaacactcctgtggagacgtggaaaggttccaaaggcaaacagtcctatacctacatcattgaggagaacactaccacgagcttcacctgggccttccagaggaccacttttcatgaggcaagcaggaagtacaccaatgacgttgccaagatctactccatcaatgtcaccaatgttatgaatggcgtggcctcctactgccgtccctgtgccctagaagcctctgatgtgggctcctcctgcacctcttgtcctgctggttactatattgaccgagattcaggaacctgccactcctgcccccctaacacaattctgaaagcccaccagccttatggtgtccaggcctgtgtgccctgtggtccagggaccaagaacaacaagatccactctctgtgctacaatgattgcaccttctcacgcaacactccaaccaggactttcaactacaacttctccgctttggcaaacaccgtcactcttgctggagggccaagcttcacttccaaagggttgaaatacttccatcactttaccctcagtctctgtggaaaccagggtaggaaaatgtctgtgtgcaccgacaatgtcactgacctccggattcctgagggtgagtcagggttctccaaatctatcacagcctacgtctgccaggcagtcatcatccccccagaggtgacaggctacaaggccgaggcgggcagatcatgaggtcgggagattgagaccatcctggctaacacggtgaaaccccgtctctactaaaaatacaaaaaattaccccggcgtggtggcgggtgcctgtagtcccagctacn

SEQ ID NO: 11403 - DNA, 2078 bp, Homo sapiens
ccgggcaggtacgcggggactactccagacagacggctttggaatccaccagctacatccagctccctgagagttgagaatggagagaatgttacctctcctgactctggggctcttggcggctgggttctgccctgctgtcctctgccaccctaacagcccacttgacgaggagaatctgacccaggagaaccaagaccgagggacacacgtggacctcggattagcctccgccaacgtggacttcgctttcagcctgtacaagcagttagtcctgaaggcccctgataagaatgtcatcttctccccactgagcatctccaccgccttggccttcctgtctctgggggcccataataccaccctgacagagattctcaaaggcctcaagttcaacctcacggagacttctgaggcagaaattcaccagagcttccagcacctcctgcgcaccctcaatcagtccagcgatgagctgcagctgagtatgggaaatgccatgtttgtcaaagagcaactcagtctgctggacaggttcacggaggatgccaagaggctgtatggctccgaggcctttgccactgactttcaggactcagctgcagctaagaagctcatcaacgactacgtgaagaatggaactagggggaaaatcacagatctgatcaaggaccttgactcgcagacaatgatggtcctggtgaattacatcttctttaaagccaaatgggagatgccctttgacccccaagatactcatcagtcaaggttctacttgagcaagatccgggacgaggagctgtcctgcaccgtggtggagctgaagtacacaggcaatgccagcgcactcttcatcctccctgatcaagacaagatggaggaagtggaagccatgctgctcccagagaccctgaagcggtggagagactctctggagttcagagagataggtgagctctacctgccaaagttttccatctcgagggactataacctgaaggacatacttctccagctgggcattgaggaagccttcaccagcaaggctgacctgtcagggatcacaggggccaggaacctagcagtctcccaggtggtccataaggctgtgcttgatgtatttgaggagggcacagaagcatctgctgccacagcagtcaaaatcaccctcctttctgcattagtggagacaaggaccattgtgcgtttcaacaggcccttcctgatgatcattgtccctacagacacccagaacatcttcttcatgagcaaagtcaccaatcccaagcaagcctagagcttgccatcaagcagtggggctctcagtaaggaacttggaatgcaagctggatgcctgggtctctggggcacagcctggcccctgttgcaccgagtggccatggcatgtgtggccctgtctgcttatccttggaaggtgacagcgattccctgtgtagctctcacatgcacagaggcccaggaccctccagactgaagagtccatgggcccctgtgccatgtgagagctacacagggaatcgctgtcaccttccaaggataagcagacagggccacacatgccagcgcactcttcatcctccctgatcaagacaagatggaggaagtggaagccatgctgctcccagagaccctgaagcggtggagagactctctggagttcagagagataggtgagctctacctgccaaagttttccatctcgagggactataacctgaacgacatacttctccagctgggcattgaggaagccttcaccagcaaggctgacctgtcagggatcacaggggccaggaacctagcagtctcccaggtggtccataaggctgtgcttgatgtatttgaggagggcacagaaacatctgctgccacagcagtccaaaatcaccctcctttctgcattagtggagacaaggaccattgtgcgtttcaacaggcccttactgatgatcattgtccctacagacacccagaacatcttcttcatgagcaaagtcaccaatcccaagcaagcctagagcttgccatcaagcagtgggggctctcagttaaggaac

SEQ ID NO: 11404 - DNA, 669 bp, Homo sapiens
ccacgcgtccggcgcgctctgcgagctggatgtccaggctgcgggcgctgctgggcctcgggctgctggttgcgggctcgcgcctgccgcggatcaaaagccagaccatcgcctgtcgctcgggacccacctggtggggaccgcagcggctgaactcgggtggccgctgggactcagaggtcatggcgagcacggtggtgaagtacctgaggagcccccctactgtcctggtcatctgtggcccggggaataatggaggagatggtctggtctgtgctcgacacctcaaactctttggctacgagccaaccatctattaccccaaaaggcctaacaagcccctcttcactgcattggtgacccagtgtcagaaaatggacatccctttccttggggaaatgcccgcagagcccatgacgattgatgaactgtatgagctggtggtggatgccatctttggcttcagcttcaagggcgatgttcgggaaccgttccacagcatcctgagtgtcctgaagggactcactgtgcccattgccagcatcgacattccctcagctggctggtgagcagaacaagaagaggaaatgctctggttcatcaggtcttcacagtggacaagtgccagtgactgacagtaaagatgccccgctccaccccgaccatagt

SEQ ID NO: 11405 - DNA, 3408 bp, Homo sapiens
  misc_feature 1, 2, 3, 4, 5, 6, 7, 8, 9, 10, 11, 12, 13, 14, 3408: n = A,T,C or G
nnnnnnnnnnnnnnaagcgggaggaactccgtcgtcctcccccgcgcgcctgcccgcggctggggaaccaagggcctggaggggaaacagctccctgctgcgttgttttgggctccgtgagccgaaagggggaggggagacgaaggagaagcaaacactgcgcagcgggaccgtgcgcggcctccgctcctgcgtgcgtgcgctcgctcgcgcgggctcatgtgctggcgcgtgaggcggaggcgggcggcggcggcggcgcctgcgcggtcggactcggtcgacggttcgcaggggaggaggcggcgggaggcggaggaggcggcggcggcgatggaggtgaagcggctgaaagtgaccgagctgcggtcggagctgcagcggcggggcctggactcgcgcggcctcaaggtggatctggcgcagcggctgcaggaggcgctggacgccgagatgctcgaggacgaggccggcggcggcggggccgggcccggcggggcctgcaaggcggagcctcggcctgtggccgcgtcgggcggcggcccgggcggggacgaggaggaggacgaagaggaggaggaggaggacgaggaggcgctgcttgaggacgaggacgaggagccaccccctgctcaagccttgggtcaggccgcgcagccgccgccggagcccccggaggcggcagccatggaggccgcggccgagccagatgcttccgagaagccggcggaggccacggccgggtcaggcggggtaaatggtggcgaagagcagggcctcggcaagagggaggaagacgaacccgaggagcggagcggggacgagacgccgggatccgaggtgccgggtgacaaggccgccgaggaacagggagatgaccaggatagtgaaaagtcaaaaccagcaggctcagatggtgagcggcggggggtaaagagacagcgggatgagaaggatgaacatggccgagcttactatgaattccgagaggaggcttaccacagccgctcaaagtctccactgcctcctgaagaagaggcaaaagatgaggaggaggatcaaactcttgtgaacctggacacgtatacctcggatctgcattttcaagtgagcaaagaccgctatggagggcagccacttttctcagagaagttccccaccctttggtctggggcaaggagtacttacggagtgacaaagggaaaagtctgctttgaggcaaaggtaacccagaatctcccaatgaaagaaggctgcacagaggtctctctccttcgagttgggtggtctgttgatttttcccgtccacagcttggtgaagatgaattctcttacggtttcgatggacgaggactcaaggcagaaaatggacaatttgaggaatttggccagacttttggggagaatgatgttattggctgctttgctaattttgagactgaagaagtagaactttccttctccaagaatggagaagacctaggtgtggcattctggatcagcaaggattccctggcagaccgggcccttctaccccatgtcctctgcaaaaattgtgttgtagaattaaacttcggtcagaaggaggagcccttcttcccaccaccagaagagtttgtgttcattcatgctgtgcctgttgaggagcgtgtacgcactgcagtccctcccaagaccatagaggaatgtgaggtgattctgatggtgggactacccggatctggaaagacccagtgggcactgaaatatgcaaaagaaaaccctgagaaaagatacaatgtcctgggagctgagactgtgctcaatcaaatgaggatgaagggtctcgaggagccagagatggaccccaaaagccgagaccttttagttcagcaagcctcccagtgccttagtaagctggtccagattgcttcccggacaaagaggaactttattcttgatcagtgtaatgtgtacaattctggccaacggcggaagctattgctgttcaagaccttctctcggaaagtggtggtggttgtccctaatgaggaagattggaagaagaggctggagttgaggaaggaagtagagggagatgatgtgcctgaatctataatgctggagatgaaagccaacttctctttgcctgaaaaatgcgactatatggatgaggtgacatatggggagctggagaaggaggaagctcagcccattgtcactaagtacaaggaggaggcaaggaagcttctgcccccctccgagaagcggacaaatcgccgaaacaaccgaaacaagcgtaaccggcagaaccgaagccggggccaaggctatgtgggcgggcagcgccgaggctacgacaaccgggcctacgggcagcagtactgggggcagcctggaaacagagggggttaccgtaatttctatgatcgatacaggggagactatgatcgattttacgggcgagattatgagtacaacagatacagagactattacagacaatacaatcgggattggcagagttactactaccaccacccccaggacagagaccgatactacaggaattactacgggtaccaagggtatcggtgaagcccctgccatggtcacctgtcagccatgaagctgaatctctgggggtgccaggcacccccgcaaaacacaaccaaggaaaacaggggctgtcggggtggggctgagctgccggggaggggtggtggggggggagggtgctcaagccgcgcgtggcggcacgggggaggtggcaacaaacaacaaaactgtacatctgtgtcaaagttggtgcacacacgaatatggtcttatactataagaacattacaaacctagttagcagattgtcatcacacaagcattggcgcagaaggcagcacttagggctgctgttctataacctacagccagaacagggcaaagaaccggaaaaatgggacaccttatggaccatcctgacgcaagctgggatgtgcagccacagtacacggagactgaattcacggtggcgtgggaactgtcagcgcagacacacgcgaggcagcctcaacaggaggtacggacacggaagaggagtgacacaaggggaacctggaaaccggggagcccggaacaaagaaaacggagtggcgcctaatacaaacgcacggtgtgcaagacaatgaacaaaacataaacgagggcgcgccatcaaggcagaccacgaaaggggcccgacaaatcagcacaccagactgggtgtaccagcggccccacgactagccaaaccacaccacacaccggcaaacaatcaaccagcaggaaacacagagcgacgagcacgacacacgtagcgatgacagagaacacacaggcaccacgcaaacagacacaatgattagcgccacatcatcgaacggacgaagacan

SEQ ID NO: 11406 - DNA, 1174 bp, Homo sapiens
gccccacgagacagaagacggcattgtcgattcactgtcccaggtcagtggtggtgcctgaagctgaggagacagggccctgtcctcgtccgtatttaagcagtggatccagaggggcaacgggggaggctgctggtgaatattaaccaaggtcaccccagttatcggaggagcaaccaggggctaagtccactggctgggatctgagtcccccgcgtacgcgggggacattttctcggccctgccagcccccaggaggaaggtgggtctgaatctagcaccatgacggaactagagacagccatgggcatgatcatagacgtcttttcccgatattcgggcagcgagggcagcacgcagaccctgaccaagggggagctcaaggtgctgatggagaaggagctaccaggcttcctgcagagtggaaaagacaaggatgccgtggataaattgctcaaggacctggacgccaatggagatgcccaggtggacttcagtgagttcatcgtgttcgtggctgcaatcacgtctgcctgtcacaagtacctcggccgaggtacgcgggacattttctcggccctgccagcccccaggaggaaggtgggtctgaatctagcaccatgacggaactagagacagccatgggcatgatcatagacgtcttttcccgatattcgggcagcgagggcagcacgcagaccctgaccaagggggagctcaaggtgctgatggagaaggagctaccaggcttcctgcagagtggaaaagacaaggatgccgtggataaattgctcaaggacctggacgccaatggagatgcccaggtggacttcagtgagttcatcgtgttcgtggctgcaatcacgtctgcctgtcacaagtactttgagaaggcaggactcaaatgatgccctggagatgtcacagattcctggcagagccatggtcccaggcttcccaaaagtgtttgttggcaattattcccctaggctgagcctgctcatgtacctctgattaataaatgcttatgaaatgaaaaaaaaaacataaaaaaaaaactcgagggggggcccggtacccaattcgccctatagggaggcgtattacaattcactgcccggtagtttacaacgtgttgactgggaaaaccctggcgttccccaaattaatcgcc

SEQ ID NO: 11407 - DNA, 703 bp, Homo sapiens
  misc_feature 392, 702, 703: n = A,T,C or G
accgcggcggcggccgaggtactgtgctcaaagctgaaaatgtttactgtctttcccctcacaaagttttcagactgctggcctagggttttcagggtggtggatagagacggtattaaccaaaacagagaaatcatccattattatgatgatgggtcagaaagaaagacggtatcaatcttggagcagttaaatgggaggtgtcaaaggacacacagcaaggcagcccagtgtgaaatggaaagctcatcccactgaaggggcgtggcactggctatcccctctgcctagtacatttttcttacagatcattgcactgcctggcttctactcattactcatccttcagggctgaatttaaatgtcactttctcagaccaggagcccttctncccaaccccccaacctaagcattcactacccataccttgctaactttctctattgcacttatcaccacctgaaattatcttgtttatcaatgtgtttaacatcttagactgttggctacttaaggacagggacctttcctctcttgttccccagtgtccccagtgccttgaatagtgtctgaaactgtgcaaccagtatttgggggaggtaaggagcagagaggaaggaaaataaataaaaagggacaactggagctcaggcaaaagtgggtcatctgcacagtttcgcaacataaaatctacccggacnn

SEQ ID NO: 11408 - DNA, 1570 bp, Homo sapiens
gctggccagggtggctctgatatagcagacctggtgtattttcgatatttcaggaagactggcagattggaccagaccctgaattcttctagctcctccaatcccattttatcccatggaaccactaaaaacaaggtctgctctgctcctgaagccctatatgctggagatggacaactcaatgaaaatttaaagggaaaaccctcaggcctgaggtgtgtgccactcagagacttcacctaactagagacagtcaaactgcaaaccatggtgagaaattgacgacttcacactatggacagcttttcccaagatgtcaaaacaagactcctcatcatgataaggctcttacccccttttaatttgtccttgcttatgcctgcctctttcgcttggcaggatgatgctgtcattagtatttcacaagaagtagcttcagagggtaacttaacagagtgtcagatctatcttgtcaatcccaacgttttacataaaataagagatcctttagtgcacccagtgactgacattagcagcatctttaacacagccgtgtgttcaaatgtacagtggtccttttcagagttggacttctagactcacctgttctcactccctgttttaattcaacccagccatgcaatgccaaataatagaattgctccctaccagctgaacagggaggagtctgtgcagtttctgacacttgttgttgaacatggctaaatacaatgggtatcgctgagactaagttgtagaaattaacaaatgtgctgcttggttaaaatggctacactcatctgactcattctttattctattttagttggtttgtatcttgcctaaggtgcgtagtccaactcttggtattaccctcctaatagtcatactagtagtcatactccctggtgtagtgtattctctaaaagctttaaatgtctgcatgcagccagccatcaaatagtgaatggtctctctttggctggaattacaaaactcagagaaatgtgtcatcaggagaacatcataacccatgaaggataaaagccccaaatggtggtaactgataatagcactaatgctttaagatttggtcacactctcacctaggtgagcgcattgagccagtggtgctaaatgctacatactccaactgaaatgttaaggaagaagatagatccaattaaaaaaaattaaaaccaatttaaaaaaaaaaagaacacaggagattccagtctacttgagttagcataatacagaagtcccctctactttaacttttacaaaaaagtaacctgaactaatctgatgttaaccaatgtatttatttctgtggttctgtttccttgttccaatttgacaaaacccactgttcttgtattgtattgcccagggggagctatcactgtactctgttcaaagctggagggtcattccaaccattctgaggacctgttgttccaggaggcagtgcataagctgaagatgatggtggagctcctggtccgccatgctggaaggatgctccagaggaagggggaggagggaaagaagtagcagggctggaggt

SEQ ID NO: 11409 - DNA, 918 bp, Homo sapiens
  misc_feature 1, 2: n = A,T,C or G
nnacgcctaccttttccaccaatcctcccctattttttttccaaactctttccctatttcccccccctattccaggtgttcccatatccctccggccataaaaacctccaattaaaacagggcaccaaaccgcccatccaaattgccaggaaaaattttcaacagataatctcataaacacctagtcaaccatcctccagaatcctaatattgatgccccatttcaccagaagagttgcacaagccccctgcctcagttgtacagcctttcagtattggaccgagaacatgcaaatactgaaatcaaataacactccgtagatttcctactagttatatggtggtattccaatgagataaattcattttatcctatgtacttcaaccaatccatctcatgctcaaagagtcagctactatataccttgatcagaggtgtcctgtcttcacggtcgcagaggttaagctcacatcttctggacaccaggagatgtaccatttccggttggccagtggcacaggccaaatgtagggcggtcctttccttcctgtctctcttattgatgtcataacgcgtgagcagaacgaacttcagttcctccagatcacgatagaagacagctctgtggatccccttcagatgatacggtttaatggggtattggggaaataagaagccatccgagcacaagcggtccctgagggtgggccacctcttcggctccttgtcatccataatggtcggctgcaaattgtagcctgcagccgtatttcagctcgccttcggggatcgccgcctccgaagagcaacaacaggcaaagcagtctgtccacggaccttcgcacagactctcggcgcctcccgcctctcagcagaaacgcccaacagaagccccgcgcacctgcccgggcggccgc

SEQ ID NO: 11410 - DNA, 2664 bp, Homo sapiens
  misc_feature 375: n = A,T,C or G
aaaatgcggggggggggtgtttaaacttacgcagattccagaagcttatatgacatcaaggctgtcatgaacatctgcatccctcatacagccagactatcagatggagctgacgacaggctactggctctgttactaacctagggcgtgatgctagcggataagtgcgtggaggatgtcatacagacgcaccactcacagggacttagtgtctactacggagacatcgaagatgccaagacacacatcatctgttacgcaggataacgtgtctcaccggctacttgaggattagagcaagagacttgacagatacacagcactctcctctgctgaatcacatcttctttacaggacaatgggagagactctttnaggtcgaagacaccgaggaagaggactttcactgggaccaggtgaccaccgtgaatggcctatgatgaagcgcttatgcatgttgaacatacatcactgtaagaagctgtccagctgggtgctgctgatgaaatacctgggcaatgccaccgccatcttcttcctgcctgatgaggggaaactacagcacctggaaaatgaactcacccacgatatcatcaccaagttcctggaaaatgaagacagaaggtctgccagcttacatttacccaaactgtccattactggaacctatgatctgaagagcgtcctgggtcaactgggcatcactaaggtcttcagcaatggggctgacctctccggggtcacagaggaggcacccctgaagctctccaaggccgtgcataaggctgtgctgaccatcgacgagaaagggactgaagctgctggggccatgtttttagaggccatacccatgtctatcccccccgaggtcaagttcaacaaaccctttgtcttcttaatgattgaccaaaataccaagtctcccctcttcatgggaaaagtggtgaatcccacccaaaaataactgcctctcgctcctcaacccctcccctccatccctggccccctccctggatgacattaaagaagggttgagctggtccctgcctgcatgtgactgtaaatccctcccatgttttctctgagtctccctttgcctgctgaggctgtatgtgggctccaggtaacagtgctgtcttcgggccccctgaactgtgttcatggagcatctggctgggtaggcacatactgggcttgaatccaggggggactgaatcctcagcttacggacctgggcccatctgtttctggagggctccagtcttccttgtcctgtcttggagtccccaagaaggaatcacaggggaggaaccagataccagccatgaccccaggctccaccaagcatcttcatgtccccctgctcatcccccactcccccccacccagagttgctcatcctgccagggctggctgtgcccaccccaaggctgccctcctgggggccccagaactgcctgatcgtgccgtggcccagttttgtggcatctgcagcaacacaagagagaggacaatgtcctcctcttgacccgctgtcacctaaccagactcgggccctgcacctctcaggcacttctggaaaatgactgaggcagattcttcctgaagcccattctccatggggcaacaaggacacctattctgtccttgtccttccatcgctgccccagaaagcctcacatatctccgtttagaatcaggtcccttctccccagatgaagaggagggtctctgctttgttttctctatctcctcctcagacttgaccaggcccagcaggccccagaagaccattaccctatatcccttctcctccccagtcacatggccataggcctgctgatggctcaggaaggccattgcaaggactcctcagctatgggagaggaagcacatcacccattgacccccgcaacccctccctttcctcccctgagtcccgactggggccacatgcagcctgacttctttgtgcctgttgctgtccctgcagtcttcagagggccaccgcagctccagtgccacggcaggaggctgttcctgaatagcccctgtggtaagggccaggagagtccttccatcctccaaggccctgctaaaggacacagcagccaggaagtcccctgggcccctagctgaaggacagcctgctccctccgtctctaccaggaatggccttgtcctatggaaggcactgccccatcccaaactaatctaggaatcactgtctaaccactcactgtcatgaatgtgtacttaaaggatgaggttgagtcataccaaatagtgatttcgatagttcaaaatggtgaaattagcaattctacatgattcagtctaatcaatggataccgactgtttcccacacaagtctcctgttctcttaagcttactcactgacagcctttcactctccacaaatacattaaagatatggccatcaccaagccccctaggatgacaccagacctgagagtctgaagacctggatccaagttctgacttttccccctgacagctgtgtgaccttcgtgaagtcgccaaacctctctgagccccagtcattgctagtaagacctgcctttgagttggtatgatgttcaagttagataacaaaatgtttatacccattagaacagagaataaatagaactacatttcttg

SEQ ID NO: 11411 - DNA, 1157 bp, Homo sapiens
  misc_feature 1, 2, 3, 4, 5, 6, 7, 8, 9, 10: n = A,T,C or G
nnnnnnnnnngtcatccgtctctggtctgtttcggcgctctctcttattttgtttcgtgctctttgctcctgtggtggtgctgctcgtcttattcttgttctctctgcttcattcaggtgtttcccgtctcctagttgtggtgtctttatccccgggtttttgtttttcgggctcatgttccccctttggtgttaaagcgtcttgctgcctagggtctcattttgggaattttaagtttcccacagggctcagcccagatttttgcagtgtaactgtgtttgccataattatttggattgttttaatccaaggattcagagctgaagagatcctggttttcagagcgactgacagggtgtagtcacgcaggtaagacctgtgcagcacacttcatagatgcagaacttaccacggatgtgccaggcctgcggctgctgctgccgccttctggaatatctaaagtgctttcacttggctcatcagggtctggaggattactgagtagactgtgaacatctcctcgacgacgttgtctgtgcctcctccgatactgaaattcagcatattcctctggtgatgcaaatcctaaatattcccaatcccatgttccaccagcaaagctgcgccttggagcttctggtgagtctgcaggagctactccccgagccacagatgccaggaattcttgcctcttctgctgtacaaggcatgctgctttgatgatcttgtggcggggtgtgcgaaggtaaggcctattgactttctgggcaaggtcttcagtgaccatttctaggtctgtttgcattagttcaaaaatttctttctttgtgcttttaggttccaagaaaaatccatatggataagaacacttgagaatgcgccgagtttttaagagcacatgaactgcatcttcaatgaaagtggtatctggacagcctccttcagtttctttgagagctctgctcaattgctccatcttttctttggctgttttaagaaggcgttgttctagctgataactatgctcatggtttttaaatcttgtataatagtgcataaatctgtcaagttcctgaaatcgtttgtgttttttctcagcctccacagtcatttccttggattgctcctccacgtgttgaatgacttcatagcgagt

SEQ ID NO: 11412 - DNA, 410 bp, Homo sapiens
caccgcggtggcggccgaggtacgcgggagaaataaaatgtggtcctaatgccaggactaaaatggacctagtgccaaattagtccaattgtagcctttgcttcagctggatcatcccgtgtttgttagagctcagctgtggccattattcatttgttgattgctgccccattcttggaagtgcataggcatcccattcatttgaagctgttttcttaaaaattatcattcacatttgatttttttttcctttttggctgcccaagatagcaatccaagatgtttaaaaacccagcatgtgattacaatataggggggactggaacatgaattgggtctataaggaagcagaatgatcccagaaaataagaaaaaaaaggctgcatactatatgcatgttgtgcacatgt

SEQ ID NO: 11413 - DNA, 809 bp, Homo sapiens
  misc_feature 1, 2, 3, 4, 5, 6, 7, 8, 131, 132, 133, 134, 135, 136, 809: n = A,T,C or G
nnnnnnnnccatttaccccccataaaagggaaaaaaagtgggggcccgggccccccccaaggggggcgggaatcaaaaagtttaaaatcaaatccccccggccgggggaacccctaattttaaaaggggcnnnnnntttttggttcttttttttttttttttttgctaggcaaggagggatgattatttattagcttctacagattagacaatggggtgggggtgggctcaaggtgagatgattttttgggtccaagtctactcaagacaggcatcccagtcttcggtctccaaatccacctcctgtctgtccccccacactgctcctcaggccttgtggatccattgactgtgatttctgtggttcagctcccacatcaggcaggaagggcagctactgggtctgagatcccacattgcctccaacccttgcttcctagctggcctcccagggcaccacgaggggctgggccaggctgctgtgctgcacgtggcaggagtagggggctgtgtcctgcggggggcactgccaccaccacccaggactgggtaagtgccatttccattgtgaagaacatctccccgtaactcaagcttctagacctcgcccgccccaagtccgtgcacatcatttttcctgggtagaagtcgtagccaagccctcaagttcttctttcttcctgcgcctcgtggcttgtgacccccccgagggaagatcttgcccggccacgaaatttttgccggatttcaagtttttcccaaaagatccaagggacttcttcttcaagtaagccttggccccttgaccn

SEQ ID NO: 11414 - DNA, 759 bp, Homo sapiens
  misc_feature 1, 2, 758, 759: n = A,T,C or G
nnctgcggcctggtctctctctcctatcctccccatggagcgccaaggtcctctgtcagagctctccctgtccccacaaccccagtaccagcacgaagagcctcctcccgaaagagtctcggctggacaccttctgggactagcagtgaatcgggacacaaaccacccaccccattgggagaaaaacccagacgccaggaaaagaagaaacaacaaaggcaggagaacagccactttcagacttgaaaatgacaaaaccctcagttgagcctgagcccccggcgcgggggctgctacactacaggacacccagcatcggctttgactgcagactgttcacccacacgagccctgtgcttttggtgtaaataatgtacaatttgtggatgtcattgaatctagaggactttcccctttttatatttgtattaactttaacttattaaaaaaaaaaaaagaaaaagaaaaacgatttaaaaaaaaaaaaaaagcaaccaaccccaacaacaaaaaagaatgttttggtattggagaagggatggtcagttagcctgtctgtcacacgacggaatggatactgggcccggggaccactttcatactcacgtcctcatccttggatacccaggggagggcgaaccgttttcgctcgtgtgtctgtacgcagcatgttgggatcggggagtttcggcacagactatcccatcaagccgttggctcctttcaactactacgttaccacgttcctaaaacgcaann

SEQ ID NO: 11415 - DNA, 1790 bp, Homo sapiens
gcgtccgggcctccgaggaaggcctagccgctgctgctgccaggaattccaggttggaggggcggcaacctcctgccagccttcaggccactctcctgtgcctgccagaagagacagagcttgaggagagcttgaggagagcaggaaagggcggcagtaagtcttcagcatcaggcattttggggtgactcagtaaatggtagatcttgctaccagtggaacagccactaaggattctgcagtgagagcagagggccagctaagtggtactctcccagagactgtctgactcacgccaccccctccaccttggacacaggacgctgtggtttctgagccagcagcctcccccgttgcccctctggatccactgcttaaatacggacgaggacagggccctgtctcctcagcttcaggcaccaccactgacctgggacagtgaatcgacaatgccgtcttctgtctcgtggggcatcctcctgctggcaggcctgtgctgcctggtccctgtctccctggctgaggatccccagggagatgctgcccagaagacagatacatcccaccatgatcaggatcacccaaccttcaacaagatcacccccaacctggctgagttcgccttcagcctataccgccagctggcacaccagtccaacagcaccaatatcttcttctccccagtgagcatcgctacagcctttgcaatgctctccctggggaccaaggctgacactcacgatgaaatcctggagggcctgaatttcaacctcacggagattccggaggctcagatccatgaaggcttccaggaactcctccgtaccctcaaccagccagacagccagctccagctgaccaccggcaatggcctgttcctcagcgagggcctgaagctagtggataagtttttggaggatgttaaaaagttgttaccactcagaagcctttcactgttcaactttcggggggacaacgaaggagggccaagaaacagattcaacgattacgtggagaagggtactcaagggaaaattgtggatttggtcaaggagcttgacagagacacagtttttgctctggtgaattacatcttctttaaaggcaaatgggagagaccctttgaagtcaaggacaccgaggaagaggacttccacgtggaccaggtgaccaccgtgaaggtgcctatgatgaagcgtttaggcatgtttaacatccagcactgtaagaagctgtccagctgggtgctgctgatgaaatacctgggcaatgccaccgccatcttcttcctgcctgatgaggggaaactacagcacctggaaaatgaactcacccacgatatcatcaccaagttcctggaaaatgaagacagaaggtctgccagcttacatttacccaaactgtccattactggaacctatgatctgaagagcgtcctgggtcaactgggcatcactaaggtcttcagcaatggggctgacctctccggggtcacagaggaggcacccctgaagctctccaaggccgtgcataaggctgtgctgaccatcgacgagaaagggactgaagctgctggggccatgtttttagaggccatacccatgtctatcccccccgaggtcaagttcaacaaaccctttgtcttcttaatgattgaacaaaataccaagtctcccctcttcatgggaaaagtggtgaatcccacccaaaaataactgcctctcgctcctcaaccccttccctccatccctggccccctccctggatgacattaaagaagggttgagctg

SEQ ID NO: 11416 - DNA, 1565 bp, Homo sapiens
tccagttttccacttcaaacttctatcttctccaaattgtttcatcctaccactcccaattaatctttccattttcgtctgcgtttagtaaatgcgttaactaggctttaaatgacgcaattctccctgcgtcatggatttcaaggtcttttaatcaccttcggtttaatctctttttaaaagatcgccttcaaattattttaatcacctacaacttttaaactaaactttaggctgtttaagtcaccttcattttaatctaaaagcattgcccttctattggtattaaggcggggctctgtagtcctttctctcaattttcttttaaatacattttttactccatgaagaagcttcatctcaacctccgtcatgttttagaaaccttttatcttttccttcctcatgctactcttctaagtcttcatattttctcttaaaatcttaagctattaaaattacgttaaaaacttaacgctaagcaatatcttagtaacctattgactatattttttaagtagttgtattaatctctatctttcacaagccaagcgcggtggataaaacctggtgtcccccaactggggggggcccaagcacgccctatacagggtcaggagatcgagaccatcctggctaacacggtgaaaccccgtctctactaaaaatacaaaaaaaaaattagctgggcgtgatggcgggtgcctgtatcccagctactcgggaggctgaggcaagagaatggcgtgaacccgggaggcggagcttgaggaaaccgcagataagtttttttctctttgaaagatagagattaatacaactacttaaaaaatatagtcaataggttactaagatattgcttagcgttaagtttttaacgtaattttaatagcttaagattttaagagaaaatatgaagacttagaagagtagcatgaggaaggaaaagataaaaggtttctaaaacatgacggaggttgagatgaagcttcttcatggagtaaaaaatgtatttaaaagaaaattgagagaaaggactacagagccccgaattaataccaatagaagggcaatgcttttagattaaaatgaaggtgacttaaacagcttaaagtttagtttaaaagttgtaggtgattaaaataatttgaaggcgatcttttaaaaagagattaaaccgaaggtgattaaaagaccttgaaatccatgacgcagggagaattgcgtcatttaaagcctagttaacgcatttactaaacgcagacgaaaatggaaagattaattgggagtggtaggatgaaacaatttggagaagatagaagtttgaagtggaaaactggaagacagaagtacgggaaggcgaagaaaagaatagagaagatagggaaattagaagataaaaacatacttttagaagaaaaaagataaatttaaacctgaaaagtaggaagcagaagaaaaaagacaagctaggaaacaaaaagctaagggcaaaatgtacaaacttagaagaaaattggaagatagaaacaagatagaaaatgaaaatattgtcaagagtttca

SEQ ID NO: 11417 - DNA, 1535 bp, Homo sapiens
  misc_feature 1, 2, 3, 4, 5: n = A,T,C or G
nnnnngaaatcatgacatgagatagcacgttcctagaatgttctacagatgtaaattctcaaattaatctacagatttaacataatcctattcaaatcccaagataggcctggattttttttttggtggagacgcagtcttgctcaattgcccaggctagagtgcagtggtacgaccacagctcactgcatcctcgacctcccaggctcaagcgatcctcccacttcagcctctgaagtctctcatatggtgtccaagaaatggtgacaaatctcacaaagggactaggctcagcagggctggaatattcagggaaggtgtcaagaagaaagatgaacttgagttggcttttgagagatgcataggactcccacaggcagagtgaaataagggcattttagatggacagacacacagacaaaagcagaaatgtgggtggtgtgactggggtttggtgaggggctgctgtggctggaatggagggctgccacaataatggaaatggtaaatgaggcaagtaaggttggactggtggcatagcgtcaaggttgccagctttattaaatcactcttccaatatgctagcactggcctgttgggaaaagtaatacatcatgtaatcgaacaaaagacagaggcaagctccaggaatgggcactgtaaacaggacttgtcccagagtagccagatgtaggctttaggtaagttgatgcaagctgagcatctctaatctgagggggaatgtctcacatggtgtccaagaaatggtgacacatctcacagagggtctaggctcaggagggctagagtatgagacgttccccctcaccagtgaacttaaaaatgtggccaaaaatttttgtaaaagatggctactctgtagtgctttaactggacctatttagacaatgccttacacactggaggacgatactgtgtaaatctaataagtctacaagacaatacgtatgtcttttggctctctccttcctctccagggtgatgacaaatccgtgagggtggagattatacctctctcatcatttcagcaccaaggaaataaattagtggcagagtaagggtgacttgatgagtacatccaattgttgacatagttttgggtggagaaattttgctattatatcgacttcttaaaatagtctagtgggattaacttggtttcaattcacagagatctggaagcgaggatcttttaaaaatcctgaaatatacactgcaataaaagaacaaagcatacacctcagccttaaatgactgaagaagtatgtcaagtagcagcaggtgggaaagtggctttggttttcagtttgtgagctctgaatccacacagaaacaggactgcattctgacaacctgaattaattattgtccttaccacaatgaggcagaaaagtataatcaaaatcattagtatttcagtcacaattaatgccaagatgagtttgtcagtatagccatatcctggaacttattttgtgagctaaaaaaaaaaaaaaaaaaaaacggacgcgtgg

SEQ ID NO: 11418 - DNA, 1542 bp, Homo sapiens
cgcgatcggccgggctgtaaccgtcgtctgtccgggagcggctggagcggcagcggcggccgggcacggcgcgaggtgacgccaccgctaccgccgccgccgccgccgccgaggtgactgaggagagaggcgcctcctcgctcccgccaccgccggacttcaatgcccagtccccagctcgccagcgtttttcgttggaatatacgttgcacatttatggcgattctgagtgtgagggcagacttctgccaggctcagcacagcattttcgctgacaagtgagcttggaggttctatgtgccataattaacattgccttgaagactcctggacaccgagactggcctcagaaatagttggctttttttttttttaattgcaagcatatttcttttaatgactccagtaaaattaagcatcaagtaaacaagtggaaagtgacctacacttttaacttgtgtcctcactagtgcctaaatgtagtaaaggctgcttaagttttgtatgtagttgggattttttgggagtcccgaaggtattccatctgcagaaattgagggcccaaattggaatttgggattcaagtgggattctaaatacttggcttatcttgaagagagaagcttcattaggaataaacacgttgattagagaaacacactgatggatactaggcattgaggggtcttataaatgggtttctggcggtgaacacattccaagatttatggattcttctcttcactttccccatcacactcacacgcacgctcacactttttatttgaccataatgaaccgtccagcccctggggagatctcctatgaaaacatgcgttttctgataactcacaaccctaccaatgctactctcaacaagttcacagaggaacttaagaagtatggagtgacgactttggttcgagtttgtgatgctacatatgataaagctccagttgaaaaagaaggaatccacgttctagattggccatttgatgatggagctccaccccctaatcagatagtagatgattggttaaacctgttaaaaaccaaatttcgtgaagagccaggttgctgtgttgcagtgcattgtgttgcaggattgggaagggcacctgtgctggttgcacttgctttgattgaatgtggaatgaagtacgaagatgcagttcagtttataagacaaaaaagaaggggagcgttcaattccaaacagctgctttatttggagaaataccgacctaagatgcgattacgcttcagagataccaatgggcattgctgtgttcagtagaaggaaatgtaaacgaaggctgacttgattgtgccatttagagggaactcttggtacctggaaatgtgaatctggaatattacctgtgtcatcaaagtagtgatggattcagtactcctcaaccactctcctaatgattggaacaaaagcaaacaaaaaagaaatctctctataaaatgaataaaatgtttaagaaaagagaaagagaaaaggaaaaaaaaaaaaaaaacggacgcggggtcggc

SEQ ID NO: 11419 - DNA, 267 bp, Homo sapiens
  misc_feature 1, 24: n = A,T,C or G
nactcactataggggcgaattggnagctccaccgcggtggcggccgtactgcagcctatcctgtccaccttgcgcgcctgagcatcagggccggaccggcccgcgtaagccccatgccccgcacgccggggcattttttttgaccgcacggcaagcgttgctggacaaatggtttttttcgcaaacatcttgcctgtcagaaattatcgtcctacactatttaacagaatcaggccgtgccacgctgcgcggccccgcaagaatata

SEQ ID NO: 11420 - DNA, 1727 bp, Homo sapiens
  misc_feature 1724, 1725, 1726, 1727: n = A,T,C or G
acattgtgatggctgttactaaactaatcgtgtatttatggaactagcaaaattaggttagtcacacaggcaggaaaggtgtctggaaggacaggagcaacctgtaatgcgaatattggttttcttggtatactcaggctctgtggtcatattgagaacaacggatccgggcaggtacgcggggaccacttctctgggacacattgccttctgttttctccagcatgcgcttgctccagctcctgttcagggccagccctgccaccctgctcctggttctctgcctgcagttgggggccaacaaagctcaggacaacactcggaagatcataataaagaattttgacattcccaagtcagtacgtccaaatgacgaagtcactgcagtgcttgcagttcaaacagaattgaaagaatgcatggtggttaaaacttacctcattagcagcatccctctacaaggtgcatttaactataagtatactgcctgcctatgtgacgacaatccaaaaaccttctactgggacttttacaccaacagaactgtgcaaattgcagccgtcgttgatgttattcgggaattaggcatctgccctgatgatgctgctgtaatccccatcaaaaacaaccggttttatactattgaaatcctaaaggtagaataatggaagccctgtctgtttgccacacccaggtgatttcctctaaagaaacttggctggaatttctgctgtggtctataaaataaacttcttaacatgcttaaaaaaaaaaaaaaaaaaaaaaagaaaaaatttgtggggggctggccaaaaaggtttacacctgtgggcgcggcccaagtatacacggcccagtccaggactcgggcgacaggggggtcgccaaaaaacgcgggagcaggtgaacacaggcagggctgggttaagccgcaactctcccgtcccgcttatccagtcagaacacaacccacagctaacgcacagcacatcagccagcatgcacaccacgacatcagacacaccaaccacatgtcgatacgacctcatccacgtagcactacactgcgacactccccagacacgaccatcaacgcagatccgcagggacagtgcacgcacgtctgcgtcaatctgctggcaccgagcgtcccaggcaccaatgcgtcgagccacggacacagaaacgtttggacgaggcctgacgagcgagaactcgaaggcgagcagcactcgaacctcgcccgacgcccagctcgcggccctggcgacggaggagacgagcatccagcaaagcgcaggccacgaccacgcgcatgatcggagcctcggacgtcgggccgcgcgccagctcagacgggcgctcccaactaatacctggagacagtgcgaccgacacgggacgagagaccgcgtcggcgactggacgcagagtcacgagtcaagtgtagaggctcatcctcggaagaaggcctccatcggtgagaagaacacgcgccaggcgaggcggacgtagaggtacacgagtcttagtcgcaagtcgcgcattcggcgacgcgctggagagcaaagggagtggcacccaatgcacacacaaggacataaaggtactaagcctagtggagacgagataggagaagcacagaactaagctccggtcaggtgacgcgaatagacatcagcagcagcaagcgagcggaagcgtagcgacagcggcgcggcgannnn

SEQ ID NO: 11421 - DNA, 909 bp, Homo sapiens
accagaggaggagatggacgatcagagccatgcacctgtttcctgcaccccctgcgcactggttctatggccacaaggaggtaagagggaaaattagttggggaggttaaggaacagaaagatgaggtattaaaaaaaacagcacatattggtggggcattatgtaatatgcaaaatgctttcacaccaatctcatttgatatttacaaaaattctatgataggggaggaaacatattgttattcctattttacaggtaagaaaactgaagcctaaaatagagatgcaactttcctgtgctacccatctcataaatgacagaaatgaaacttgaaccctggtctcctgcttcaaggccaaggtctttactactttcaggactctgggtgttctacagagaaatagaccaagccaattgttaacaggaaatatgcaaagatgctacagcttctaatgaagctggaaataggaaaacatttgacaaattagaaaggaaagttgaaagatgagcagcaaccacaaaggagtaaaaggcatgtgagaggccaggcatggtggctcacgcctgtaatcccagcactttgggaggctgaaacaggcagatcatgaggtcaggagatcaacaccatcctggctaacatggtgaaaccccgtctctactaaaaatacaaaaaattagtcgggtgtggtggcgggcacctgtagtcccagctactcgggaggctgagacaggagaatggtgtgaacccaggaggtggagcttgcagtgagccaagatagcagcactgcactccagcctgggagacagagcaagactccccctcatcaaaaaaaaaaaaaaaaaacaagtgcttcggccgccccgccggtgcggttagctccaattgccctaagtagtgtatcgggcac

SEQ ID NO: 11422 - DNA, 405 bp, Homo sapiens
acagtagtggcaaccagccgggaaaatccataggatcatttcagaccgcattcaacacagatactcatgtagccccgacgtttcttgtgaagggaattgatgtattgcttgagggggtcgatctctggttctaaggtgttttgtttgtttccatcgtgactacccagaaaattattaaaaggccaaacccagtggctcatgcctgtaatcccacccagtttttctaaagttttaatctgtctcctccactaggccatgagccctaggaggagattgtctctagagggtatcccctgtgcctggcacatgcatgcaagttatgatttatgttgatgaatgaatgaatgaatgaatgaatgaatgaatggtggatgggtcctttgaggctctagaaataggggtgag

SEQ ID NO: 11423 - DNA, 401 bp, Homo sapiens
gcctattttattttaagatggagtcttgctctgtcgcccaggctggagcgcagtggcacgagctcggctcactgttctccagcctgggtgactgagaaagaatctctctcaaattaaaaaaattaaaaaaaatgtgtgtggtgggggtatcttgactttcctccatgtgtcttaggccacaactcttacatgggaccttgcagaagagattcctcaaccaatacctttatggtgctgcctccctgatgggctgggttctaaacagcagtgccttccccatctgctcagtccttactcacctgggcaccatcctcctggtaccctcgggcccgcttctagaaaactagtggattctccccgggcctgctcaggaatttcgaattatcaaagccttatccgat

SEQ ID NO: 11424 - DNA, 1639 bp, Homo sapiens
  misc_feature 1, 1632, 1633, 1634, 1635, 1636, 1637, 1638, 1639: n = A,T,C or G
nagtgagtgagagggcagaggaaatactcaatctgtgccactcactgccttgagcctgcttccggaaatactcaatctgtgccactcactgccttgagcctgcttcctcactccaggactgccagaggaagcaatcaccaaaatgaagactgctttaattttgctcagcattttgggaatggcctgtgctttctcaatgaaaaatttgcatcgaagagtcaaaatagaggattctgaagaaaatggggtctttaagtacaggccacgatattatctttacaagcatgcctacttttatcctcatttaaaacgatttccagttcagggcagtagtgactcatccgaagaaaatggagatgacagttcagaagaggaggaggaagaagaggagacttcaaatgaaggagaaaacaatgaagaatcgaatgaagatgaagactctgaggctgagaataccacactttctgctacaacactgggctatggagaggacgccacgcctggcacagggtatacagggttagctgcaatccagcttcccaagaaggctggggatataacaaacaaagctacaaaagagaaggaaagtgatgaagaagaagaggaggaagaggaaggaaatgaaaacgaagaaagcgaagcagaagtggatgaaaacgaacaaggcataaacggcaccagtaccaacagcacagaggcagaaaacggcaacggcagcagcggaggagacaatggagaagaaggggaagaagaaagtgtcactggagccaatgcagaaggcaccacagagaccggagggcagggcaagggcacctcgaagacaacaacctctccaaatggtgggtttgaacctacaaccccaccacaagtctatagaaccacttccccaccttttgggaaaaccaccaccgttgaatacgagggggagtacgaatacacgggcgtcaatgaatacgacaatggatatgaaatctatgaaagtgagaacggggaacctcgtggggacaattaccgagcctatgaagatgagtacagctactttaaaggacaaggctacgatggctatgatggtcagaattactaccaccaccagtgaagctccagcctgggatgaattcatccattctggctttgcatccggctaccattttcgaagttcaactcaggaaggtgcaatataacaaatgtgcatattataatgaggaatggtactaccgttccagattttctgtaattgcttctgcaaagtaataggcttcttgtcccttttttttctggcatgttatggaatgatcattgtaaatcaggaccatttatcaagcagtacaccaactcataagatcaaatttcattgaatggtttgaggttgtagctctataaatagtagtttttaacatgcctgtagtattgctaactgcaaaaacatactctttgtacaagaagtgcttctaagaatttcattgacattaatgacactgtatacaataaatgtgtagtttcttaatcgcactacctatgcaacactgtgtattaggtttatcatcctcatgtatttttatgtgacctgtatgtatattctaatctacgagttttatcacaaataaaaatgcaatccttcaaatgtgttataannnnnnnn

SEQ ID NO: 11425 - DNA, 521 bp, Homo sapiens
aggtacgcggggacctcattcatttctaccggtctctagtagtgcagcttcggctggtgtcatcggtgtccttcctccgctgccgcccccgcaaggcttcgccgtcatcgaggccatttccagcgacttgtcgcacgcttttctatatacttcgttccccgccaaccgcaaccattgacgccatgtcgggttattcgagtgaccgagaccgcggccgggaccgagggtttggtgcacctcgatttggaggaagtagggcagggcccttatctggaaagaagtttggaaaccctggggagaaattagttaaaaagaagtggaatcttgatgagctgcctaaatttgagaagaatttttatcaagagcgccctgatttggctaggcgcacagcacaagaggtggaaacatacaaaaaaaaaaaaaaaaaaaaaaaaggcccccgggccctttaaaaaatgggggccccccggggggggggaattttattttaaatttttttaaccccccccccctgggggggg

SEQ ID NO: 11426 - DNA, 3318 bp, Homo sapiens
  misc_feature 1, 2, 3, 4, 3313, 3314, 3315, 3316, 3317, 3318: n = A,T,C or G
nnnnagtcgaccacgcgtccggcctggcgccgtcttgatactttcagaaagaatgcattccctgtaaaaaaaaaaaaaaaaatactgagagagggagagagagagagaagaagagagagagacggagggagagcgagacagagcgagcaacgcaatctgaccgagcaggtcgtacgccgccgcctcctcctcctctctgctcttcgctacccaggtgacccgaggagggactccgcctccgagcggctgaggaccccggtgcagaggagcctggctcgcagaattgcagagtcgtcgcccctttttacaacctggtcccgttttattctgccatacccagtttttggatttttgtcttccccttcttctctttgctaaacgacccctccaagataatttttaaaaaaccttctcctttgctcacctttgcttcccagccttcccatccccccaccgaaagcaaatcattcaacgacccccgaccctccgacggcaggagccccccgacctcccaggcggaccgccctccctccccgcgcgcgggttccgggcccggcgagagggcgcgagcacagccgaggccatggaggtgacggcggaccagccgcgctgggtgagccaccaccaccccgccgtgctcaacgggcagcacccggacacgcaccacccgggcctcagccactcctacatggacgcggcgcagtacccgctgccggaggaggtggatgtgctttttaacatcgacggtcaaggcaaccacgtcccgccctactacggaaactcggtcagggccacggtgcagaggtaccctccgacccaccacgggagccaggtgtgccgcccgcctctgcttcatggatccctaccctggctggacggcggcaaagccctgggcagccaccacaccgcctccccctggaatctcagccccttctccaagacgtccatccaccacggctccccggggcccctctccgtctaccccccggcctcgtcctcctccttgtcggggggccacgccagcccgcacctcttcaccttcccgcccaccccgccgaaggacgtctccccggacccatcgctgtccaccccaggctcggccggctcggcccggcaggacgagaaagagtgcctcaagtaccaggtgcccctgcccgacagcatgaagctggagtcgtcccactcccgtggcagcatgaccgccctgggtggagcctcctcgtcgacccaccaccccatcaccacctacccgccctacgtgcccgagtacagctccggactcttcccccccagcagcctgctgggcggctcccccaccggcttcggatgcaagtccaggcccaaggcccggtccagcacagaaggcagggagtgtgtgaactgtggggcaacctcgaccccactgtggcggcgagatggcacgggacactacctgtgcaacgcctgcgggctctatcacaaaatgaacggacagaaccggcccctcattaagcccaagcgaaggctgtctgcagccaggagagcagggacgtcctgtgcgaactgtcagaccaccacaaccacactctggaggaggaatgccaatggggaccctgtctgcaatgcctgtgggctctactacaagcttcacaatattaacagacccctgactatgaagaaggaaggcatccagaccagaaaccgaaaaatgtctagcaaatccaaaaagtgcaaaaaagtgcatgactcactggaggacttccccaagaacagctcgtttaacccggccgccctctccagacacatgtcctccctgagccacatctcgcccttcagccactccagccacatgctgaccacgcccacgccgatgcacccgccatccagcctgtcctttggaccacaccacccctccagcatggtcaccgccatgggttagagccctgctcgatgctcacagggcccccagcgagagtccctgcagtccctttcgacttgcatttttgcaggagcagtatcatgaagcctaaacgcgatggatatatgtttttgaaggcagaaagcaaaattatgtttgccactttgcaaaggagctcactgtggtgtctgtgttccaaccactgaatctggaccccatctgtgaataagccattctgactcatatcccctatttaacagggtctctagtgctgtgaaaaaaaaaaatgctgaacattgcatataacttatattgtaagaaatactgtacaatgactttattgcatctgggtagctgtaaggcatgaaggatgccaagaagtttaaggaatatgggagaaatagtgtggaaattaagaagaaactaggtctgatattcaaatggacaaactgccagttttgtttcctttcactggccacagttgtttgatgcattaaaagaaaataaaaaaaaagaaaaaagagaaaagaaaaaaaaagaaaaaagttgtaggcgaatcatttgttcaaagctgttggcctctgcaaaggaaataccagttctgggcaatcagtgttaccgttcaccagttgccattgagggtttcagagagcctttttctaggcctacatgctttgtgaacaagtccctgtaattgttgtttgtatgtataattcaaagcaccaaaataagaaaagatgtagatttatttcatcatattatacagaccgaactgttgtataaatttatttactgctagtcttaagaactgctttctttcgtttgtttgtttcaatattttccttctctctcaatttttggttgaataaactagattacattcagttggcctaaggtggttgtgctcggagggtttcttgtttcttttccattttgtttttggatgatatttattaaatagcttctaagagtccggcggcatctgtcttgtccctattcctgcagcctgtgctgagggtagcagtgtatgagctaccagcgtgcatgtcagcgaccctggcccgacaggccacgtcctgcaatcggcccggctgcctcttcgccctgtcgtgttctgtgttagtgatcactgcctttaatacagtctgttggaataatattataagcataataataaagtgaaaatattttaaaactacaaaatgacatcgtatcacgtggtggccgagctcttctagaatctggtagctcttggctaatttcagacaaaggagtccctgggccccccccgggggggggccccaattccccctatagggagtggattaaccccccctcatgggccgggttttaaaaacgcggggatgggaaaaacccgggggttcccaaatttaatcgctttgaagaaaatccccnnnnnn

SEQ ID NO: 11427 - DNA, 176 bp, Homo sapiens
  misc_feature 175, 176: n = A,T,C or G
ctcactatagggcgaatggactccaccgcggtggccgcccgggcaggtacacctgtcttctctggctgcccaccagcggcctctggaccgtccaggccatggatcctaacgctgcttatgtgaacatgagtaaccattaccggggcctggcttcagccaaccgttgactttgccnn

SEQ ID NO: 11428 - DNA, 1007 bp, Homo sapiens
  misc_feature 1, 2, 3, 999, 1000, 1001, 1002, 1003, 1004, 1005, 1006, 1007: n = A,T,C or G
nnncagaagaaagacatccaatctgttttttattttatttttttacacagggtcttgctctgtggtccaggctgaagtgcagtggcatgatcatcactcactacagccacaacctcctggtctcaagtgatcctcctgcctcactcagcctcccgagtagctgggactacaggcatgcaccaccacatccggctaatttagagaagtttttttttgtatagacagggtcgtagtatgttgtctaggctggtctcaaactcctgagctcaagtgatcctcccaccctggcctcccaaagacccaaagactacagacctgagccaccatgcccacctgttttcttgacaggacttgcatatgacaagctctctgcttctcctcacctatgcattgcaagccaggtcagaggcaggttaaacaccttaaggacatgttaggacaagtggcatacaagggaaaaaaacccgttcatttaagttacagaaacagaaaaaaaaaaactggcttattcccacacttactctactcaaagctttgagaagactaattttggcatcctctggctaaatacaaaacaacaaaacaaaacaaggcaaactctttcagcaagagctgtgggggaagggactataagggacacacacaactgacaggcaaaagctctgagcacgtgattgctaagtttaattcaactgttacaccccattctgccttgtaaaaataacaaaacgctcctatcaaaatgacattgtgatgtgagtacaggctttttgttttggtacagctctaaaaaatgttggcaccgaatgcacttaagaaaagcgttaaggcttaatacaaatacagagacgagtcatttctcaatgcagcttagagggtgagaacaggatgctaggtttttaaatcttccaaatacaggcagtccccaacgtacagacatacaggacacctcccaaacatacactcatagctgcctcgtgccgaattcttggcctcgannnnnnnnn

SEQ ID NO: 11429 - DNA, 831 bp, Homo sapiens
  misc_feature 1, 2: n = A,T,C or G
nnccagctgcccccgtgtctttcaatgggagcatttagcccattttcatttaaggttagtaatggtatgtgtggattttatcctgtcgtcatgctgtcagctggttattttgcagacttaacgtatgtggttggtttttagcatcactggactgcgtaattcactgcgttcttcactgcattttgtagtggctggtgatggttttttctttccatatttagtgcttccttcaggagctcttgtaaggtagatctggtgatattgaattccctcagcatttgcttgtctgaaaaggatcttatttctccttcacttatgatgcctaattttgctggacatgaaattatgggctgaaatttcttttctttaatggcagttgatgtgggttggggtgtgtgctgcactcctgtgtgctgtcagtgcaagtaaagcaaaacccacctgtgtaaacacacacagcaaagtgatgtaagaagtttccatataaagggctgcagtatggagaggtaatgtgcaggctggtttgcggctgtaggggccaccttgctgcagctctccactgatatggtacggtccactagcacagaaactatggtatgggcacctgagagtgccctgtaagcaggtgtggccaggctggggccctgggagaggcaagcagactaaggagtgctgagatcagaccagccccatctcatgtgcaagactgcccagcctctaaagatcaggtctcagaggagaactctctcaaaagtgaatctccagcacagcacagctgctctacacaatcgtggccagacttcttttctaacggacgcgtgggtcgactcc

SEQ ID NO: 11430 - DNA, 414 bp, Homo sapiens
  misc_feature 1, 414: n = A,T,C or G
naggattcggcacgagagaagtcagaaggagccaaatcaggactgtaaggtggatgaatgcctaatgatttcccatcaaagctctcacaaaattgcccttgtttgatgagaggaataagcagaagcattgtgatggggaaggactctctaatgaagctttcccaggtgtttttctgctaaagctttggctttctcaaaacactttcataataagcagatgttgttgttctttggccctccagaaaaccaactagaaaaattcctttaacattccaaaagactattgccatgagctttgttcttgaccagtccagttttgctttgactagaccgcttccacttcttggtagccattgctttgattgtgctttatctttaggatcatactggtaaagccatgttttgtctcctgtn

SEQ ID NO: 11431 - DNA, 443 bp, Homo sapiens
  misc_feature 1, 2, 3, 4, 5, 6, 7, 8, 9, 10, 11, 12, 13, 14, 15, 16, 17,18, 19, 20, 21, 22, 23, 24, 25, 26: n = A,T,C or G
nnnnnnnnnnnnnnnnnnnnnnnnnngggtctcccaggacctctttacactcttaaaaatgacatcctaaatggcttttatttatatggatatctactgatatttaccatattcaaatttaaaacaaatgtttgaaaatattcactaattcctttaaaaatagctcattaaaaatatgaaaaagatacttttacaaatttagtgagaatatcactgttttataattttgcaaatctcttaatgcctggcttaaatgaaaactgctggagtcccatatctgtttctgcattaaatttgctgctatatgatttttttgcttaaaacatatgaggaaaatctggcttcacctaagaatgtagttgtgaaaaggataagtattttaatagccttttctgataattatagatattctatgaaattacaccaaaaactcaacgagtggt

SEQ ID NO: 11432 - DNA, 688 bp, Homo sapiens
  misc_feature 1, 665, 666, 667, 668, 669, 670, 671, 672, 673, 674, 675,676, 677, 678, 679, 680, 681, 682, 683, 684, 685, 686, 687,688: n = A,T,C or G
nagatgccctagaccagttattgtgtctactgaactagcacataaatccttagtaaccgacagcatattaaggctctgtttctaccagcaaccacagagattttgtcctggaagaaagcaatagaaagtggtatcctggatagagatcttgccaataacttaaaatcgatttgtatacctgatgtgatgccccacatgcaactagcagactctgcagaacaaaatattaatcctggagcagcagttctaccgtgcagcaagagccaccctaaggccacagcaagccagagtgagaatctgttgttccagctgatgactcacagctatattaatgtgcaaaatggacagaggctgcttctgttagataaagagctgatggagacactaacatccagagatgagtatcaaacaagtcctccaaaagtggttgaaattgggcatcaaaggcaaaaaactcctgagggattgcaagaatcagctaatgtgaaaatctcaggaactttcagcagtgggtggactgtgaggctgcctgagttccagttttcttctcagaacaaagaatatcccgatcgggaagattgcactacagaaaaaggcaaaaagaccactgtagaaacagaagattcttctgtagagaaccctgaacaggatctgtttgtagaacnnnnnnnnnnnnnnnnnnnnnnnn

SEQ ID NO: 11433 - DNA, 2137 bp, Homo sapiens
  misc_feature 1, 2, 3, 4, 2134, 2135, 2136, 2137: n = A,T,C or G
nnnnacttttcccaaacaaagctcccggcaactttctccctcgcagcgccccgcccgcccgcggctccccagcccctcgccgggaggcccccgtgggggaaccccgggctggggccgccctggacgatggcagcggctggacgggcagtgaggaaggcagtgaggagggtaccggcggcagtgagggggctgggggtgacgggggcccggatgcagagggggtgtggagcccagacattgagcagagcttccaggaggccctggccatctatccaccctgcggccgccggaaaataattttgtctgatgaaggcaagatgtatggtcggaatgaactgatcgcccgctacatcaagctgagaacggggaagacccgaactcgaaaacaggtttctagtcacatccaggttttggcccgaaggaaatcaagggaaatccagtccaagttgaaggaccaggtttccaaggacaaggctttccagacaatggcaaccatgtcctctgcccagctcatctccgcgccttctctgcaggccaaactgggtcccactggtcctcaggcctctgagcttttccagttttggtctggaggatctgggcccccctggaatgttccagatgtgaagccattctcacagacaccgttcaccttgtcactgactcccccatctactgacctcccaggaagaaactccttcccagaagccccccagcagatttcccctaacgtctcattggctaggactgtgtcacatggccacttctaactgcaagggaggctgggaaaggtacgagcccccccaagccctctcacccctgtccccacctaccccatcgcccccagcctggcaggctcggggcctgggcaccgcccggttgcagctggtagagttctcagccttcgtggaaccgccagatgcagttgattcttaccagaggcacctgttcgtgcacatcagccagcactgccccagccccggagcgccgccgctcgagagtgtggacgtccggcagatctacgacaaattccctgagaaaaagggtggcctccgagagctatatgatcgtggccccccccatgccttcttcctggtcaagttctggcggacctgaactggggcccaagtggtgaggaggcaggggccggtggcagcatcagcagtggtggcttctacggagtgagcagccagtatgagagcctggaacacatgaccctcacctgttcctccaaggtctgctcttttggcaagcaggtggtggagaaggtggagacggaacgggcccagctggaggacggcagatttgtgtaccgcctgctgcgctcgcccatgtgcgagtacctggtgaatttcttgcacaagttgcggcagctgcctgagcgatacatgatgaacagcgtcctggaaaacttcaccatcctccaggtggtgacaaacagagacacccaggaactgctgctctgcaccgcctatgtcttcgaggtctccaccagcgagcgtggggcccagcatcacatttaccgcctggtcagggactgaagggggaccccaaaactggctcaccccccagaacaccctcctcccagggagggtcctccagctcacctcatgcttcttatttggggagagggctgtgatgtaaaggggttgacctcagaggcctaagcaactggggccatcccccccattagaggggcccccaaaacttggttggagagctgaacaggctgggactgaggaaaggataaaccccgatattgggacctcacagtgggtgtctgaaaggacagatcactccggagtatcagggattgtggggacaggagtgagacaaccccccaggtacagcactggctttcttttccgccctgaaagggcaacccccatcctctgcatgtcttggagagcgctattacacatggtgtccccttacttttcccagcacccttccctgaatttggccctttaacacttatcaggacggggacaaagacaatacctcggtaggaaactgggaccgattagtaaaagagataacaggggggtgatcgcgcaagtgattactgcttaggacgacgctcaccaagggtccagagtaaagggtatcgactcgtagttagctgacgcacatgtannnn

SEQ ID NO: 11434 - DNA, 377 bp, Homo sapiens
  misc_feature 353, 354, 355, 356, 357, 358, 359, 360, 361, 362, 363, 364,365, 366, 367, 368, 369, 370, 371, 372, 373, 374, 375, 376,377: n = A,T,C or G
agagaacaatcaccagcctgagccttatttccaggtaagtagctgaattagagtttgtcttaaaatttttccttaatgactaaaatttaagatgacccaccagctgcttttaatttctccttaccattagaacactcagtaatcatatgaattgtgcatttgtttgttttgcttaactctttttgtttaagtttggggtttattgttgctgtttcacttctctcccatctcttccttacttgggtcaaaatcccaaaggaaatgttccaatattgtggggagcaaggcatttgaattggctaaatcttctgtgcaggccgaaaaaaccccctaaagaccgaaaaaccggccgnnnnnnnnnnnnnnnnnnnnnnnnn

SEQ ID NO: 11435 - DNA, 1076 bp, Homo sapiens
  misc_feature 800, 802, 803, 804, 805, 806, 807, 808, 809, 810, 811, 812,813, 814, 815, 816, 817, 818, 819, 820, 821, 822, 823, 824,825, 826, 827, 828, 829, 830, 831, 832, 833, 834, 835, 836,837, 838, 839, 840, 841, 842, 843, 844, 845, 846, 847: n = A,T,C or G
  misc_feature 848, 849, 850, 851, 852, 853, 854, 855, 856, 857, 858, 859,860, 861, 862, 863, 864, 865, 866, 867, 868, 869, 870, 871,872, 873, 874, 875, 876, 877, 878, 879, 880, 881, 882, 883,884, 885, 886, 887, 888, 889, 890, 891, 892, 893, 894: n = A,T,C or G
  misc_feature 895, 896, 897, 898, 899, 900, 901: n = A,T,C or G
cgcgtcgtcagttaccttctacaatgaggctccctgctcagctcctggggctgctaatgctctgggtctctggatccagtggggatattgtgatgactcagtctccactctccctgtccgtcacccctggagagccggcctccatctcctgcaggtctagtcagagcctcctgcatagtaatggatacaactatgtggattggtacatgcagaagccagggcagtctccacagctcctgatctatttgggttctaatcgggcctccggggtccctgacaggttcagtggcagtggatcaggcacagattttacactgaaaatcagcagagtggaggctgaggatgttggggtttattactggcatgcaagctctacaaactcctctcactttcggcggagggaccaaggtggagatcaaacgaactgtggctgcaccatctgtcttcatcttcccgccatctgatgagcagttgaaatctggaactgcctctgttgtgtgcctgctgaataacttctatcccagagaggccaaagtacagtggaaggtggataacgccctccaatcgggtaactcccaggagagtgtcacagagcaggagtgttagagggagaagtacccccacctgctcctcagttccagcctgaccccctcccatcctttggcctctgaccctttttccacaggggactacccctattgcggtcctccagctcatctttcacctcacccccctcctcctccttggctttaattatgctaatgttggaggagaatgaataaataaagtgaatctttgcncnnnnnnnnnnnnnnnnnnnnnnnnnnnnnnnnnnnnnnnnnnnnnnnnnnnnnnnnnnnnnnnnnnnnnnnnnnnnnnnnnnnnnnnnnnnnnnnnnnnngggggggccgttaaactattttaaaaaaaaaaccccccaccctcccccgtgaaccggaaacaaaaaaggaagccaaggggggggtgaaacttttttttggcctttttaaaggggtacaaaaaaagcaatgccctccaaattttcaaaaataaggctttttttccacggcattcaa

SEQ ID NO: 11436 - DNA, 992 bp, Homo sapiens
  misc_feature 907, 972, 973, 974, 975, 976, 977, 978, 979, 980, 981, 982,983, 984, 985, 986, 987, 988, 989, 990, 991, 992: n = A,T,C or G
aaaaaatgttctttaagacccctccttaacggttgatggatttagcaagtagcaatataagatgttcggataaatttaaatttcacgtaacaatactttttccctgtaagcatgtcctaaatattgcatggggcatgattataataaaaaagttattatttatatgaaattcaaatttatctggaatccctgtcctttatctacttttgtttttatgatgatttttatgatgattaaaacaaaagtagagaactaaaaatttattttagtacttcctattgataaaaataaaattagatgttaattatagaaagttcacaaagctaaaaatttagaataaatttgaatggtcaaacctcaatacctgttttattgtgaattttcagcatttaccgcttaattttcattgatctttttgagacatcctatatatgttcagttctctgaatttctatttcatttctgttctgcaaacctttgatcttgccttttaccaaattcaatttttttcttcttttttaacaataagtgtattttgtgtataattaccatgtgtttgaagcaaaggggctcataaaatgaattcatccaaatgtattaatcaaaattcactcatgaataactaattgcccaatctagtaacaatttgactccttattttcctattctttaggaagcatttgacatttctggctgggcgcagtggctcatgcctgtaatcccagcactttgggagggcaaggcaggtgaatcactggagatcaggagtttgagaccagcctagtcaacatggtgaaaccccgtccctactaaaaatacaaaaatgagtggggtgtggtggcacacgcctgtaattccagcggctcaggaggctgaggcaggagaatctcttgaaacttggaagcanaggttgcagtgagttgagatggcaccactgcactccagactaggtgagagagtgagactctgtcnnnnnnnnnnnnnnnnnnnnn

SEQ ID NO: 11437 - DNA, 1038 bp, Homo sapiens
gcttcgacccacgcgtccgacttaattgagaaggtggaatcctcctatccctgaactcgggggaatggaatctcgctgatcttccaggactagctccctgatcattccagcccctctgaacaacagggcccctggagatagaagtagtcctatttcaccccaactacaacattaatgggaaaaaagaagcaggaattcctgaattttatgactatgacgttgccctgatcaagctcaagaataagctgaaatatggccagactatcaggcccatttgtctcccctgcaccgagggaacaactcgagctttgaggcttcctccaactaccacttgccagcaacaaagtaagacatacttggcaagaggataaggatgagatcccaagagacaagtggggcatgagagggaggtgcaataggaagagatgatgcctggcccagaacctagctctagaagggcttaggggacatctactgagtgacaaaggcaatggggagatgacagtggtgggagcagctgaagtgacgcagtctattcgtccagaggaagagctgctccctgcacaggatatcaaagctctgtttgtgtctgaggaggagaaaaagctgactcggaaggaggtctacatcaagaatggggataagaaaggcagctgtgagagagatgctcaatatgccccaggctatgacaaagtcaaggacatctcagaggtggtcacccctcggttcctttgtactggaggagtgagtccctatgctgaccccaatacttgcagaggtgattctggcggccccttgatagttcacaagagaagtcgtttcattcaagttggtgtaatcagctggggagtagtggatgtctgcaaaaaccagaagcggcaaaagcaggtacctgctcacgcccgagactttcacatcaacctctttcaagtgctgccctggctgaaggagaaactccaagatgaggatttgggttttctataaggagtttcctgctggaccggggcgtgggattgaattaaaacagctgcgacaaca

SEQ ID NO: 11438 - DNA, 3210 bp, Homo sapiens
  misc_feature 3205, 3206, 3207, 3208, 3209, 3210: n = A,T,C or G
acgcgggggaataatgtgtggcttctgttggattgcttttctttccaaaattcctaggcaatgcttccccgaggtgtgcacctttgtgaggtgtttgtggggttgggggagcttcaggcgctactcgcgggacgccgtcacgtgatccgggacgaggtggagttcggctttaaggaggcgtctcttcctagcttcatcaatctttaggatctgagcaggagaaataccagcggatcttccccactctgctcccttccattcccacccttccttctttaataagcaggagcgaaaaagacaaattccaaagaggattgttcagttcaagggaatgaagaattcagaataattttggtaaatggattccaatatggggaataagaataagctgaacagttgacctgctttgaagaaacatactgtccatttgtctaaaataatctataacaaccaaaccaatcaaaatgaattcaacattattttcccaggttgaaaatcattcagtccactctaatttctcagagaagaatgcccagcttctggcttttgaaaatgatgattgtcatctgcccttggccatgatatttaccttagctcttgcttatggagctgtgatcattcttggtgtctctggaaacctggccttgatcataatcatcttgaaacaaaaggagatgagaaatgttaccaacatcctgattgtgaacctttccttctcagacttgcttgttgccatcatgtgtctcccctttacatttgtctacacattaatggaccactgggtctttggtgaggcgatgtgtaagttgaatccttttgtgcaatgtgtttcaatcactgtgtccattttctctctggttctcattgctgtggaacgacatcagctgataatcaaccctcgagggtggagaccaaataatagacatgcttatgtaggtattgctgtgatttgggtccttgctgtggcttcttctttgcctttcctgatctaccaagtaatgactgatgagccgttccaaaatgtaacacttgatgcgtacaaagacaaatacgtgtgctttgatcaatttccatcggactctcataggttgtcttataccactctcctcttggtgctgcagtattttggtccactttgttttatatttatttgctacttcaagatatatatacgcctaaaaaggagaaacaacatgatggacaagatgagagacaataagtacaggtccagtgaaaccaaaagaatcaatatcatgctgctctccattgtggtagcatttgcagtctgctggctccctcttaccatctttaacactgtgtttgattggaatcatcagatcattgctacctgcaaccacaatctgttattcctgctctgccacctcacagcaatgatatccacttgtgtcaaccccatattttatgggttcctgaacaaaaacttccagagagacttgcagttcttcttcaacttttgtgatttccggtctcgggatgatgattatgaaacaatagccatgtccacgatgcacacagatgtttccaaaacttctttgaagcaagcaagcccagtcgcatttaaaaaaatcaacaacaatgatgataatgaaaaaatctgaaactacttatagcctatggtcccggatgacatctgtttaaaaacaagcacaacctgcaacatactttgattacctgttctcccaaggaatggggttgaaatcatttgaaaatgactaagattttcttgtcttgctttttactgcttttgttgtagttgtcataattacatttggaacaaaaggtgtgggctttggggtcttctggaaatagttttgaccagacatctttgaagtgctttttgtgaatttatgcatataatataaagacttttatactgtacttattggaatgaaatttctttaaagtattactattaactgacttcagaagtacctgccatccaatacggtcattagattgggtcatcttgattagattagattagattagattgtcaacagattgggccatccttactttatgataggcatcattttagtgtgttacaatagtaacagtatgcaaaagcagcattcaggagccgaaagatagtctgaagtcattcagaagtggtttgaggtttctgttttttggtggtttttgtttgttttttttttttcaccttaagggaggatttaatttgctcccaactgattgtcacttaaatgaaaatttaaaaatgaataaaaagacatacttctcagctgcaaatattatggagaattggggcacccacaggaatgaagagagaaagcagctccctaacttcaaaaccattttggtacctgacaacaagagcattttagagtaattaatttaataaagtaaattagtattgctgcaaatagctaaattatatttatttgaattgatggtcaagagattttccattttttttacagactgttcagtgtttgtcaagctttctggcataaatatgtactcaaaaggcatttccgcttacaatttgtagaaacacaaaatgcgttttccatacagcagtgcctatatagtgactgatttttaactttcaatgtccatctttcaaaggaagtaacaccaaggtacaatgttaaaggaatattcactttacctagcagggaaaaatacacaaaaactgcagatacttcatatagcccattttaacttgtataaactgtgtgacttgtggcgtcttataaataatgcactgtaaagattactgaatagttgtgtcatgttaatgtgcctaatttcatgtatcttgtaatcatgattgagcctcagaatcatttggagaaactatattttaaagaacaagacatacttcaatgtattatacagataaagtattacatgtgtttgattttaaaagggcggacattttattaaaatcaatattgtttttgctttttcaaaaaaaaaaaaaaaaaaatcattttttctcatcccatgacttccctccgatggaaaaaaaaaaaaaaaaaaggggggggccctttattttttttaaaaaaaaaacccccccacccccccccgaacccgaaaaaaaaaaaaaaagcccagggggggggaaaaccttttttttcgccttttaaaggggccacaaaaaaaaaattccccccacattttccaaaaaaaaccttttttttccacggatttaaannnnnn

SEQ ID NO: 11439 - DNA, 1133 bp, Homo sapiens
ggagtcgacccacgcgtccggacgaattcaaggtggacattcgcttccacagagcggagccccagaccccaactgcgtcactgtgacggggctcccagagaatgtggaggaagccatcgaccacatcctcaatctggaggaggaatacctagctgacgtggtggacagtgaggcgctgcaggtatacatgaaacccccagcacacgaagaggccaaggcaccttccagaggctttgtggtgcgggacgcaccctggaccgccagcagcagtgagaaggctcctgacatgagcagctctgaggaatttcccagctttggggctcaggtggctcccaagaccctcccttggggccccaaacgataatgatcaaaaagaacagaaccctctccagcctgctgacccaaacccaaccacacaatggtttgtctcaatctgacccagcggctggaccctccgtaaattgttgacgctcttcccccttcccgaggtcccgcagggagcctagcgcctggctgtgtgtgcggccgaggtacctgaatgagcctggcctggtgctgtgtctccagactcgacacagcccagaaagaaacaggtgaacacactcctgagagccgaaactggactcttgctgatggactcatggcaatactccagccaaaggctgctccgagtcctagaagggctcggaactgtcctgggtaagcctgtcgacacagtagggacagagaggggttagtgtcctctttcacagcactaagcatgttgttgcccacatgcaacagttatgacaagaacagcaagtccaattcaggaaatacatgtctttatcaaagaaaatagatgtgactgacacaaaggcttgctccagaagcaaaggcgcacatctctaatagttagagatcttttgagtattccaccagagaatagaggtggaaccttaggccaatcagttaataagtatttatggaacatctactgtgtgccaggtagggctgggataagagggaagcaggcaatctgcacaggcatgtgcctgagagggagggtctccttgggttctcagacctgggcctagatccagggactaagatgagaggtgacacctaactttgcaacacagtcctgcccgcgt

SEQ ID NO: 11440 - DNA, 2740 bp, Homo sapiens
  misc_feature 1, 2, 3, 4, 5, 6, 7, 8, 2738, 2739, 2740: n = A,T,C or G
nnnnnnnngcgtgttctgttgggtattatttgtagttgcagtcggtcggggccgggcaccgtcctttgtttgcttcgggtaccctgtttcctcccgccagtaagtgtgttagcagctcgtccgggcgaagaagtcgtaatcgaatgcatcagcgtataggccctgataccttcgtcagtgcggtgtcacctagaatacaagcactcagaagcaccaatggtaacctgaagtgagaaaccaggccatgtttggtagcttcagtttttctaccagtaatatagttaatgtcgttgacaatagcctaataatgttagttctactatcaaacagaagcccaatctgggagaacattattatagaagtcaactaatttcaatcatattagtatacaaattcatattagcatagcctaataattcatattagtagaggtgggaggatcacttgagcctaggagtttgacaccagcctgggcaagacagtgagactccatctctacttttttttttaaataaagaaattcagagaggagaaggaagcggattgatatgtgtctatccaaggacaaattttgtgtgcctgtacatacaactcaactatgaaccttccttcacacagctcacaatctagtagcgagagggaattacgaaaacatgagcccccacgatgaggaaaaaggcgcatatcagagaaaagaaaaatgctgcgatgatccaatggcaggagcagcgcgcatccactttctttgtttttttgagatggggtttcgctctgtctcccaggctggagtgccgtggcttgatctcagctcaatgcagcctcaacctcccaggctcaagtgatcttcccatctcagcctcccaagtagctgggaatacaggcgtgcaccactacacttgtttactttttgtagaaacagggtctcacaatgttgccaaggctggcatcctgaagggcgggtggggcttcatcctacagagatgaaaggcagaagaagctcagagcccaaagcaaaggggtggaggacaagggcatcttcagaacagagtggctcggctgagacatccagtaggatgccaccaggcagaggtgtggtggaaaaacacagggccacggtgaatgctcacatgtgaggagcaaaccaccacagaacacaacagaaacacggtgtactaaatcaggcttcaaatcgcagccctgcaacttcagagctaccacaggtaacccggaaagggagcacggacagcaccgcccactgcctgaggctatgagatggaccagaaacctgtgcttactaacaacctgccttattccagaaggaattcaggaaacacaaagacactcacagtacagcaaaataaagtaaatgtgaatcatgttggctgaggagaaagtgaagagtctaagactatgtcataaagtttacctctactctaaactctcattactggcgagccaccaatctgactttaagttttctagcagctaaattgaagaggaaaatgtaatcaggtaaaggtttataagatgcaaacaaaacaggacagccaccacagttgctgagaacacgcgcagctccagctccaggagaaacagggtggccatttcctggggctgccccgcagcaggtgtgtgagcccgaaagccagcgtctctcagggtgaacagtgactacgggcttcatggggccacatgcccccagcacaagctgaggaaatctcccagggcaattcaggcaacagggtctcacagtgtcgcccaggctggtctcaaactcctgggctcaagggatccccctgcctcggcctcccaaagtgttgggaggtcaggcgtgagccactgcacctggccctgcactcacattagagaagagggctttgcatcctgaagggcggtggggcttcatcccacagagatgaaaggcagaggaagctcagagcccaaggtaaaggggggcgcctaagaaaagtgactccattgggaccacggtgagagggtcccgatacacagcttgggttaagccactgatttcaaagtatctcaggaatggtggactcagcacccatcaggcaattctctcaagcagtctcctggtagatatttagtagcagctgaaatcaagattatgttctgactgacacttgctgatggttaaagagctatatacactttgaggaccagctgaactggggcaggactaacaccctctggtgaaaatacaggaacccaaacacacgagtcagagcaggaggtgtctcccccacccccaaacaataacgctgaccttggatttgggttaagtgcctagcccaggggtgtgagtgttcaggaagtggaaaccatcatcaccatcatcaggtaatggaaaaccatcaaagctttgagctggcttgttagccaagaatagtagtagtgtattagctactactaatactcacagctgacaattactgagcacttgctccgtgccaggaatcacggaggcacctcgcatgcatttcctcaatactccctcccagtaacggcgaggacacaaaactggtagagccaggactggaatccaggcaggccccaaggcactccagtggagcctgccaaggagggcaggctaccatgctaatgaggtccagtatttgaccaccactcctagttgagcaaattaacagaaaacctaaaactaaacttaaaatctaaaaatttgagcaaatgcataaaaagcagctgttaaaatggatcannn

SEQ ID NO: 11441 - DNA, 1939 bp, Homo sapiens
  misc_feature 1937, 1938, 1939: n = A,T,C or G
gcgtccgctcgagctcatgcatgtgaaacgtgtgctttgcgaaggtggctataacttcaaaactgtgctcatgtttgaagttctagccactctagctcatgcatgttggacgtgttctttacgaaggtggcaactgacatacttggtctcttcatgccaccagcctactacaaagttctcgttcattggcaacagcagaacctgcctctccgttaagtcatcagcctaaaatttgtttctctctttaagaggattctttgaaaggctcctgcagagaagtcagtacaggttatcccgaaaggtacaaggacgcacttgtaaagatgattaaaacgtatctttcctttatgtgacgcgtctctagtgccttactgaagaagcagtgacactcccgtcgctcggtgaggacgttcccggacagtgcctcactcacctgggactggtatcccctcccagggtccaccaagggctcctgcttttcagacaccccatcatcctcgcgcgtcctcaccctgtctctaccagggaggtgcctagcttggtgaggttactcctgctcctccaacctttttttgccaaggtttgtacacgactcccatctaggctgaaaacctagaagtggaccttgtgtgtgtgcatggtgtcagcccaaagccaggctgagacagtcctcatatcctcttgagccaaactgtttgggtctcgttgcttcatggtatggtctggatttgtgggaatggctttgcgtgagaaaggggaggagagtggttgctgccctcagccggcttgaggacagagcctgtccctctcatgacaactcagtgttgaagcccagtgtcctcagcttcatgtccagtggatggcagaagttcatggggtagtggcctctcaaaggctgggcgcatcccaagacagccagcaggttgtctctggaaacgaccagagttaagctctcggcttctctgctgagggtgcaccctttcctctagatggtagttgtcacgttatctttgaaaactcttggactgctcctgaggaggccctcttttccagtaggaagttagatgggggttctcagaagtggctgattggaaggggacaagcttcgtttcaggggtctgccgttccatcctggttcagagaaggccgagcgtggctttctctagccttgtcactgtctccctgcctgtcaatcaccacctttcctccagaggaggaaaattatctcccctgcaaagcccggttctacacagatttcacaaattgtgctaagaaccgtccgtgttctcagaaagcccagtgtttttgcaaagaatgaaaagggaccccatatgtagcaaaaatcagggctgggggagagccgggttcattccctgtcctcattggtcgtccctatgaattgtacgtttcagagaaattttttttcctatgtgcaacacgaagcttccagaaccataaaatatcccgtcgataaggaaagaaaatgtcgttgttgttgtttttctggaaactgcttgaaatcttgctgtactatagagctcagaaggacacagcccgtcctcccctgcctgcctgattccatggctgttgtgctgattccaatgctttcacgttggttcctggcgtgggaactgctctcctttgcagccccatttcccaagctctgttcaagttaaacttatgtaagctttccgtggcatgcggggcgcgcacccacgtccccgctgcgtaagactctgtatttggatgccaatccacaggcctgaagaaactgcttgttgtgtatcagtaatcattagtggcaatgatgacattctgaaaagctgcaatacttatacaataaattttacaattctttggaaaaaaaaaaaaaaaaaaaagggcgggtcgcttctcagagtcttcggtttggtctcaacaattttctagaccctccnnn

SEQ ID NO: 11442 - DNA, 1077 bp, Homo sapiens
cccgattgcatatttttatataaactgtcttcatagattctttcttctgcttgaaaaattctgctgtccatgctctgtattgcattttacatttattgaatacttcagctccaaaatttgtttgatttcttaaataatttcaacttttcttgtcaggtttctactattgggtgttcattttcctgatttcattgaattgtttctctgttttttattaaagctcaataagatttcctaaaacaaatattttaaattctttatcagatcatttatatatctcattttctttaggatcagctaccagaagattactatgttcttttggtggtatatcccattgttttttatatacttcttattgtattatattgatgtctgcatatttgatggaacagtcacctcttgcagactttatgggttagtttcattgtagaaatatcttttcctacgaggaggaggagtgtgagggttcttcctgtgtgtggtccagcagttccagcatcagtgagggtgctagctatagagtctgcatgcagttcagtcagttgagaacagtgttaacaaataatgcagaggtcctcaacagccaaagctgtagatgtccataatggtcctgagggttgttgggggtctttggtggtgatggctactaaggtccccctcatctctttgtctcccaagaggaatgttgtggctaagagaatccctcttagcattggatctgccttttaggttcacttgcagtgttgatcacaccaatgtctgatgagtagcacctgtggagtagctatggagctaacacctgaagcataagcatgcatgaagggactatggctctggaatctggggcaataatgacactgctgcccaagatgcagactctcttgcttccacattaacaacagaatgtgaggcatggatgcttgcaaagtggctggggagccactgataggaacacaggtgtgcacaaatttacagcagctgctggattggggtggagtctagatttctacggtaactatgccagtgcctaaaacctgagtatccataatgagggcttggcttggggcccaaagt

SEQ ID NO: 11443 - DNA, 721 bp, Homo sapiens
  misc_feature 1, 2, 3, 721: n = A,T,C or G
nnncgcacgtgtatgagcacagagctagactccttctcaaataaataaaataaattaataaaaaaataataaagatgtaatgacagggaaatagacagatgttgatacaccctgaagcaggtagtgaagctggcagttggccactggttcccacagaggattgctctagtgatgctagcaaatcccaaaattggggctcaatccaggagggttcctggcttcataaaggaaataattcaagagcaagccaagagtgtaaagtgaaggcaaagcaagtttatgagagcaagagaacaggaaaatggctgctccacagacagagcagggctactccacaggcaaagtagcacccgtggattgttggctagctatatttatagctactccttaattatgtgctaaataagaggtcggttattcatgaactttctagaaaaaggttggagagttcccagaaccaggggttccttctcttttaaactacatgaggtagcttctgggcattgccatagcatttgtaaacggccatggtgctggtgggagtgtcttttagcatgctaatacattataatgagcatataatgagcaatgagggcaactagaattgatgttcattgccatctcagtttcactgctttcagctggtttctttagtgcatcctgttttgaccagatccgtttcatcatgagcagggtcatgaccactgcctcaaacaatggn

SEQ ID NO: 11444 - DNA, 564 bp, Homo sapiens
gaatgaatatgcagccagcaccttgagcttcccagcctctagaacagcaagaaataaatttctgttgtgtaagcctcccagtccatggtgttttgttccaaactgcccaatacaatggtctcccccagggaaatggagaacacgtgcttctcagtgcagtaggagagttccacatggctggggtggcctcacaatcatggcggaaggtgaaggaggagcagaggcaggtcttacatggtggcaggcaagagagcctgtgcagggaaattcagttctggaggctggaagtctggggtcaaggttgtggccaatcctgtgtctggcaaggctgcttcctggtttgcagacaccatcttcctccctgtccccttcctctcctagacttcctccataggagttcggcaggcactcctggtcttcctttatcttcttgcagaaagatggcccggcaggtccgtccaaacacaaagactggacgcagagacccggagaacagcaaaacggagattttcaatgacagtcttgcaagactgggtgtctggctggcatgcagccaccccgcgt

SEQ ID NO: 11445 - DNA, 701 bp, Homo sapiens
  misc_feature 1, 2, 3, 4, 5, 6, 7, 8, 9, 10, 11, 12, 13, 14, 15, 16, 17,18, 19, 20, 129, 130, 131, 132, 133, 134, 135, 136, 137,138, 139, 140, 141, 142, 143, 144, 145, 146, 147, 148, 149,150, 151, 152, 153, 154, 155, 156, 157, 158, 159, 160: n = A,T,C or G
  misc_feature 701: n = A,T,C or G
nnnnnnnnnnnnnnnnnnnnccccaagtgggggcccagggggggaccccaaaaaaaaccccccccgggggggggaattccccccttaaaaaccccccccgggagggattgggggtttttttttggggcnnnnnnnnnnnnnnnnnnnnnnnnnnnnnnnnactctcatccactagactacatctcacaacaaagctttgccattcaatacaaacagagcacacatgatgcacacgaatagtcttgccaatcagtgatactatagatgctgcaactgtgccatcaaaacagacaaggaaaacacacatccctataatcacttaatcttaagtgtttcattaatgttctcattaggccatttactctatttcagtatgttgctgtttcatgcactattatgtatgagttagacatgaacacagactgaaataaatatattaaatgcatatactatatttaaaataaaataaaaacaacaaatcagtaactctgcaggcattaccaaaacatcttaccaaattatgcatctcatgcatatttgcatttacattctatttaagatgggtcattcccactaacacacttgtggtttgattttgctgtttgtgtttgattttgttttttcacataaaacctgcagcaactgaccttacttccagagtccttggctccacattcacctttatcgtcctcggccgctcn

SEQ ID NO: 11446 - DNA, 1121 bp, Homo sapiens
attttattgaaaagaatctttgttttatttttaatggaatatagggagagaacgaagttagatgcttctgttctgtcttgataccttgacccagaggtcatttttcattctcttagatatgtctttaataattaatagaaactctttgttttaatacagtcagatatttattagagtcaccatattttttatcgtgttgaaaaaattctttcctactgtgatgtcataaagattctctgatactgccttacatagttgcctggctgtcacattcaggcacaggaggccatcttttctctgctgatgggtagtgccagtgtcaggtcaccagaggctctttcagagttctccactctggacgtgtctgacgttattgagcagctttagagtagttcccacgctggtaagcagtcttcttatctcgatctttagtgactttgaagtcagagcagtcagttttttatagatttccatttgttaaaaaaaggcaagttggagggcaaatactttaagctagatcacaagtaaactagacatttcattttctgattcagctgctttatgttgagctccattgcatcgggggtacaaaagggcaatgctgctattctggagttattggaaagactgggaagaagagaaattttaaaaaagagaatggatactttcatctttaaaacaaaacaaaaactctgatgtggatgttccaggcattctgtaaatgaattcttatgaaaaggttgagtcaggcaggtcttaggtaaaccataaaattacagtattttatgtgttttgtatttgtttcatcataggatatatgattggatgcctgaacaaccaaatatattccaagtggagcaattggaacgcctgaagcaggaattgccagagcttaagagctgtttgtgtcccactgttagccgctttgttccctcatctttgtgtggggagtctgatatccatgtggatgccaacggcattgataacgtgaaatgctgacccagctttcttgtacaaagttggcattataagaaagcattgcttatcaatttgttgcaacgaacaggtcactatcagtcaaaataaaatcattatttgccatccagctgcagctctggccc

SEQ ID NO: 11447 - DNA, 1098 bp, Homo sapiens
  misc_feature 1097, 1098: n = A,T,C or G
acgcggggacattttctcggccctgccagcctccaggaggaaggtgggtctgaatctagcaccatgacggaactagagacagccatgggcatgatcatagacgtcttttcccgatattcgggcagcgagggcagcacgcagaccctgaccaagggggagctcaaggtgctgatggagaaggagctaccaggcttcctgcagagtggaaaagacaaggatgccgtggataaattgctcaaggacctggacgccaatggagatgcccaggtggacttcagtgagttcatcgtgttcgtggctgcaatcacgtctgcctgtcacaagcacccgggcaggtacgcgggggacattttctcggccctgccagcccccaggaggaaggtgggtctgaatctagcaccatgacggaactagagacagccatgggcatgatcatagacgtcttttcccgatattcgggcagcgagggcagcacgcagaccctgaccaagggggagctcaaggtgctgatggagaaggagctaccaggcttcctgcagagtggaaaagacaaggatgccgtggataaattgctcaaggacctggacgccaatggagatgcccaggtggacttcagtgagttcatcgtgttcgtggctgcaatcacgtctgcctgtcacaagtactttgagaaggcaggactcaaatgatgccctggagatgtcacagattcctggcagagccatggtcccaggcttcccaaaagtgtttgttggcaattattcccctaggctgagcctgctcatgtacctctgattaataaatgcttatgaaattccaaaaatagggggaacgcaaaaaaacattgttggggcggcaccggacccaggaaaaaggttttcattaaccaacttcgttgtgggccgcgggccgcaatggtaagtgacacacgtgtcacaggtgtcacaagaaacccgggcatcactatgtggttggttttcccccaataaaaaacgccgggcacccggccgtttgaacaaaccccgagggggttcgaggccaatcgggcctaacaagggcagggccgtatccaccggcggtgagggaacagagatcann

SEQ ID NO: 11448 - DNA, 705 bp, Homo sapiens
  misc_feature 624, 701, 702, 703, 704, 705: n = A,T,C or G
aggtacgaagtgcagctgcgcacatgaagagagtggaagttggaaatgggggagagtgattccggcattatttttatccctaccactaatgcttggctcaattcagctgcatgacgtggtggagaaagagctaaattatgagaaaaaagatagaaaggacaattatattttcttccccttcaatatttgtactgggccttacagtaacctgaaattcctgattcttagtcaacctgaaatttacaagtaagttgggtcattaatcttaaccatgatgctcaccaatatggatgcaccttgaggaaatcctagcattttgtgcttagagttggactctgaagaaaatagccattccctcgtgctgcgacagttccattcctaaagcagacttacaactaggtctaaggctggccctagtgagaggcctgagtgagagcagggctctttgaaattgcaaggagaagcaggtcaaacctggccaaggtttccccagtcaaagcactttccttttccaggaatccctttaaggaagaaaataagaagaagcctgaagcttgcaagctgcttagctgccagttttcccccaactctccaacctccccaaaagtccttgtcccctgcaancccagaagccatatctacaaaagccaattgaaatctcagccatgctacaaagtcaaagcctctgagaaactgctcannnnn

SEQ ID NO: 11449 - DNA, 846 bp, Homo sapiens
  misc_feature 1, 2, 3, 4, 5, 6, 7, 8, 9, 10, 11, 12, 13, 14, 15, 16, 17,18, 19, 20, 21, 22, 23, 24, 25, 26, 27, 28, 29, 30, 829,830, 831, 832, 833, 834, 835, 836, 837, 838, 839, 840, 841,842, 843, 844, 845, 846: n = A,T,C or G
nnnnnnnnnnnnnnnnnnnnnnnnnnnnnnccttgaccaatgccagaaaacctttatttccaccgagacctctcatccaattctcttctttccgggaactttttcccttccctactccaggtcgtaccctggccactcctttccttttggctggccaatgtctcctctgtaggctccagaaggctctcagggatgcaggcggcctcccgcagggttgagttgcaatgggaacaaagacagctgtggtcccatagcaccctcatctggtgacatcctgctactgacagtcaaaagaagccttcccagatgaaattttagtcctctgcgcagccatgctcttcttccagcaaaagagccatgtgcagtcgggtctgctccccatgggggctttgatgtgggcccagcagtggatcagccttccagacacgctcaactctgcacactcttcctgccgcctcaggctttccaggaccctcccgagccttatcagagtccttaccctcagggctactgataccttgctgggtgaccttggacagattcacttacctggactcagtttcataatatgaaaatgatagggttgggctacgtgattttcacgttgtgcttccagattgttagaagttaggggctggaaggcattacctgtccctctctcaatttcactcatgctactttgtttttttaatctaccttttatatggggcttagaaaaaagggttctgggacaaacctgagaatcactggctccaggagctttcttttaacactaacatcccaggattcctaagtgtgctctctccacaatggctacctggccctgcgnnnnnnnnnnnnnnnnnn

SEQ ID NO: 11450 - DNA, 317 bp, Homo sapiens
ccgggcaggtacgcggggggttttataagggggagtttccctgcacaagctgccttctcctgtctgccaccacgtgagatgtgcctttcaccttccactatgattgtgaggcctcaccagccatgtggaactagttcaagatttcaacattttaagataatctgaaaaaaattggaatgtgcccccagctgccaatactctctcaacactgtttatcaaaggaaccaatatggaaggaaaaacattgctttgaagggaagatggatggatcccctagtaaactacagcttgaggtgcaatttcctaaagttcaaatg

SEQ ID NO: 11451 - DNA, 2883 bp, Homo sapiens
  misc_feature 1, 2, 3, 4, 5, 2880, 2881, 2882, 2883: n = A,T,C or G
nnnnnatgttctgcaaggcgattaagttgggaaccgccagggttttcccagtcacgacgttgtaaaacgacggccagtgaattgtaatacgactcactatagggcgaattgggtaccccgctcccttaaatggcagctattgtttttttttttttttttttttttttattactcaaagactttcttttattagtacatgggctgggattgatgggaagggacagatgtagttggcaaccatggttagcatcggatgcccatcccaatggccatgaatgtgccaaaggtgccgccactctgcatcatggttttcccaatgccgcccatcagctctcgaccccgcattccgatcctgagacaggaaaaggtgccgaagagcgccccggccgccatgcccacggcgcaacccatcacgaagcccattttgacacggtcgaagcagcttggctgggactgtccgtagggacccacggccaccggcatctcacctcgctcgcgggctgggtcgctcagctctacgtctctcacggaaaacgacggggagggcgcgcgccgccggtcgaatcgcttccggagcgccggcagcacttccgggagcctggggcccaggactgcagcggcttcggaaggtgggctctgccagcgggaccatgctgctccgagccgcttggaggcgggcggcagtggcggtgacagcggctccagggccgaagcccgcggcgcccactcgggggctgcgcctgcgcgttggagaccgtgctcctcagtctgcggttcccgcagatacagccgctgccccggaggtggggccagtgctgcgacctctctatatggatgtgcaagctacaactcctctggacccccgggtgcttgatgccatgctcccttacctaatcaactactatgggaacccacactcccggacacatgcttatggctgggagagtgaggcagccatggaacgtgctcgtcagcaagtagcatctctgattggagctgatcctcgtgagatcatttttactagtggtgctactgaatccaacaacatagcaattaagggggtggcccgattctacaggtcacggaaaaagcacttgatcaccacccagacagaacacaaatgtgtcttggactcctgccgttcactggaagctgagggctttcaggtcacctacctcccagtgcagaagagtgggatcattgacctaaaggaactagaggctgctatccagccagatactagcctggtgtcagtcatgactgtgaacaatgagattggagtgaagcagcctattgcagaaatagggcggatttgcagttccagaaaggtatatttccatactgatgcagcccaggctgttggaaaaatcccacttgatgtcaatgacatgaaaattgatctcatgagcattagtggtcacaaaatctacggtcccaaaggggttggtgccatctacatccgtcgccggccccgtgtgcgtgtggaggccctgcagagtggaggggggcaggagcggggtatgcggtctgggacagtgcccacacccttagtggtggggctgggggctgcgtgtgaggtggcacagcaagagatggagtatgaccacaagcgaatctcaaagttgtcagagcggctgatacagaatataatgaagagccttccagatgtggtgatgaatggggaccctaagcaccattatcccggctgtatcaacctctcctttgcatatgtggaaggggaaagtctgctgatggcactgaaggacgttgccttatcctcagggagtgcctgcacctctgcatccctggagccctcttatgtgcttagagcaattggcactgatgaggatttagcgcactcttctatcaggtttggaattggccgcttcactacagaggaggaagtggactacacagtggagaaatgcattcagcatgtgaagcgtcttcgagaaatgagccctctctgggagatggttcaggatggcattgacctcaagagcatcaagtggacccaacactagaagaatagggccctgactttgtgctggtctggcccctcctgcctcaccaacccgtgcacaaccagacaccttgttacacctagtggatgctctagattggtatagaccagttgacttcagcatcagtccacctctatgacagaaacacaagaaaactgtctttccctagcttcagttccttgggtgtggagcactccccatttcttctcgggtcttaaagtgtgtggacattttcatcccgaagccatagagacatttgctgtcatattgctgctgggcacatctgtgctcttggtgaggagagcaagaggaaccagaagaagtctctttggtcagggaccatgatgctctacatggacatttgagtcttcgtcttctgctgctgctcggctggaccagcttctttaacagcaagcataatccacttcaatgtaatattttctgtagctccaaaggctatctcttcatattgactgcagacagactgaatggacagtttcttagagggcttgtctcctttctacccttgtcctctttcctttcctttgacctaatggagctagaaatatgtctgtgactccaccagttattctaataatttgttttcttgaaaattgttaatttcaagactggagaaataaactcaccttctatttactctgtgactttatgagaaggttgcggaaagtggaagtggaccttgggaatcgggggaaagacacgccctccactggattggtaaggcccgtgggcacaaaaaaacaagcagaacagtacaggaacaagaaaaaagacaaaaaaaaaacaaaaggggggggataaacgggggcaaacacatttaaggggcagaaaaaannnn

SEQ ID NO: 11452 - DNA, 685 bp, Homo sapiens
  misc_feature 1, 2: n = A,T,C or G
nnatccagaaagctcacaattagcatagaaagagaaaatggcgacagaattatggcgaaagatagagattctcatcactagtgcttaaaaagaattcaatcatcaatatataatctcagaagagttctgataagttcctggaatgagacatgctcctaaaatatactaccatcactgtaactaggatctaggctaagtgtattacatatattaacctaactgaattacctatcaaccctatgaggtaagtgcttttattatctctagtttataggtgggaaaaccaatgcttaaagaggttaagtactagctgcttgttacaaacaaaatatttgtgttcccccaaaattcctatgaagttctgacctgcaatgtgatagtatttggaggtagggcctttagaaggtaattagggctagatgagatcatgtgggtggggcacccatgatggaattagtgtccttataaaaagaggaagagctggtgttctctgtctaccaactgaggacacagggagaaggctgccgtctgcaggccaggaaaagagccctccccagagctcaaccatgctggcaccataatctcaactcctagcctccagaagtatgaaaaataaatgtctgttgtttaagcccccagtctatggtattttactatgacagctcaagcagactaagatgctagt

SEQ ID NO: 11453 - DNA, 564 bp, Homo sapiens
  misc_feature 564: n = A,T,C or G
ggcaggtacaacaggcttcagatgttactatagataatcacaaggaacactgcgcttggggcatgactgccctcagcaacccttctggcggcagacacagttgttagttttccaacatcctgctttcatgagaacagttttctgtttgctcatatagccttcagtggtatactgagttggtcacgaccttcattctttcggcctgtaacatctccccatttttgtttttgcattaattgaataaaggtaattgcaggttgtgcagctctcaattgccgtttggtggtccagctgattttgcagacttatatcagctgtcagcagactcgtcgcagggtttctcattctcgttcttcttgtcagtgtcagtttctctgctccagcagaccttcactcacgtccctgtcctaggtgccagttgtcgctgttggttgttatgggagtgaacgaagggggatgaatgcagaaacgaagacaaagacaaaaagtatttttggaagaaggggtcagggggctccttctagtgagcaagggcccccgcgtacctgcccgggcggccgctcn

SEQ ID NO: 11454 - DNA, 361 bp, Homo sapiens
ccgggcaggtactgtgtctgatgctccacacagaaggatgaatgggaccaaaggtcctactctaaaccattcacagaggagtagtgagacctattagaaaggatttgaaacaaaagctttcaggtgatctgcaactctttcaccatctgtaatgcggagatgcaggaagttggtgttggcctatatcccagtatctctttgctcaatcacagctgtgaccccaactgttcgattgtgttcaatgggccccacctcttactgcgagcagtccgagacatcgaggtgggagaggagctcaccatctgctacctggatatgctgatgaccagtgaggagcgccggaagcagctgagggaccagt

SEQ ID NO: 11455 - DNA, 4193 bp, Homo sapiens
acgcgggggggcccggaagtggtccctgtagaaccactgtggcaccgctactccggtgccgcgcccgtcgagcattgcgttgctgcattgcgccccaccgactccactatgttgaagaaattcgacaagaaggatgaggagtcaggtggaggctccaacccattccagcaccttgagaagagtgcggtactccaggaggcccgtgtatttaatgaaactcccatcaaccctcggaaatgtgcccacatcctcaccaagattctttatctcataaaccagggggagcacctggggaccacggaagcgaccgaggccttctttgccatgaccaagctctttcagtccaatgatcccacactccgtcggatgtgctacttgaccatcaaggagatgtcttgcattgcagaggatgtcatcattgtcaccagcagcctaacaaaagacatgactgggaaagaagacaactaccggggcccggccgtgcgagccctctgccagatcactgatagcaccatgctgcaggctattgagcgctacatgaaacaagccattgtggacaaggtgcccagtgtctccagctctgccctcgtgtcttccttgcacctgctgaagtgcagctttgacgtggtcaagcgctgggtgaatgaggctcaggaggcagcatccagtgataacatcatggtccagtaccacgcactagggctcctgtaccatgtgcgtaagaatgaccgcctagccgtcaataagatgatcagcaaggtcacacggcatggccttaagtctccctttgcctactgcatgatgatccgggtggccagcaagcagctggaagaggaggatggcagccgtgacagcccactgtttgacttcatcgagagctgcttgcgcaacaagcacgagatggtggtgtatgaagccgcctcggccatcgtcaatctgccaggctgcagtgccaaagagctggccccggctgtgtcagtgctccagcttttctgcagctcacccaaggctgctctccgctatgctgctgttcgtaccctcaataaggttgccatgaagcatccgtcagctgtgacagcttgtaatctggatctggagaacctggtcacagattcaaaccgcagcattgccacgctggccatcaccaccctccttaagacgggcagcgagagcagcatcgaccgcctcatgaagcagatctcctccttcatgtcagaaatctcggatgaattcaaggtggtggttgtccaggccatcagtgccctgtgtcagaaatatcctcgcaaacacgccgtccttatgaacttcctgttcaccatgctgcgggaagagggtggctttgagtataagcgcgctatcgtggactgcatcatcagcatcattgaagagaactcagagagcaaggagacagggctgtcacatctgtgcgagttcatcgaggactgcgagttcacagtgctggccacccgtattctacatctcctgggccaggaggggcccaagaccaccaatccctcaaagtacatccgcttcatctataaccgagtggtcttggagcatgaggaggtccgggcaggtgctgtgagtgctctggcgaagtttggagcccagaatgaagagatgttacccagtatcttggtgttgctgaagaggtgtgtgatggatgatgacaatgaagtaagggaccgagccaccttctacctaaatgtcctggagcagaagcagaaggcccttaatgcaggctatatcctaaatggtctgactgtgtccatccctggtctggagagggctctgcagcagtacactctagaaccatcagaaaaaccttttgacctcaagtctgtgcccctggccacggcgcccatggcagagcagagaacagaaagtacccccatcacagcagtcaaacagcctgagaaagtggcagctaccaggcaggagatcttccaggagcagttggcagcagtgccagagttccgcggtcttgggcccctcttcaagtcctcgcctgagcccgtggccctcaccgagtcagagacggagtatgtcatccgctgcaccaaacacaccttcaccaaccacatggtttttcagtttgactgcacaaacacactcaatgaccagaccttggagaatgtcacagtgcagatggagcccactgaggcctatgaggtgctctgttacgtgcctgcccggagcctgccctacaaccagcccgggacctgctacacactggtggcactgcccaaagaagaccccacagctgtggcctgcacattcagctgcatgatgaagttcactgtcaaggactgtgatcccaccactggggagactgatgacgaaggctatgaggatgagtatgtgctggaagatctggaagttactgtagctgatcacattcaaaaggtcatgaaactgaacttcgaagcagcctgggatgaggtaggggatgaatttgagaaggaggaaacgttcaccttgtctaccatcaagacacttgaagaggctgtgggtaatattgtgaagttcttgggaatgcacccttgtgagaggtcagacaaagtgccggataacaagaacacccacacgttgctcctggctggtgtgttccggggtggtcatgacatcctggtgcgctcccggctgctgcttttggacacagtgacaatgcaggtgacagccagaagtttggaggagctgccagtagacatcatcttggcatctgtgggataagaggccagcctgcataggacctcatacccttccccaacactacctggaagttgtgccttcctcatgaaactggcagaaaccccttcccaagcttctgtattgaaaaacaattaggaatcattgcagatttttttttattctgctcccacctcccacccgggactacttgctggtgactttttttttttttttttttaaataggggatgattttagcttgtcctaaatcttgctgtccacccttccaggaaagggacattgtaaatgaataaaacattctcaactcctcttgaaaaaaaaaaaaaaaaaaaaaaaaaaaaaaaaaaaaaaaaaaaaaaaaaaaaaaaaaaaaaaaaaaacagagggccggccggccgtcatacaaacttcactccccccgcgcggcgccacccaactaaccgccgcccaccacatgctagtcttattgagagcagacgggcgcgcccccactagtacgcggaggcctactaccatctaacccagagcacgcgcacgcgtgcgcgccgcgatcttaaaaacagcgttaggcagcgcgacgggcaacaacaccgctcggctgcgccgagagcatcatcctgacgcgaagcgcacccccaaactatcctccgggtgctggaacaaacaacgaggcgcgcacaccgtacactacccgacaagcaattctcagcgccactaaggagcgaccaacaacacacaacccacacacgcgacaccgacccgccggcaacaaccaccacccacccacatatcactggcgccgcgcgcgcaagacacagcctacgcccctaccgcggagagcataattcggaacagacacatatacatatcacccacgccggacagccaccacaagacacaaccgccggcaccgcacacaacaccacaaccaccgacaccacaacacccagacacccaacacgcagcccacgaccacaccacagcactacccacaccacacgcccacgcccgagctgcatcgagagcgagcgctcagcacgtgcaagtacagtcgaaccgcggacagatcgagcgacaagagagcgaggcacgcagactcgcacggcacgagcgcaaagcagagacgcagcgcacaagaccacggcaacgacctgaaccacgacgcagagcacgaaacgcaaaagaacaagccaagccagaagacacaaccataagacggcgagcgaagaagcgaacggccacacagacgacggctggcgcgaccgagatgagagacacgagcagaggacgacacacgcacgagtcgacggcgcaccctcctcgccagagcccagaacacggaaggccgatggtcacgaagctgcaccgcacagcgaccgagcgacgatccgctccagagtgaggatacgtcgaggagacgaccagcaagcgaagacaacgcaggactgaaacgcagggaaagaccacagccagcgatgcgca

SEQ ID NO: 11456 - DNA, 529 bp, Homo sapiens
  misc_feature 1, 526, 527, 528, 529: n = A,T,C or G
nacgactactataggcgattggacatcgcagctcccgccgggccgccgtccgggcaggtacgcggggcaacaagagcactggccaagtcagcttcttctgacagagtctctagaagacatgatgctacactcagctttgggtctctgcctcttactcgtcacagtttcttcctgccttgccattgctttactgctggaaaagaggcctcctcagacactctcaagaggatggggagatgacatcacttgggtacaatacttggccgaaatctgtcaggtcagcccaactttccttgtcgtgtcaatgctgtgcctcgtcctataccggagaaaaaatggttcgtggagcctgcggttattgtttgcctgggtggaattttaccttttggttcaatctttattgaaatgtatttcatctccacgtctttctgggcatataagatctattatgtctatggcttcatgatgctggtgctggttatcctgtgcattgtgactgtctgtgtgactattgtgtgcacataannnn

SEQ ID NO: 11457 - DNA, 1415 bp, Homo sapiens
  misc_feature 1413, 1414, 1415: n = A,T,C or G
acgcggggcccgcctcaaagaaagaagagtccaccttgcgaccgtatccgctagcgcggcctgggatgcgcttgggctccctgttcgttcccacatgcagggcagcacaaggagaatgggcgtcatgactgatgtccaccggcgcttcctccagttgctgatgacccatggcgtgctagaggaatgggacgtgaagcgcttgcagacgcactgctacaaggtccatgaccgcaatgccaccgtagataagttggaggacttcatcaacaacattaacagtgtcttggagtccttgtatattgagataaagagaggagtcacggaagatgatgggagacccatttatgcgttggtgaatcttgctacaacttcaatttccaaaatggctacggattttgcagagaatgaactggatttgtttagaaaggctctggaactgattattgactcagaaaccggctttgcgtcttccacaaacatattgaacctggttgatcaacttaaaggcaagaagatgaggaagaaggaagcggagcaggtgctgcagaagtttgttcaaaacaagtggctgattgagaaggaaggggagttcaccctgcacggccgggccatcctggagatggagcaatacatccgggagacgtaccccgacgcggtgaagatctgcaatatctgtcacagcctcctcatccagggtcaaagctgcgaaacctgtgggatcaggatgcacttaccctgcgtggccaagtacttccagtcgaatgctgaaccgcgctgccccatgcaacgactactggcccacgagatccaaagtcttcgaccctgagaaggagagggagtctggtgtcttgaaatcgaacaaaagtccctgcggtccaggcagcattagccatcgtgccctgctgaggggctggctgccttgagtggcctgatcgccacagccttcttggaagaaaggcgtcgtgtttcaggtcacgcgagtcacctctttcgtcgtaatgttcaccgcccaaacaggacccacagccacaccacacccgccgctgcgcgacacgacaccactgcgccgcggcaaggacaccacgcggcaaggggaaaatcgagagagcacgcgcaagggcgcatagtggagaggacgcaggccagaacaatgactgggcggacaccgcgccagcgcgaaccaaagccacagaccaggcgagagagggcggcaagacggatagggcgacgatggagccgagaaggtgatcgggcgagcccgcggacatcactacggtaggcagaggcaagcgaagaggagagggacccggacggtgacagtgcgggcacgaggggcagccgacgacgaaagcgagagggcccaggagtggagcggtggtatcaggtggaagataagacctagagccacgcgannn

SEQ ID NO: 11458 - DNA, 1496 bp, Homo sapiens
  misc_feature 1487, 1488, 1489, 1490, 1491, 1492, 1493, 1494, 1495, 1496: n = A,T,C or G
cgcgtccggcggaaacatggcggtcgcggccgggccggtaacggagaaagtttacgccgacactggcctgtattagcgcgtatggcctcgggccctcgttccccaaggcgtgccgcctccctgttctcagtcgcaggctgaagccttgtctgctctcctcctttttggtttggttttggaactgactccgagggttgggagagcgcgttggtggcgacggccgagtcagatcactataaacaaaatttccacaagagaaaatgttgaaataggagttgcggatacattggatatactggatgaaatacaagcggttaatttttgtaacgtgagggaaaagcccacattgctggttacatgtgtaaatcactgcgttattgctttagtcattgtctctatttagcaatgaccagactggaagaagtaaatagaggaagtgaacatgcattcttcagtgcggtatcttggctatttagccagaatcaatttattggttgctatatgcttaggtctatacgtaagatgggaaaaccaacagcaaattccttaattttggtaatttttattcttggtctttttgttcttggaatcgccagcatactctattactatttttcaatggaagcagcaagtttaagtctctccaatctttggtttggattcttgctaggcctcctatgttatacttgataattcatcctttaaaaatgatgtaaaagaagaatcaaccaaatatttgcttctaacatccatagtgttaaggatattgtgctctctggtggagagaatttctggttatgtccgtcatcggcccactttcactaaccacagttgaatttctggagacttgttggatttgccattgccagcacaactatgttggtaggagaagtctctgagtgtcatttagctagtagtagactactggctatgctgattatgatctgagaatgaaatctattcttagctattccaaacttagtaatttaagcagttctgtcataatataacctcatggaaatcccaaaaatccgatgcttagcgtgtaaaaattgctgataactgatcctaatccctagacacattataaaagaggactttcagtaactgcacaagagggaaaccataaaagaccgggaagcaatgcacgcaaaactacagaacgaacaagatggatgatcgaagcaaacatgagaaatacatcgcataaactaaagaacaacacacggaaaaagcaacaccagaattccaaaggaatacggagactcgcacaacgcaaacacccggaaacaacacaaaaaagaaaaaatacaaagaacaaaccaaaatacacaaaagaaaaagacaagagggaaaagaagaagaaagaaaaaaaaaaacaggacagaacaaaaaggcaaccgaacgtaacgcaacaacacaagaacaaaaaaagagaactaaaaaaagcacgaacaacgaagaagaagagagaggaaagaaaagcnnnnnnnnnn

SEQ ID NO: 11459 - DNA, 1870 bp, Homo sapiens
tttttttttttttttttaaaagcacaactatatttgggcacgacggatttaagtttttcttgttgagaagagtacatctttccaaactggacatcaaggaattgctacacagaagaaccacatccaggatagaaaggaccagccagagctcgttcagtagtgtatttcagaatcatcagggaggagccggtagcagaattatcccgttaacactgagaccacatttcacctgttacttatttttctaaatggagtaggagagaaagatgctaaaatgtgatcttgggaggagtcccccagtcccccgaaaaagaagaagaaaaaaaaaaagcagaactccaaacccctgtggtcatggcaatttcccatcaaaactgcccatgtaaaataaacacaagctgctaaaagtgaatgttaagaaggaaggcactggttagtgggtggtcctgaccaatcccctggagctggagaggggttttcccacggcctttggtttaatgtgtctgtaaactcaacaaacctccgtttccctgaggtaatctgcaaaaacatcagttttcagtccccagagaccatttccaattaaacctcaccccccaaatcattcaatgtaacatttgccttatttttagaagaaacaaatgttcccatattattcccagtttttgagagaatcctgaggcagctctctcggctgctacttgaagttgaattcttgaaaaatcttatgtaaacagaaagcttaggccaggtcaggagtaaaatgcagtcaaagctctttctcatcacacaggtgattacaggttagctctgccctattcaagacaatctgatccattcctttttttgacagcagtttagagacaattggccaacaaaaccagcctggccaacaaggtgaaaccgtcgctactaaaaatgcaaaacttagctgggcatggtggcaggtgcctgtagtcccagctacttaggaggctgagacaggagaatcgcttgaacccggggaggtggaggttgcagtgagactgagatcatgctactgcactgcggcctgggcgacgagcgactctctgtcttaaaaaaaaaaaaaaacaaaaaaacctcagcaggccatactgcatcttgagaagtctttttgaagctactttagtttgactttagtgttaaagtagctaaaaatttttgactcccgcccacatattcagataccctcactttgtgcataggatttgtccattacacctcagtcatctaatttgttggtataaaagataccctcggctgggcgtgatggctcacgcctgtaatcccagcactttgggaggccgaagcaagtggatcacttgaagtcagtttgagacaagcctcaccaacatggtgaaaccccttctctactaaaaatacaaaatttagccgggtgtggtggcaggtgcctgtaatgccagctactcgggaggctgaggcaggagaatcgcttgaaccctggaggtggaggttgcagtaagctgagattgtgccaccgcactccagcctgggcaatagagcgagactctgtatcaaaaaaacaaatgaaaaaaagataccccactccaaagttctgagggtagcctctggtatgaagaaaccagggctccctagaaataaatctaaacttgaaccaggctttccccctcacacataccccagggaagaggctgagctcatggaaagctgcaggaagtcattttggcttcaggggctgggagagcagacacaacctctgaaacagagtcagggacgtgggaacataaaacatccacttagccatcctaacagtgctggtcctgtgaaggggtgttggttggagtttgggagcaaagaaaagtgctgc

SEQ ID NO: 11460 - DNA, 773 bp, Homo sapiens
  misc_feature 1, 2, 3, 4, 5, 6, 7, 771, 772, 773: n = A,T,C or G
nnnnnnngtgtgttgtggtgtggttttaaatacttacagctttattaggagaaggctgtggtcacctcagcagccagctcccttgtatacacagtatacacagcccagccagcacccaggtccttccatccttctgcagtacatggagtgcaaaagaaccaaacacaacggcggggagggagggtctaccaatgagtgtcagtgtctagtgcttccgggagccaactgccaggctagggacactcaagtccctcaaactgtcatcagctcctgccagaccccactccagcatgtcgaggttcatatgagagtgtttgggccagactcctccaatcagtgcacgcgatgggcagaggaggctagggaatcctgagcccaaagctgtattggtccatccccctcaagaagttgttggagctttcagaacgttcctcttcttgtgtagacatgagataccgctgtaactttactccatcaccagaaacctgtgccttgagtctagtctctgctcagccctcgagagcatggttggattaaggaaatagtcaaaggcaagcaagacaaactccctaggttgtcttggtcatgcgtcttttaaaaagggaaagaagaaaaaccaccacaacagataaaagcaccgaggcctggcttgtgtcaggagccagagaggttgtccttccttgaaatggtttgtaaagtgactgatggcaaaagctgctctcctctactggaggccagcctccaaccgatcaccggacgcgtgggtcgacnnn

SEQ ID NO: 11461 - DNA, 1299 bp, Homo sapiens
gagtcgacccacgcgtccgggcccgacctgcttgcggtgtagtgggcggaccgcgcggctggaggtgtgaggatccgaacccaggggtggggggtggaggcggctcctgcgatcgaaggggacttgagactcaccggccgcacgccatgagggccctgtgggtgctgggcctctgctgcgtcctgctgaccttcgggtcggtcagagctgacgatgaagttgatgtggatggtacagtagaagaggatctgggtaaaagtagagaaggatcaaggacggatgatgaagtagtacagagagaggaagaagctattcagttggatggattaaatgcatcacaaataagagaacttagagagaagtcggaaaagtttgccttccaagccgaagttaacagaatgatgaaacttatcatcaattcattgtataaaaataaagagattttcctgagagaactgatttcaaatgcttctgatgctttagataagataaggctaatatcactgactgatgaaaatgctctttctggaaatgaggaactaacagtcaaaattaagtgtgataaggagaagaacctgctgcatgtcacagacaccggtgtaggaatgaccagagaagagttggttaaaaaccttggtaccatagccaaatctgggacaagcgagtttttaaacaaaatgactgaagcacaggaagatggccagtcaacttctgaattgattggccagtttggtgtcggtttctattccgccttccttgtagcagataaggttattgtcacttcaaaacacaacaacgatacccagcacatctgggagtctgactccaatgaattttctgtaattgctgacccaagaggaaacactctaggacggggaacgacaattacgtgagtatgaccaattccttataagaattaatagtcatggtgaggatcttgactctccagttctattctctgagcaaatgacttattctgggccttaattttcctgccttataaaatgaggaaacagaactgttgtcacttgaagaaatgtttgaggacctgcaaagggccaggcacaaaggtttgtgattgctgttgtacatggagggtataaagtaggaaatagcagcagcttccccaagggagaaggcttcttgggtacccacagaggaggcactgcttggtcagtttcccaggttagaagagtaatttgtctgtggagcatcctgaataaaggcatggaggcatagcatgctcactagatgaacagagtttttttcggtggcagttatggatagaatgtgatgaac

SEQ ID NO: 11462 - DNA, 598 bp, Homo sapiens
  misc_feature 459, 472, 524, 597, 598: n = A,T,C or G
acgcggggaacacatccaagcttaagacggtgaggtcagcttcacattctcaggaactctccttctttggggagcctcagatgggaagggactcgagccccacctgtccctggactctggaatgccacggaattaacccgagcaggcatggaggcctctgctctcacctcatcagcagtgaccagtgtggccaaagtggtcagggtggcctctggctctgccgtagttttgcccctgggggctcaccgtgtgggggagcaaatcatgtatatccagtgctgtgagtggctccagtcatggaggagcaaggatgagttctgcctggaagaatctgggaaggcttcctggaggagggaacaatggcatggaccttgaagagtcagaagctttcaattcattccattcaagcattgctctcatgtggcattcaagcattctatagtgcttgccgtgactcangcgcacagtgcanaaggaagcacatctttctctgccatgaggacttattagtgtctgaagagctntttctggactataggagaaagtcatggtctccctcactaataaacactgaccctgcttcggatgagctaacann

SEQ ID NO: 11463 - DNA, 1289 bp, Homo sapiens
cgtgcctcacttgggttatgaaggttttggtctctctgagagtggctggaggcagcaggcttacctgtactctgactcgaggagagttggataaaagtgcacaccttaaaacaaattgaatgaggaagcacagtatttcagtacagtggacagcttagcatgttgacaactgagaataaaatgctcagttctgaactggacaatgtaagacacaacgaggaaacactggaaatggaaattcaattacgtcattgtagactggctgctgctctacatgattgtgaccaaagtcagatagctgaaagagacttctttccagagaacaagacatgaacaggtttatttacagaagacaatgaattctcatttatctcacctaaaagagaacagattctttctcaacaagtctaatgtggacagtaaaatcaacaggctaaaaattaagctccacgaaacaagataaaactctgagagaaaagacggggcaggccgccatctttcccgttcaggcaacttagtcattccagcctgcgggctttggagagtcaaaccgacgagggacagaagagatcccacagcacagcatagctgctttaccaaatcatggccagactgcttctgtaagcaggcccctgatcctgttccatctcactggacaggacctcccaactggggcctccagctacccccaccagcattccttggccaatggaaatgtgaaatgttcctgggacagagctcccggagagagggacaggcccccacctttggtctttcggtgactagccattctggcctgcgggttttggagagcccaagctgacaaggggtggaagacgtgcctcagcacagcacagccacgctacaaaaacgtggccagactcttgtttacgtcagtccctgaccacatttctagtcagcgggtgaagtctttcaaccagggtctctggctaccttgactgctgttctctggccgacagaggtctcaggcctccctgagtcagagctcccagggggaggaccagattgtcatctttgctgtttgggcgacccaggcatttcagccttagggcttcagagtgtctgaggcggaccaggggttcacttttgagagagttctcctctgagacctgatctctggaggctgggcagtcttgcacatgagatggggctggtctgatggcagcactccttagtctgcttgcctctcccatggccctagcctggccacacatgcttacagggcagtcttagatgcccacactatagctgccgtgctagtggactgt

SEQ ID NO: 11464 - DNA, 556 bp, Homo sapiens
acttttttttttttaacagttaagaatgtgtgacgttatttatgaccagaaagttcagattgagtctaaaaatcacagtagaggctaacccgtattattattatttaaacacaattaaacatttaaagatgagttctgggggagtaattactcagatgttaacactagtgcccatcaaagaaggatttttaaaagatacattttcacatttcatttattgtaaaatcttgattgtgctactctattaataccatgaataatcttaagtagcaggtaagcaaataaaatacataattgtattttggcttattctgtgtaagtttacaaatctgtttaccttattcaacaacaaaatatttattgatcaacacactctgtgccagttactgttttagacactggaaatgtaacagtaagcaacacacatacaaatccctgtccttggttattctctttaggttactgttaaaatatctgtggtcctttgcttgggtgcagatgtgattggttgatgcagggggaagccataagctatgctgggtgtagagaggaagct

SEQ ID NO: 11465 - DNA, 467 bp, Homo sapiens
  misc_feature 1: n = A,T,C or G
ngactccaccgcggtggcgccgcccgggcaggtacgcgggtaatcaggttgtcatattattattgttttggtttgcttagaaatatatatatatataaaccttgggcacctgtcaggacttcctgaggctgtgtcatgggcgtgtcctcaacgttggcaaaataaactttctgaattaactgagacatgtcttaaattttgggagttcacaagggaaacaagggtaagaattaaacttcactaatatttctcaccctccaaagccacttcaaccactgcctttctcatttcggttaatagcaactccaatcttccagcagtttaggctgcaaaaccttagctcctctctgtcttacacttcacatccaatctgtcacctattcaaagtatcccccaaatcgagcaatttctcaccatctcttactaatacacctcaggtccaaaccaccagtatacctccctagagt

SEQ ID NO: 11466 - DNA, 482 bp, Homo sapiens
  misc_feature 482: n = A,T,C or G
actttctttttttcttgcttcttttttttgggggtgatacataaagttttgcattttccaataaatgatgactgtgattcagtgaaatatggcatatgtgtaattaaaaaccactttttataaaaactatctttgctgcatgttgctctatgacattttctgtgtgttattttatttcttttccttttaatgctgttcactgctacccatttagtcaacttggaccaccctctagaggggcttcaactgttattttcaatacattgtcacagggacagaggagggtgttagggaactctgtgactaaagagttttccataaatgggtggacctcagtttacaagcattaagttattgggccaggagggggaacagatcatgattaggagagtggaaaagaaagatgacaaatcactttaagtcagacaaacctctttctgtactagctcccttacttactaatcatagaactggggatatan

SEQ ID NO: 11467 - DNA, 1595 bp, Homo sapiens
aggtacgcggggccactactccagacagacggctttggaatccaccagctacatccagctccctgaggcagagttgagaatggagagaatgttacctctcctggctctggggctcttggcggctgggttctgccctgctgtcctctgccaccctaacagcccacttgacgaggagaatctgacccaggagaaccaagaccgagggacacacgtggacctcggattagcctccgccaacgtggacttcgctttcagcctgtacaagcagttagtcctgaaggcccctgataagaatgtcatcttctccccactgagcatctccaccgccttggccttcctgtctctgggggcccataataccaccctgacagagattctcaaaggcctcaagttcaacctcacggagacttctgaggcagaaattcaccagagcttccagcacctcctgcgcaccctcaatcagtccagcgatgagctgcagctgagtatgggaaatgccatgtttgtcaaagagcaactcagtctgctggacaggttcacggaggatgccaagaggctgtatggctccgaggcctttgccactgactttcaggactcagctgcagctaagaagctcatcaacgactacgtgaagaatggaactagggggaaaatcacagatctgatcaaggaccttgactcgcagacaatgatggtcctggtgaattacatcttctttaaagccaaatgggagatgccctttgacccccaagatactcatcagtcaaggttctacttgagcaagaaaaagtgggtaatggtgcccatgatgagtttgcatcacctgactataccttacttccgggacgaggagctgtcctgcaccgtggtggagctgaagtacacaggcaatgccagcgcactcttcatcctccctgatcaagacaagatggaggaagtggaagccatgctgctcccagagaccctgaagcggtggagagactctctggagttcagagagataggtgagctctacctgccaaagttttccatctcgagggactataacctgaacgacatacttctccagctgggcattgaggaagccttcaccagcaaggctgacctgtcagggatcacaggggccaggaacctagcagtctcccaggtggtccataaggctgtgcttgatgtatttgaggagggcacagaagcatctgctgccacagcagtcaaaatcaccctcctttctgcattagtggagacaaggaccattgtgcgtttcaacaggcccttcctgatgatcattgtccctacagacacccagaacatcttcttcatgagcaaagtcaccaatcccaagcaagcctagagcttgccatcaagcagtggggctctcagtaaggaacttggaatgtaagctggatgcctgggtctctgggcacagcctggcccctgtgcaccgagcggccatggcatgtgtggccctgtctgcttatccttggaaggtgacagcgattccctgtgtagctctcacatgcacaggggcccatggactcttcagtctggagggtcctgggcctcctgacagcaataaataatttcgttggacacgt

SEQ ID NO: 11468 - DNA, 892 bp, Homo sapiens
  misc_feature 891, 892: n = A,T,C or G
acgcggggaccacttcctcatagaccttggatgtgggaggattgcattcagtctagttcctggttgccggctgaaataacctgaattcaagccaggaagaagcagcaatctgtcttctggattaaaactgaagatcaacctactttcaacttactaagaaaggggatcatggacattgaagcatatcttgaaagaattggctataagaagtctaggaacaaattggacttggaaacattaactgacattcttcaacaccagatccgagctgttccctttgagaaccttaacatccattgtggggatgccatggacttaggcttagaggccatttttgatcaagttgtgagaagaaatcggggtggatggtgtctccaggtcaatcatcttctgtactgggctctgaccactattggttttgagaccacgatgttgggagggtatgtttacagcactccagccaaaaaatacagcactggcatgattcaccttctcctgcaggtgaccattgatggcaggaactacattgtcgatgctgggtttggacgctcataccagatgtggcagcctctggagttaatttctggaaggatcagcctcaggtgccttgtgtcttccgtttgacggaagagacgatggttctgctatctagaccaattcaggagggaccgtccatccaaatgaagaattcttcatctggttcctaagaagaaaggaatacggaaatttatctttattttaacctggaattgagattggctttgatacatacggggcattcgctctgtgttcacgaccttgtgctgccccatcgccgtgggtccccccaggatttgggagcgcttatctcgggagagggattatcggggcggggtaagaacttggacgcann

SEQ ID NO: 11469 - DNA, 3579 bp, Homo sapiens
  misc_feature 3559, 3560, 3561, 3562, 3563, 3564, 3565, 3566, 3567, 3568,3569, 3570, 3571, 3572, 3573, 3574, 3575, 3576, 3577, 3578,3579: n = A,T,C or G
tgtgggaggttgacccacgcgtccgcccacgcgtccgcgttaggggaaggtgggggcaatcatggtgccgctggggaggggagaagctgctgctgccgccgttgccgggagccgcggagacaagtcattacgttttcatttctcacaactgggctgagcacaactgaaccatgggggaacacagtccagacaacaacatcatctactttgaggcagaggaagatgagctgacccccgatgataaaatgctcaggtttgtggataaaaacggactggtgccttcctcatctggaactgtttatgataggaccactgttcttattgagcaggaccctggcactttggaggatgaagatgacgacggacagtgcggagaacacttgccttttctagtagggggtgaagagggctttcacctgatagatcatgaagcaatgtcccagggttatgtgcagcacattatctcaccagatcagattcatttgacaataaaccctggttccacacccatgccaagaaatattgaaggtgcaaccctcactctgcagtcggaatgtccggaaacaaaacgtaaagaagtaaagcggtaccaatgtacctttgagggctgtccccgcacctacagcacagcaggcaacctgcgaacccaccagaagactcaccgaggagagtacacctttgtctgtaatcaggagggctgtggcaaagccttccttacctctcacagcctcaggatccacgtgcgagtgcacacgaaggagaagccatttgagtgtgacgtgcagggctgtgagaaggcattcaacacactgtacaggctgaaagcacatcagaggcttcacacagggaaaacgtttaactgtgaatctgaaggctgcagcaaatacttcaccacactcagtgatctgaggaagcacattcgaactcatacaggggaaaagccatttcggtgcgatcacgatggctgtggaaaagcatttgcagcaagccaccaccttaaaactcacgttcgtacacatactggtgaaagacccttcttctgccccagtaatggctgtgagaaaacattcagcactcaatacagtctcaaaagtcacatgaaaggtcatgataacaaaggacactcatacaatgcacttccacaacacaatggatcagaggatacaaatcactcactttgtctaagtgacttgagccttctgtccacagattctgaattgcgagaaaattccagtacgacccagggccaggacctcagcacaatttcaccagcaatcatctttgaatcaatgttccagaattcagatgatacggcaattcaggaagatcctcaacagacagcttccttgactgaaagttttaatggtgatgcagagtcagtcagtgatgttccgccatccacaggaaattcagcatctttatctcttccacttgtactgcaacctggcctctccgagccaccccagcctctactacctgcctcagctccgtctgctcctccgcctgctccctccctaggacctggctcccagcaagctgcatttggcaacccccctgctctcttacaacctccagaagtgcctgttccccacagcacacagtttgctgctaatcatcaagagtttcttccgcacccccaggcaccgcagcccattgtaccaggactttctgttgttgctggggcttctgcatcagcagcggcagtggcatcagctgtggcagcaccagccccaccacaaagtactactgagcccctgccagccatggtccagactctgcccctgggtgccaactctgtcctaactaataatcccacaataaccatcaccccaactcccaacacagctatcctgcagtccagcctagtcatgggagaacagaacttacaatggatattaaatggtgccaccagttctccacaaaaccaagaacaaattcagcaagcatctaaagttgagaaggtgttttttaccactgcagtaccagtagccagtagcccagggagctctgtccagcagattggcctcagtgttcctgtgatcatcatcaaacaagaagaggcatgtcagtgtcagtgtgcatgccgggactctgcaaaggagcgggcatccagcaggagaaagggctgctcctccccaccccctccagagccgagcccccaggctcctgatgggcccagcctgcagctcccagcgcagactttctcttcagcccctgttcccgggtcatcatcctctaccttgccctcctcctgtgagcaaagccgacaagcagagactccttcagaccctcagacagaaacattaagtgccatggatgtgtcagagtttctatccctccagagcctggacaccccgtccaatctgattcccattgaagcactactgcagggggaggaggagatgggcctcaccagcagcttctccaagtgaagggcccatgtgtgctcacctctgggaaaagcgggtgagcaggaggcatgaggtacaatgcctgccatcatgggtcagaaatttgaaggatgaagaaatctactgtttgaaatcctcacctttcagacgtattttctttattcacatcccaggagcatccattttaaggaactattctttggaaaaaaacaaaaaacaaaaaaaacaacaaaaaaagctaagttataagtgaactgtttggctgcactgtatgtcacttttgcttgttgtcatgtgaacttggaaactaaggttactcgtgtgcataaaaattctaaatgaaagggtgtggtttccatcaatctgatgctgcccatcgcttgcactggggtctttgtggatcgggcaggagttttcagtgtgttgggtgttgctccttcctatgtgtcttttgaatctgaggctgacatttgcttggaaggccagacccttgctccatcagagagggcagtggcaaaggccagtgaggcagctgtgagttggacagggttcaggtgagatggtgttgtcatttgtgcttagtgttggtggtgctcagggtggataacacgggtcgttctgcagcccgcttcagcacaaataggcagcttaaggcctggctcacaggctgtggggttgatctggctctgcagaggccctaggcagcttgttgactgctgtctgttgatgacgtgtgtgcaaagcaggctctagcaacatgatcactgtccttgccttcctggttctttctctcggttggttgccagggcttgcagatcgcagtgaattttccttggggaacatcgctgttttgtcctagagtgaacttgtggcttatggccagtgctgtttggtggtctgccttctttttaatggtattttcttcctcagagcagaagggctgcattttgcttatcagaagaaggtgcagatttaagggaattcatatgaggtggcatgtaattggcaggccaggtgtcctggttccaggttccagccaggctttgggttgccccctccatctctgcccccctctggattttgcatacagcctcatacagtgcaaacaaggatgtgacttgctcagcttagtcatgtgatttatttannnnnnnnnnnnnnnnnnnnn

SEQ ID NO: 11470 - DNA, 2125 bp, Homo sapiens
  misc_feature 1, 2, 3, 4, 5, 6, 7, 8, 2125: n = A,T,C or G
nnnnnnnncctcgagcaaagccgctagaggtggggtgcgggtggtcggcctcaggcgagccccggggcacagcccggggcgggaggcggagcttggcggccgagatctccgcgctgcagttagccccgccgagcgccaggagctgcgggtaggaggggcgagagaaaggatgggggtacagaaccggaagaaacgaagggctcgtccgcttcggcttgtcctaatttggtgcccaatctgaagctgggctgtaccattgcatacctgggggaggctgtggcaaaggtgacaagaaggccgaaggcacaaagggaagctgcacccattcctggaggagcttaaatagtgactcgagtgcaagaatttaaaaataccgagacagccctaggtggaaaacttccggaaggcccaagcgttcgtaagggctctctaccccgctcggagcatagatggtaccgtccggaagtccgggcggagaccgtagctgcgcttctcgcgaaagggcaggcatcgcggggctggccacttccgtacttccgctttccggcccagccagcgcccgcgatgactgccactctccgcccctacctgagtgccgtgcgggccacattgcaggctgccctctgcctggagaacttctcctcccaggttgtggaacgacacaacaagccggaagtggaagtcaggagtagcaaagagctcctgttacaacctgtgaccatcagcaggaatgagaaggaaaaggttctgattgagggctccatcaactctgtccgggtcagcattgctgtgaaacaggctgatgagatcgagaagattttgtgccacaagttcatgcgcttcatgatgatgcgagcagagaacttctttatccttcgaaggaagcctgtggaggggtatgatatcagctttctgatcaccaacttccacacagagcagatgtacaaacacaagttggtggactttgtgatccacttcatggaggagattgacaaggagatcagtgagatgaagctgtcagtcaatgcccgtgcccgcattgtggctgaagagttccttaagaatttttaaaccatctggctggatctcgtggccttccccctcagactacccatgtctccacgaaggcgtcctggagtcactccccgagcagcgcggcggcggcagggagttgggttggggtgggcatttgatgcgggaggtgggtggtgtgcttgctagctgggcaagaaagcagcagtggacctgccccaaggccacacgtgcctggtcaggctggcttctgatgttcagtcccctgggccgggacagattttttttaacgtcttgaaacttaaactctgtgcttgtaggatactgtaacctttttgtctttttttttttttttttttaaacctccacctccagtggctgtgactggtcccagtgattatacgttattggttgctgtgggtctgggcgggcctggagccagaaggcgacttattttttctctcctatgccaccccaggtggggagggagggaggtttcagactccagtttctcccttgcccttttattcccaagcctccttggccccagtataagtgttgggaactctctgccagcttcctgagttctgcctaaagatggccccccagcactggttggggacaagggccaaattggtgaccaccagtcatgcctaggacctggggcccaaaagccgggcaacctctggctacaggggccattgggtgccctcccagttgagaggggccgctgtttcgccttgtccgtcagtgccagtgcctgtgccagaggtggcgaggtgagtcctccagagcttcctggccgggccctcctcctgcctgttctggctcctctgctcccacgctagctgtcccttttctgattctggtggatcctccctcccctaattaaagtctctttttgcccctttggggctgcatgaggaaaaaaaaaaaaaaaaaaaaaaaaaaaaaaaagaaaaaataaaaaaagcgctaaaccatcttgggggccgccagagataagtactggctagtgtccgagaaccggcggcaggtgggttcacaaaaaaagcgggaccggttgacaccgaggtcggcaggtaacggcagn

SEQ ID NO: 11471 - DNA, 3315 bp, Homo sapiens
  misc_feature 1, 3311, 3312, 3313, 3314, 3315: n = A,T,C or G
ncgtccggaaggtattgacgggtctcaggatctttaccctctcggtcatatctgatgtcatgacattgtacctgttctttctttcttctcctcctcctcctctccagttgtctggatttctcgaacttttagtcgagtactttagaaaatgcctgattgacatttttggaattcttatggaatatgaagtgggagaccccagccaaaaagcacttgatcacaacgcagcaaggaaggatgacagccagtccttggcagacgattctgggaaagaggaggaagatgctgaatgtattgatgacgacgaggaagacgaggaggatgaggaggaagacagcgagaagacagaaagcgatgaaaagagcagcatcgctctgactgccccggacgccgctgcagacccaaaggagaagcccaagcaagccagtaagttcgacaagctgccaataaagatagtcaaaaagaacaacctgtttgttgttgaccgatctgacaagttggggcgtgtgcaggagttcaatagtggccttctgcactggcagctcggcgggggtgacaccaccgagcacattcagactcactttgagagcaagatggaaattcctcctcgcaggcgcccacctccccccttaagctccgcaggtagaaagaaagagcaagaaggcaaaggcgactctgaagagcagcaagagaaaagcatcatagcaaccatcgatgacgtcctctctgctcggccaggggcattgcctgaagacgcaaaccctgggccccagaccgaaagcagtaagtttccctttggtatccagcaagccaaaagtcaccggaacatcaagctgctggaggacgagcccaggagccgagacgagactcctctgtgtaccatcgcgcactggcaggactcgctggctaagcgatgcatctgtgtgtccaatattgtccgtagcttgtcattcgtgcctggcaatgatgccgaaatgtccaaacatccaggcctggtgctgatcctggggaagctgattcttcttcaccacgagcatccagagagaaagcgagcaccgcagacctatgagaaagaggaggatgaggacaagggggtggcctgcagcaaagatgagtggtggtgggactgcctcgaggtcttgagggataacacgttggtcacgttggccaacatttccgggcagctagacttgtctgcttacacggaaagcatctgcttgccaattttggatggcttgctgcactggatggtgtgcccgtctgcagaggcacaagatccctttccaactgtgggacccaactcggtcctgtcgcctcagagacttgtgctggagaccctctgtaaactcagtatccaggacaataatgtggacctgatcttggccactcctccatttagtcgtcaggagaaattctatgctacattagttaggtacgttggggatcgcaaaaacccagtctgtcgagaaatgtccatggcgcttttatcgaaccttgcccaaggggacgcactagcagcaagggccatagctgtgcagaaaggaagcattggaaacttgataagcttcctagaggatggggtcacgatggcccagtaccagcagagccagcacaacctcatgcacatgcagcccccgcccctggaaccacctagcgtagacatgatgtgcagggcggccaaggctttgctagccatggccagagtggacgaaaaccgctcggaattccttttgcacgagggccggttgctggatatctcgatatcagctgtcctgaactctctggttgcatctgtcatctgtgatgtactgtttcagattgggcagttatgacataagtgagaaggcaagcatgtgtgagtgaagattagagggtcacatataactggctgttttctgttcttgtttatccagcgtaggaagaaggaaaagaaaatctttgctcctctgccccattcactatttaccaattgggaattaaagaaataattaatttgaacagttatgaaattaatatttgctgtctgtgtgtataagtacatcctttggggttttttttttctcttttttttaaccaaagttgctgtctagtgcattcaaaggtcactttttgttcttcacagatctttttaatgttctttcccatgttgtattgcatttttgggggaagcaaattgactttaaagaaaaaagttgtggcaaaagatgctaagatgcgaaaatttcaccacactgagtcaaaaaggtgaaaaattatccatttcctatgcgttttactcctcagagaatgaaaaaaactgcatcccatcacccaaagttctgtgcaatagaaatttctacagatacaggtataggggctcaaggaggtatgtcggtcagtagtcaaaactatgaaatgatactggtttctccacaggaatatggttccattaggctgggagcaaaaacaatgttttttaagattgagaatacatacctgacaacgatccggaaactgctcctcaccactcccgtcatgcctgctgtcggcgtttgaccttccacgtgacagttcttcacaattcctttcatcattttttaaatattttttttactgcctatgggctgtgatgtatatagaagttgtacattaaacataccctcatttttttcttttcttttttttttttttttttagtacaaagttttagttccttttccatgatggtggtaactacgaaaggtgatggtagatttaaataatttttattttaattttatttttttttccattagggccatttctccaaaaaaagaaagaaacattacaaaaaacaaaaaccaaaaaaaacagagggtaatgtacaagtttctgtatgttataagcgtcatgctcgatttcaggagagcccgctgttcacccattggctcctgactcacgggtgtgcacaacggttcctactctgggatcggatttcgacatgggttccccgtcacgtccaaaacgatgacgaatgaacaattttcaacctacaaggcgaagaaacccccatttccagcggattgttccaggtgtgcaaaatccctcccttttgttctttccagataatgtcgtatccaaaaacatgcaggcaacagcatctggaggtgaatctccccctttccctgggtcatacgaaatacatttcacacttaacctctcatgtgtccccttgttgacaaagttcccttaatctctgcacgacgtgaggcgttctgaacgacgatcaccagcggccgacacgttcaacaaggacgcacaattatatgtaccctgcgagcatgtctcatcannnnn

SEQ ID NO: 11472 - DNA, 3815 bp, Homo sapiens
gtccgcgcccgcctcggctcccgcagcgctagtgtgtccgcctagttcagtgtgcgtggagattaggtccaagcgcccgcccagaggcaggcagtccgcgagcccagccgccgctgtcgccgccagtagcagccttcgccagcagcgccgcggcggaaccgggcgcaggggagcgagcccggccgccgccagcccagcccagcgccagcccagccctactccctccccacgccagggcagcagccgttgctcagagagaaggtggaggaagaaatccagaccctagcacgcgcgcaccatcatggaccattatgattctcagcaaaccaacgattacatgcagccagaagaggactgggaccgggacctgctcctggacccggcctgggagaagcagcagagaaagacattcacggcatggtgtaactcccacctccggaaggcggggacacagatcgagaacatcgaagaggacttccgggatggcctgaagctcatgctgctgctggaggtcatctcaggtgaacgcttggccaagccagagcgaggcaagatgagagtgcacaagatctccaacgtcaacaaggccctggatttcatagccagcaaaggcgtcaaactggtgtccatcggagccgaagaaatcgtggatgggaatgtgaagatgaccctgggcatgatctggaccatcatcctgcgctttgccatccaggacatctccgtggaagagacttcagccaaggaagggctgctcctgtggtgtcagagaaagacagccccttacaaaaatgtcaacatccagaacttccacataagctggaaggatggcctcggcttctgtgctttgatccaccgacaccggcccgagctgattgactacgggaagctgcggaaggatgatccactcacaaatctgaatacggcttttgacgtggcagagaagtacctggacatccccaagatgctggatgccgaagacatcgttggaactgcccgaccggatgagaaagccatcatgacttacgtgtctagcttctaccacgccttctctggagcccagaaggcggagacagcagccaatcgcatctgcaaggtgttggccgtcaaccaggagaacgagcagcttatggaagactacgagaagctggccagtgatctgttggagtggatccgccgcacaatcccgtggctggagaaccgggtgcccgagaacaccatgcatgccatgcaacagaagctggaggacttccgggactaccggcgcctgcacaagccgcccaaggtgcaggagaagtgccagctggagatcaacttcaacacgctgcagaccaagctgcggctcagcaaccggcctgccttcatgccctctgagggcaggatggtctcggacatcaacaatgcctggggctgcctggagcaggtggagaagggctatgaggagtggttgctgaatgagatccggaggctggagcgactggaccacctggcagagaagttccggcagaaggcctccatccacgaggcctggactgacggcaaagaggccatgctgcgacagaaggactatgagaccgccaccctctcggagatcaaggccttgctcaagaagcatgaggccttcgagagtgacctggctgcccaccaggaccgtgtggagcagattgccgccatcgcacaggagctcaatgagctggactattatgactcacccagtgtcaacgcccgttgccaaaagatctgtgaccagtgggacaatctgggggccctaactcagaagcgaagggaagctctggagcggaccgagaaactgctggagaccattgaccagctgtacttggagtatgccaagcgggctgcacccttcaacaactggatggagggggccatggaggacctgcaggacaccttcattgtgcacaccattgaggagatccagggactgaccacagcccatgagcagttcaaggccaccctccctgatgccgacaaggagcgcctggccatcctgggcatccacaatgaggtgtccaagattgtccagacctaccacgtcaatatggcgggcaccaacccctacacaaccatcacgcctcaggagatcaatggcaaatgggaccacgtgcggcagctggtgcctcggagggaccaagctctgacggaggagcatgcccgacagcagcacaatgagaggctacgcaagcagtttggagcccaggccaatgtcatcgggccctggatccagaccaagatggaggagatcgggaggatctccattgagatgcatgggaccctggaggaccagctcagccacctgcggcagtatgagaagagcatcgtcaactacaagccaaagattgatcagctggagggcgaccaccagctcatccaggaggcgctcatcttcgacaacaagcacaccaactacaccatggagcacatccgtgtgggctgggagcagctgctcaccaccatcgccaggaccatcaatgaggtagagaaccagatcctgacccgggatgccaagggcatcagccaggagcagatgaatgagttccgggcctccttcaaccactttgaccgggatcactccggcacactgggtcccgaggagttcaaagcctgcctcatcagcttgggttatgatattggcaacgacccccagggagaagcagaatttgcccgcatcatgagcattgtggaccccaaccgcctgggggtagtgacattccaggccttcattgacttcatgtcccgcgagacagccgacacagatacagcagaccaagtcatggcttccttcaagatcctggctggggacaagaactacattaccatggacgagctgcgccgcgagctgccacccgaccaggctgagtactgcatcgcgcggatggccccctacaccggccccgactccgtgccaggtgctctggactacatgtccttctccacggcgctgtacggcgagagtgacctctaatccaccccgcccggccgccctcgtcttgtgcgccgtgccctgccttgcacctccgccgtcgcccatctcctgcctgggttcggtttcagctcccagcctccacccgggtgagctggggcccacgtggcatcgatcctccctgcccgcgaagtgacagtttacaaaattattttctgcaaaaaagaaaaaaaagttacgttaaaaaccaaaaaactacatattttattatagaaaaagtattttttctccaccagacaaatggaaaaaaagaggaaagattaactatttgcaccgaaatgtcttgttttgttgcgacataggaaaataaccaagcacaaagttatattccatcctttttactgatttttttttcttctatctgttccatctgctgtattcatttctccaatctcatgtccattttggtgtgggagtcggggtagggggtactcttgtcaaaaggcacattggtgcatgtgtgtttgctagctcacttgtccatgaaaatattttatgatattaaagaaaatcttttgaaatggctgttttttaaggaagagaatttatgtggcttctcatttttaaatcccctcagaggtgtgactagtctctttatcagcacacacttaaaaaatttttaatattgtctattaaaaataggacaaacttggagagtatggacaactttgatattgcttggcacagatggtattaaaaaaaccacactcctacgaaaaaaaaaaaaaaaaaaaaagggccccccccccgtttaaaaaaatggggccccccggggcgggaaaaatttttttggaggttttttttccccgcccccccc

SEQ ID NO: 11473 - DNA, 3589 bp, Homo sapiens
  misc_feature 594, 2483, 2606, 2796, 2797, 2798, 2816, 2833, 2878, 2903,2906, 2923, 2924, 2951, 2963, 2970: n = A,T,C or G
atatcagtacgctagaaaacatgacaataacagggcaacaatggtaaagaattttcaaagccaataggataaattattcacacctcctgatggagtacccaattaccggttcaagaagaattacggtataatagggtagagtaatatcattagaattgtgtaagagcaaccaatttatctttgccctgcaacaccctctttgaaaaatattaaaggtaaattcataacaatatgtgtcaagggtttcaatttcagcaatgtggcttgtgcaaaaatgtgtaagtggccagaacccctgaatatcctctcctgtcactctttatcagtatctggctctctctctctctctttctcacacacacacacacacacttgaataaatcatacttatagaatactatgtagctattaaaacaaatgtgttaatcatcaagctgacctggatggttgtcagggatacatagttctcctaaaaaaagcaaatttgcagggagtcttgttttattatgaaaaaattttaagtgcagcaacagaaaaaattcaaaatggcatatatgcgaatatatgtttgtaaatacttataagcagacatanatatgtggaagaaaacacatcaggttgttagcatgattccctgagatagggtttttttatttttaattttttttcctgtgactcattggtgtctttatgaaagactaatgtggacatttggaattgataaattttattatcatctagaaaaacatatcatattttgaagaactcttttcatagctgttgaatcttcttgatgacagttttactttatttggtatgcttgatgctacatctacttcacatttttatgacaactttttaataaacatctttgaagcactttcttaatctttctcaattcttgctgggcttgaccagaaagagcactttttctggaagtgtgaaatcagacacttacttaaggaggtgtattttggtgataatttctttttgtcacacaaaagttgtgatggttagagataccatataaatgccttgtctttcaatttaaataaaagtataattagaaccaatgtcattttaacagttttaaacaggcgtattctgtttgttatctatatctatttaaccataaattagatccatatcacttgtgggttttcaaagatttttttttcattcttttcattctttgggcagctaaaatctaggatggtgttaagtttcttcattttgtcaattatatataaaaaattagaaacaacatgaatctgcatttcttggatgagatagttaataacaaactatttctcaatatttggatactaaaaaccagtgaaggtgttatgtgtttcagtatcttatctcttatttgaacatgggtttctgaaaggagcctatataataatataaatggtatgtagtaaatgaggcactgtcttggctgggactgctataaaaaaattaccatagaccattgactaaaccacaaacatatacttctcacagttctggaagttggcaaagccaagatgaggatggcccagtatggcctagcttctagtgagggtcctcttggcaggttgcagcacagccgggcttcttggctcctcacatggcaggaagaaggtgcgcaaggctctctggccctcttcttacaagggcattaattaccttctgaaggctccaccttccaaacaccatcacattgctgacttccattaacttccttgtcattttttaatgtttttctcttcttatgtttttctactgttgggcaaggtgggaaatgtgtattctgacatatagactttgtaaacttcttcaaagcttgggcaagaacaccaagcatgtcaaagttcttgtttcttcccatctctgacctctcatcttctcttgatgttttgcataaccttctgggatatccctgtctcttctacttcactccattttcctgcaggatgtttataaatagttcctggcaaaggaggttgccgtatagggtcctacaagtaacctaggtggcagcatctcctcccagcgtcaggtctaagcacacaagttcttccttccatctacaaacgcaggaaaccacgactggagaagttatatgattggctaaaccatgaatgacgcaacataacccacgcccactgagaatcgtcctttcccagactggctcagattccgctttccgattggtccctacagcaagagggcaaggacaattgcttaagttgacctctgggtccggaatcgcgggcaaagatggcggcggccaggtgttggaggcctttgctacgcggtccgaggctttcattgcacaccgcggctaatgccgccgctatggctacagaaacgacctgccaagacgtggcggcgggccccgtcgcgcggtacccgccgattgtggcctccatgacagccgacagcaaagctgcacgtgcggtcggatcgagccgctggcagagcgaacggtgccnacgctgcggagtacggtagaacgaagaagtctcgcgaattcctcacacaagaatgcccagtttatgagagtaccataggtttacacctgcagaaccttcgtcgctgatatggtccgaccgccntggtaccatgtacgttcacacatagaaaccgatgttcctgtcgaggtcatgcccgcgcgcccccagcggtagcccagagccccggaagcccagaaaccccgaaaacactgagacctggcgcatggaacctttcgcggctgcttgcagtgccggatcgcctttgcgactggcctagctgcagggagcactnnntctacccgcgagcgcaantgcggcggcgtgccacnccgttacgaaggaagaggtcgaaggtcataatcttttgccccttntcctgggatcacgcttggatgtcanacncccttcgtggggacctnncttaagtgccaacaaacaacccctgcnccttggcccgantgggcgncgcttcgattatagatgcccagttcatttttactgggtgcgtggtgaagaaattattcctcgtggtcatcgaagaggtcgaattgatgacttgcgataccagatagatgataaaccaaacaaccagattcgaatatccaagcaactcgcagagtttgtgccattggattattctgttcctatagaaatccccactataaaatgtaaaccagacaaacttccattattcaaacggcagtatgaaaaccacatatttgttggctcaaaaactgcagatccttgctgttacggtcacacccagtttcatctgttacctgacaaattaagaagggaaaggcttttgagacaaaactgtgctgatcagatagaagttgcttttagagctaatgctattgcaagcctttttgcttggactggagcacaagctatgtatcaaggattctggagtgaagcagatgttactcgaccttttgtctcccaggctgtgatcacagatggaaaatacttttcctttttctgctaccagctaaatactttggcactgactacacaagctgatcaaaataaccctcgtaaaaatatatgttggggtacctcggccgcgaccacgctaagccgaa

SEQ ID NO: 11474 - DNA, 2300 bp, Homo sapiens
  misc_feature 1, 2300: n = A,T,C or G
ncgtccgaacaacagccgttaggaaggcggtgccgggggggcggggtctggctagaaggaggcgcgcgattgaacagccgctggggttcgaaccagcaagacaagcgggcattggccacagcagcgcgaggcgggcacggggtattgtccggctccggcggcggcggtcggtgctgcgagagcggcggcggcggcgcgggtcggcagcgggagggcgcgcggccgagcggaggcggagtcggcgccgagaacatggctggaggcaaagctggaaaggacagtgggaaggccaaggctaaggcagtatctcgctcacagagagctgggctacagtttcctgtgggccgcatccacagacacttgaagactcgcaccacaagccatggaagggtgggtgccactgctgccgtgtacagtgctgcgattctggagtacctcactgcagaggtgctggagctggcaggtaatgcttctaaggatctcaaagtaaagcgtatcactccgcgtcacttgcagcttgcaatccgtggtgatgaagagttggattctcttatcaaggctaccatagctgggggtggtgtgatccctcacatccacaaatctctgattggaaagaagggacagcagaaaactgcttagagggatgctttaaccaaccctcttcctccccgtcattgtactgtaactgggacagaagaaataatggggatatgtggaatttttaacaacagttaaatggaaaagcatagacaattactgtagacatgataaaagaaacatttgtatgttcttagactcgaagtttgataaaagtaccttttcatgtggtgacagttgtgtgttgattggctaggtttctcccgtgtgttttatacaaaaatggaattgataaaccattttttacaaaattaattcgtctcaaaactgttctgttcatgatgtattagaaatattttactcagactttaaatattttaaatctcagattggctattcagagtaaccttagaacagaaatcgggaatatatctttacaatgactggggtcacccacaacacctccccacaaacaaacatcattcggccccagccccacgaagaagactaagaccactcgatgcgccgcggcccaagtataggacacggccagcgtgccacaacctgcaaacagggcggctcacaaagcgccggaacgcgttcaacacaggtagacatgacaagcacaatacacgcgcgaggcgaccacacagacggacgcacgacaacacacacgaaccaacacagcatagacacacacacacaagacgagcagagacaaggagccagaggagcacagaggacccacgcgcgggagggccagaagaggagcggagcacggactccggccacggacaccagcgaccacagacggacagcagcggcacggacgacgcccggagcaagcactaacggaggcaggaacacgacaacgcgagccggggcaagtagaggggaggggcggagcagagcagagaaggggaggcagcgaaggagcagtcgagaagcgcacgaccgagcacgcgacgaggcgtacgcggcagagccgacgcagagacagtaggacagagagggagcagaggagacacaggaaagcaaacgacgacaacagaagagaagcagcacaagcacacggacgcagcgaaccaacaaacgcagacacgacgccacacgacgcacaaaggagacacggagacagaagacacgacgaccagccgcaagacagaacgagcagacgagcgaagacaagagtagctgaacatccagcacacgcaggacaagagaggaggagcaacagcaacgcaggggagacgatagggaggaagcacaacgaagagcacaaggggagcgcgaagcgaagaggacagccgaagaccgggcgacgcacgaacggacaagagcacacagacgaagagcacaactagaacgcacagaggccagcacggcgacgagccagagcgagcaagccagaaaggcagcagaaagaaaacacagcggagagcaggacgtgcacgagagcgacagaggaacggaagaaacagcacgacacggagcgacagaggaggagcagcagaagaagaacagagaggagcgcgagcagccacaggcagcagcagcaaagcagcaaggtaggagcagaagcgagcaccagaccagggagaggtagagcgcaagtgaacgagccagagacgcggcagagccaatcagaggaggagaccgcgagcaagagtcgcagcgagcgacagcgagcgacaaggcagacn

SEQ ID NO: 11475 - DNA, 2653 bp, Homo sapiens
  misc_feature 1, 2, 3, 4, 5, 6, 7, 8, 9, 10, 11, 2651, 2652, 2653: n = A,T,C or G
nnnnnnnnnnncagaatcttttttttacttggcctgctacctccattaaaaaaccattctcttacagtttaaaaaaaaaaaaaaaaaaaaagccttcccctacccaacctccgcccattgttctcttccaaagggcaatttagtaggatctactttgtacatctcaagtaagagttaagtccctgatacagggaccagtttcttagtgtaagacatacacatcctgcttgtccagctgttcctccaaaatctactttggcttcagctccgggtcctgtaccagatggaaaatgtttttggtgatctggctgctgcttaaagccagttttccctaagaactccaaaggctaaagtctactaggggcagagtgtgaggatagatttctaatcagagaaaagtggcctccaggagctttcatttatgtcttctccagaccaggttttcctgttatcttcctttaatcccctttcaaccaacaggtgaagttcttccagcccacagaggtagtaatatcatcttttctatctcctcctctcctttggccatgtaatgaagcaaaatattatttatttagcccaggcttgagagccactgtttgtggacagtcttcatctagattccataccctggcctaggcgaggtaaggctctctggttattgccaggatggagcccctctaccccagtctgctgtagggaataccctaattagttgaggcatgcttttggaatcctggcatgttggcatatggctggtctatcctttttaagatctctggttgggggtatctggatatggattaggagggacaaggagcctttttcttggctaatgttttccaatacttttttgaatggtgccagcccctccaggcatcccacccccaaatcatcatctttagtactaacagggtgtctggtcttagaagcctcccttcagatcccagctgaccctggtgactgcctggccttgatgttggctgcagccttctgatagaaccacatggattccacccacagctggccaggcttgttacatgggtcagggaatacaaatggcccccccccagggagcaggtgttggcctcagttttcagggacccttggtgttgctccttacctagagcccattaatctaccccatcaactctctgccatgaaagccatcttccaggagccctgttttttggagctgaactgcacagattatagctgctattgtacttaaataagggagaggaaaagaaggttctcaggcacagactttctatttttctcaagccaaaccagtttaaaatgtctagcagaatgaactgtatttccatttcttcatgtctacctgccttccccccacaccctaaagttgtacttgtttctagcaaactagaaggaaaagataggaaagcctggcactactaacctcacctctcatacacctctttgaaggccccagctcttttgttcaggcctctcttctcccctagactcactcagcttggtatccatcatcttgagcattcttcagtagattcatctagggttcagattccagactctcagctgaagacagggagccaatttcccccaggtccctgcaggtaatccagggaccccatagggagaacaggctgactggggcattaggaatgtttgtacctctctgcttccctggcagcctggggaagggtgcagggctcagtgcgctaaaccatggtaaacatcttcaatagaactaccctagaatttagtgagtgtgagactgagatattgctcagaataaatttattccatagccatttaggattgcatgttctggaccaaccttgtccagtatgttttctgtttgagctttttcattcttttgttaagccaacaagttgagaatttggccctgctgggatccatgtagtgggcactagctgctctttggccaaggccttcataaatgattcagtctctcattatctgtcctctagccccacaccctgatttagaccgtggcaaaggaagaacttgaggtcaagaccaaccaaatctgtgaattaaagctgttatttttttctctgcaagggcgctttgcttcaggtctgggctatgtgcagaacctaagcaggctgtgagagttagaagaggcagtattacatgttaggcccagaacaccatgggaaaaggtttatgtagtgtatcttagtggcctgcctagctgcctctgggccaggctgacttctgatgtccacattagctcgtacctgaaccctgttgctgaatgccagccctgttctcctgtaactattatatacgccatggcctggggggcattgaaggaagtaagctctcagagatcctaacactgggtgagaaccctctggacgtcaagagcatgtcttctacacgacgtcccacatcggggcagggcgcggggggacaatgccgtgaaaatccccgacactggggcaggccaagcggattgaaacaacaggcacggaactgacgaacaagcgtgggacaaatcataacgccagtcgtcaatacaaatacacaacaccgccgcggcgcgaacgcacgaaacaccccacacagaggaagccgcacgcaaactgtaaccaagcagcgaggacagagacagacacaacgactgcaaggaacagaannn

SEQ ID NO: 11476 - DNA, 2664 bp, Homo sapiens
actcctaggggcttgcagacctagtgggagagaaagaacatcgcagcagccaggcagaaccaggacaggtgaggtgcaggctggctttcctctcgcagcgcggtgtggagtcctgtcctgcctcagggcttttcggagcctggatcctcaaggaacaagtagacctggccgcggggagtggggagggaaggggtgtctattgggcaacagggcggcaaagccctgaataaaggggcgcagggcaggcgcaagtgcagagccttcgtttgccaattcgcctccagaccgcagacatgaaacttgtcttcctcgtcctgctgttcctcggggccctcggactgtgtctggctggccgtaggagaaggagtgttcagtggtgcgccgtatcccaacccgaggccacaaaatgcttccaatggcaaaggaatatgagaaaagtgcgtggccctcctgtcagctgcataaagagagactcccccatccagtgtatccaggccattgcggaaaacagggccgatgctgtgacccttgatggtggtttcatatacgaggcaggcctggccccctacaaactgcgacctgtagcggcggaagtctacgggaccgaaagacagccacgaactcactattatgccgtggctgtggtgaagaagggcggcagctttcagctgaacgaactgcaaggtctgaagtcctgccacacaggccttcgcaggaccgctggatggaatgtccctatagggacacttcgtcccattcttgaattggacgggtccaccgtgagcccattgaggcagctggtggcccaggttcttctacagccagctgtgttcccggtgcagataaagggacagttccccaacctgtgtcgcctgtgttgcgggggacaggggaaaacaaatgtgccttctcctcccaggaaccgtacttcaggctaactctggtgccttcaagtgtctgagagacggggcttggagacgtggcttttatcagagagagcacagtgtttgaggacctgtcagacgaggctgaaagggacgagtatgagttactctgcccagacaacactcggaagccagtggacaagttcaaagactgccatctggcccgggtcccttctcatgccgttgtggcacgaagtgtgaatggcaaggaggatgccatctggaatcttctccgccaggcacaggaaaagtttggaaaggacaagtcaccgaaattccagctctttggctcccctagtgggcagaaagatctgctgttcaaggactctgccattgggttttcgagggtgcccccgaggatagattctgggctgtaccttggctccggctacttcactgccatccagaacttgaggaaaagtgaggaggaagtggctgcccggcgtgcgcgggtcgtgtggtgtgcggtgggcgagcaggagctgcgcaagtgtaaccagtggagtggcttgagcgaaggcagcgtgacctgctcctcggcctccaccacagaggactgcatcgccctggtgctgaaaggagaagctgatgccatgagtttggatggaggatatgtgtacactgcaggcaaatgtggtttggtgcctgtcctggcagagaactacaaatcccaacaaagcagtgaccctgatcctaactgtgtggatagacctgtggaaggatatcttgctgtggcggtggttaggagatcagacactagccttacctggaactctgtgaaaggcaagaagtcctgccacaccgccgtggacaggactgcaggctggaatatccccatgggcctgctcttcaaccagacgggctcctgcaaatttgatgaatatttcagtcaaagctgtgcccctgggtctgacccgagatctaatctctgtgctctgtgtattggcgacgagcagggtgagaataagtgcgtgcccaacagcaacgagagatactacggctacactggggctttccggtgcctggctgagaatgctggagacgttgcatttgtgaaagatgtcactgtcttgcagaacactgatggaaataacaatgaggcatgggctaaggatttgaagctggcagactttgcgctgctgtgcctcgatggcaaacggaagcctgtgactgaggctagaagctgccatcttgccatggccccgaatcatgccgtggtgtctcggatggataaggtggaacgcctgaaacaggtgttgctccaccaacaggctaaatttgggagaaatggatctgactgcccggacaagttttgcttattccagtctgaaaccaaaaaccttctgttcaatgacaacactgagtgtctggccagactccatggcaaaacaacatatgaaaaatatttgggaccacagtatgtcgcaggcattactaatctgaaaaagtgctcaacctcccccctcctggaagcctgtgaattcctcaggaagtaaaaccgaagaagatggcccagctccccaagaaagcctcagccattcactgcccccagctcttctccccaggtgtgttggggccttggcctcccctgctgaaggtggggattgcccatccatctgcttacaattccctgctgtcgtcttagcaagaagtaaaatgagaaattttgttgatattctctccttaaaaaaaaaaaaaaaaaaaaaaaaaaaaaaaaagt

SEQ ID NO: 11477 - DNA, 416 bp, Homo sapiens
  misc_feature 1, 35, 42, 405, 406, 407, 408, 409, 410, 411, 412, 413, 414,415, 416: n = A,T,C or G
nacatggggtgtgtatgtataataagtgtatgtgnttttccngctatattttatttgaggcagctgttttaataccttcagctttaaagttatagctaagtgtgtatttgtttgatagaaggctcgagaacctcttttactgccaagtacacgtaaagcttggctaagcagacgcatcaggagcaaaccatttgtgttcaccaatctgtctcggcaagtcccagggccactatcttgctagaagccactgtgtgcttttgaaagcatgaaattagttttatactgagcacatggtttctcgtttagcagctctttttatggtaatggtcaatttatggttcactgccaggatttcggtgtactgtcaaagccgatagcttctgctaaggcgtctctatgaagaannnnnnnnnnnn

SEQ ID NO: 11478 - DNA, 828 bp, Homo sapiens
  misc_feature 1, 2, 827, 828: n = A,T,C or G
nnatgtgcccttttttacgtatcagggacccgtgagaaagtgtttccgcgcgggtagactttttgtgcgcaatagatttttgggcttgtccccttgacttgcaagagggttttgccacccggcccgtcgcgtcacatcaacctggtcaagcacgaaccgggtttttactttccagcactaattttcttggttcaggcaccatctcattccctggctcacactgtccaaagcaaatgataggattttagcactgccaatcctgtcagattcaataatcacagaatcagttaatagtttcagatatcattagaacacttggagattatctgccttaaaagcaaatgttattgattagaataagattgtcctgtaagaaaagaatttatgtagtttctacacattggaaaatcttttcatttgatctacgtaatagttatctatttctgcatattacaaattacgcctataatttattagcttgaaataaatatgtcagtaattctgggcattggttttgcagggtgactttggaccagggcctctcagaagattgcaatcaaggtgctagccagagtgacagtcattgcatggcttgacttccatgctcactcacgtggcatttagaaggaagacttctgtcttcaatggaagctcacagcatggcagctgacttccttcacagcaaccaagaaaaagagaaagagagtacagctgccataccgcaaactgtcctaatggagaagcccataggataaagacctaatatccgtggtcagcagccagtgaagccacaggaggactcttttaagcttaatccttagttaaann

SEQ ID NO: 11479 - DNA, 3552 bp, Homo sapiens
  misc_feature 3552: n = A,T,C or G
cgcgtccgcccacgccgacccacgcgtccggcagctctgggggagctcggagctcccgatcacggcttcttgggggtagctacggctgggtgtgtagaacggggccggggctggggctgggtcccctagtggagacccaagtgcgagaggcaagaactctgcagcttcctgccttctgggtcagttccttattcaagtctgcagccggctcccagggagatctcggtggaacttcagaaacgctgggcagtctgcctttcaaccatgcccctgtccctgggagccgagatgtgggggcctgaggcctggctgctgctgctgctactgctggcatcatttacaggccggtgccccgcgggtgagctggagacctcagacgtggtaactgtggtgctgggccaggacgcaaaactgccctgcttctaccgaggggactccggcgagcaagtggggcaagtggcatgggctcgggtggacgcgggcgaaggcgcccaggaactagcgctactgcactccaaatacgggcttcatgtgagcccggcttacgagggccgcgtggagcagccgccgcccccacgcaaccccctggacggctcagtgctcctgcgcaacgcagtgcaggcggatgagggcgagtacgagtgccgggtcagcaccttccccgccggcagcttccaggcgcggctgcggctccgagtgctggtgcctcccctgccctcactgaatcctggtccagcactagaagagggccagggcctgaccctggcagcctcctgcacagctgagggcagcccagcccccagcgtgacctgggacacggaggtcaaaggcacaacgtccagccgttccttcaagcactcccgctctgctgccgtcacctcagagttccacttggtgcctagccgcagcatgaatgggcagccactgacttgtgtggtgtcccatcctggcctgctccaggaccaaaggatcacccacatcctccacgtgtccttccttgctgaggcctctgtgaggggccttgaagaccaaaatctgtggcacattggcagagaaggagctatgctcaagtgcctgagtgaagggcagccccctccctcatacaactggacacggctggatgggcctctgcccagtggggtacgagtggatggggacactttgggctttcccccactgaccactgagcacagcggcatctacgtctgccatgtcagcaatgagttctcctcaagggattctcaggtcactgtggatgttcttgacccccaggaagactctgggaagcaggtggacctagtgtcagcctcggtggtggtggtgggtgtgatcgccgcactcttgttctgccttctggtggtggtggtggtgctcatgtcccgataccatcggcgcaaggcccagcagatgacccagaaatatgaggaggagctgaccctgaccagggagaactccatccggaggctgcattcccatcacacggaccccaggagccagccggaggagagtgtagggctgagagccgagggccaccctgatagtctcaaggacaacagtagctgctctgtgatgagtgaagagcccgagggccgcagttactccacgctgaccacggtgagggagatagaaacacagactgaactgctgtctccaggctctgggcgggccgaggaggaggaagatcaggatgaaggcatcaaacaggccatgaaccattttgttcaggagaatgggaccctacgggccaagcccacgggcaatggcatctacatcaatgggcggggacacctggtctgacccaggcctgcctcccttccctaggcctggctccttctgttgacatgggagattttagctcatcttgggggcctccttaaacacccccatttcttgcggaagatgctccccatcccactgactgcttgacctttacctccaacccttctgttcatcgggagggctccaccaattgagtctctcccaccatgcatgcaggtcactgtgtgtgtgcatgtgtgcctgtgtgagtgttgactgactgtgtgtgtgtggaggggtgactgtccgtggaggggtgactgtgtccgtggtgtgtattatgctgtcatatcagagtcaagtgaactgtggtgtatgtgccacgggatttgagtggttgcgtgggcaacactgtcagggtttggcgtgtgtgtcatgtggctgtgtgtgacctctgcctgaaaaagcaggtattttctcagaccccagagcagtattaatgatgcagaggttggaggagagaggtggagactgtggctcagacccaggtgtgcgggcatagctggagctggaatctgcctccggtgtgagggaacctgtctcctaccacttcggagccatgggggcaagtgtgaagcagccagtccctgggtcagccagaggcttgaactgttacagaagccctctgccctctggtggcctctgggcctgctgcatgtacatattttctgtaaatatacatgcgccgggagcttcttgcaggaatactgctccgaatcacttttaatttttttcttttttttttcttgccctttccattagttgtattttttatttatttttatttttatttttttttagagatggagtctcactatgttgctcaggctggccttgaactcctgggctcaagcaatcctcctgcctcagcctccctagtagctgggactttaagtgtacaccactgtgcctgctttgaatcctttacgaagagaaaaaaaaaattaaagaaagcctttagatttatccaatgtttactactgggattgcttaaagtgaggcccctccaacaccagggggttaattcctgtgattgtgaaaggggctacttccaaggcatcttcatgcaggcagccccttgggagggcacctgagagctggtagagtctgaaattagggatgtgagcctcgtggttactgagtaaggtaaaattgcatccaccattgtttgtgataccttagggaattgcttggacctggtgacaagggctcctgttcaatagtggtgttggggagagagagagcagtgattatagaccgagagagtaggagttgaggtgaggtgaaggaggtgctgggggtgagaatgtcgcctttccccctgggttttggatcactaattcaaggctcttctggatgtttctctgggttggggctggagttcaatgaggtttatttttagctggcccacccagatacactcagccagaatacctagatttagtacccaaactcttcttagtctgaaatctgctggatttctggcctaagggagaggctcccatccttcgttccccagccagcctaggacttcgaatgtggagcctgaagatctaagatcctaacatgtacattttatgtaaatatgtgcatatttgtacataaaatgatattctgtttttaaataaacagacaaaacttgaaaaaaaaaaaaaaaaaaaaaaaaaaaaaaaaaaaaaaaaaaaaaaaaaaaaaaaaaaaaaaaaaaaaaaaaaaaaaaaagggcgggccgcn

SEQ ID NO: 11480 - DNA, 4591 bp, Homo sapiens
  misc_feature 1, 2, 4588, 4589, 4590, 4591: n = A,T,C or G
nncgtccgggttcaatgacgtgggtggggggatctatggggatagagacaaaacaggagccactgtgcagtattttgaggtctttttcaacctattgtatttaatctgttattccttataacactgacaatcggtatgattgatccggattttgcagataagcctaaattaccagaaaactacacagatgaaacctggcaaaaactgaaagaagcagtggaagctattcagaatagtacttcaattaagtacaatttagaagaactctaccaggctgtagaaaatctctgttcttacaagatttctgcaaacttgtacaaacagctgagacagatctgcgaagatcacatcaaagcacagattcatcaattcagagaggattcattggatagcgttctttttttaaagaagattgatagatgctggcaaaaccattgcagacaaatgatcatgatcaggagcatttttttgtttctggatagaacttacgttcttcagaattcaatgctaccctccatttgggacatgggactggagttatttagggctcatattataagtgatcagaaagtgcagaataagacaattgatggcattcttctcttgattgagagggaaaggaatggtgaagcaattgatagaagtttacttcgaagccttttaagcatgctgtctgatttgcaaatttatcaagattcttttgaacaacgatttttggaagaaactaaccggctctatgcagctgaaggccaaaaattaatgcaagaaagagaggttcctgaatatctacatcatgttaacaaacgtctagaagaagaagcagacagacttattacttacttagatcagaccacccagaagtcattaattgctactgtagaaaaacaacttctaggtgaacacttaacagcaattcttcagaaaggtttaaataacctccttgatgaaaaccgaattcaagatttgtctcttctgtatcagctcttcagtagagttcgaggtggagttcaggttcttttgcagcagtggatcgaatatatcaaggcatttggcagcactattgtaattaatcctgaaaaagataaaaccatggttcaagaattgctggattttaaagataaggttgaccatataattgatatctgctttctgaagaatgagaaatttatcaatgccatgaaagaagcatttgaaacgttcattaacaaaagaccaaataaaccagctgaacttatagctaagtatgtagattcaaaacttcgtgcaggcaacaaagaagctacagatgaagaacttgagaaaatgttggataaaattatgatcatatttagatttatctatggcaaggatgtttttgaggccttctataagaaagatttagccaagcgcctgttagtcggaaagagtgcatctgtagatgctgaaaaatcaatgctgtccaaacttaaacatgaatgcggagctgctttcaccagcaaacttgaaggaatgtttaaagacatggaactttctaaagacatcatgattcagttcaaacagtatatgcagaatcagaatgttccgggaaatattgagttaactgtgaatatcctgacaatgggctattggccgacatatgtgcctatggaagttcatttaccaccagagatggtaaaacttcaggagattttcaagacattttacctaggcaaacatagtggcaggaaacttcagtggcagtcaaccctaggacactgtgtgttaaaagcagaatttaaagagggtaaaaaggaactccaggtctctctttttcaaacactggtgctgctaatgtttaatgagggagaggagttcagtttagaagagatcaagcaggcaactggaatagaggatggagagttaaggagaacactgcagtcattagcctgtggcaaagctagagttctggcgaaaaatccaaagggcaaagacattgaagatggtgacaagttcatttgtaatgatgatttcaaacataaacttttcaggataaagatcaatcaaatccagatgaaagaaacggttgaagaacaagcaagcactacagaaagagtatttcaagacagacagtatcaaattgatgctgcaattgttcgaattatgaagatgagaaagacacttagccacaatctccttgtttcagaagtgtacaaccagttgaaatttccagtaaagcctgctgatcttaagaagagaatagaatctttaattgaccgggactacatggaaagagataaagaaaatccaaaccagtacaactatattgcatagaatgttggccttgcagcatttggtgtcatatgcagtagccagtggataaactaacctgttgattcaatattatttgactccttttttactaccgatgaccaaatgaagcagtgtaattaatggaaatagttgagtggactttttctcagtggttaacatgcccattttaaagagtaatacttacctttaagaagaatgttgttgaactctttgcatgttatttagtatgatgtgcagaaaacacttaagaacgtacctggtcttcatgaattcctctttggaactgggaaagagatccctgtggctattaaaaaggggggagggttcttacacaccattaattatgaagcaaaaggtttatttgcttaaaatgtcatttaaagatacttaaactgcatgcaaactttatttactgtacagagttctggatgtatttatcaaatagaaaaaccacccttgacttggttgttcacccgttttgtgatttcccttgaaaagagaaatgaattgtcatagctattgatattttactaggtgatgttctgttacactgaaagggatgttttttaaaaaaaattatttggaaacaagttttcaagtagggggacagttgcttacataatatcttgtatattcacatcctaaaaattttcatttatgagtatgggatgtgtgtatatggcttagccccaagttaactgtgctgattaacaagtacttataaaaatagctaaagtagaaaattaatgatcagttgtactagaggaacatcatagaagagaaaaatccaactctttatattaaaaatgaatacaataagaaaattgcaaaagagaccaaaatgaacgtgttttgtaaattgttacaggagcaaaaactttgcaactagttttcaacatactttagactttaaatgttgtttggacagttttgtcttcaacttggaccaattgtagattgttacaggcttcctaggatttagcattcctattttctctaccaaagttttttttagaagcatcccaactcttctctttgttgataaataagcctttcctgtcatcttcattttaacttgctaaaaccctagatacaaaggtcctccctcatttttcccacagagcccctgtttgggaatttgagattctgtgtcatgctggttttcctttcagaattgcttgaaatcgagttctcttagccactggacacctagttttcaggagaatgtcccaagattgtttatatatacaaaatggcaaaagtactgtttttcgaattgataattcaagcaaaggcttctctttactgtcactgatttttttttgtttttattttgtttccttgtttctatttccttgaagctttgaagggaggagaagcagaaaattttgtttatgtttgttaaaaatcagaactacttaatgctttttgccacagcatatttccttgcctgttggagccgttaggaagattacctatgtcctaatcttcaacctgagaagatttttgactcttgtgtctactgttgattgtttgcttgagttctcaaagacctgtggccaggtattttaaaaagtcgtctatttctttctagttgcatcaacttgcacactggtgtctaactatatgtggtattcggaacttgtaattcttattgagcagccattgcctatattttctcagctcctcactgatttctttatatgagctcagctgacaagcaaatgcagctattttgtttaccctctcttcataccggaccatcaacaacagtgttctaactcatccctgatggtctgtgagatgtagactattacacaagattcaagttactcgtaagcaacttttagatagagttggtcctgttaggaggagactcttgatgtcaccttcagtatcttgaaagcgggtcccctccccgaggctcttaattctttgaaaacttgatgctgtttcagctgaaaaattagcaagactgttaaaaaaaaaaagttgaggggagctgtttaagaaactgaaaagtaattgcaaactacattggataattgtgactttcagttgttgttctgtatcagttgaatttttgtgctcttttccctgtgtacgtggtggttctatttttctccaataaaacttttattttaacaacaaaaaacacactatagcacatgaaacccaaaaacacataaacaggacagaacagaacagagacaacacacaaatacaaaacacagcacagcgcgacgtaatagatgacaaacagacaaacgtgaatacacaaaaccgccaagcaaccacnnnn

SEQ ID NO: 11481 - DNA, 2133 bp, Homo sapiens
  misc_feature 2133: n = A,T,C or G
gcggggagacacatgggtgggaaattgcaataaaaagacggcccacgggcaggctgcgcgggcatggctggccagaggaggaacgctttgtgttctcatcggagctgcatgggaagtctgcatacagcaaagtgacctgcatgcctcaccttatggaaaggatggtgggctctggcctcctgtggctggccttggtctcctgcattctgacccaggcatctgcagtgcagcgagacccatccactgtggaggacaagtgtgagaaggcctgccgccccgaggaggagtgccttgccctcaacagcacctggggctgtttctgcagacaggacctcaatagttctgatgtccacagtttgcagcctcagctagactgtgggcccagggagatcaaggtgaaggtcgacaaatgtttgctgggaggcctgggtttgggggaggaggtcattgcctacctgcgagacccaaactgcagcagcatcttgcagacagaggagaggaactgggtatctgtgaccagccccgtccaggctagtgcctgcaggaacattctggagagaaatcaaacccatgccatctacaaaaacaccctctccttggtcaatgatttcatcatcagagacaccatcctcaacatcaacttccaatgtgcctacccactggacatgaaagtcagcctccaagctgccttgcagcccattgtaagttccctgaacgtcagtgtggacgggaatggagagttcattgtcaggatggccctcttccaagaccagaactacacgaatccttacgaaggggatgcagttgaactgtctgttgagtccgtgctgtatgtgggtgccatcttggaacaaggggacacctcccggtttaacctggtgttgaggaactgctacgccacccccactgaagacaaggctgaccttgtgaagtatttcatcatcagaaacagctgctcaaatcagcgtgattccaccatccacgtggaggagaatgggcagtcctcggaaagccggttctcagttcagatgttcatgtttgctggacattatgacctagttttcctgcattgtgagattcatctctgtgattctcttaatgaacagtgccagccttcttgctcaagaagtcaagtccgcagtgaagtaccggccatcgacctagcccgggttctagatttggggcccatcactcggagaggtgcacagtctcccggtgtcatgaatggaacccctagcactgcagggttcctggtggcctggcctatggtcctcctgactgtcctcctggcttggctgttctgagagctccgctgagcatctggccttgaagtttgtgttcttccctctggcaatggctcccttcagcacttctgctttccactccaattcacacaggcttggtattaacagaatcaaggccaggctaggttaggaaaagggaagagctttcaccttctttaaaactctcggcatgagccactctacagactttgataatcacatgtagcgtctgcatctgaaattgtttttacatctgtcccacctgcacccttcaccccaggctgttagtttcttgaggacaaggacttcatcattttcaaacattattggtcaaataaatgaagaaataggctgcatcctttctctttatcctttgacctcctctatcatcctgctgttatcttccagaaggagaagaaacagcttcacaggaaaagtagaggagattttcccattttggtgaaagtgccaaatcagaatgtgaaataggaattctgggctctgtaccaggcatttactcctatgctgttagctgatgttaaagagggtggatttcttttcccttaggtctcaccttctgtgccttcaggggaagttggttggaagtttgaatggtttgttgttgtcgtcattgttttgtattaaggagggctgtaatggaacgaatacaatggttattgagggagagtaagttgagagaagctcaagggtgtattatttaagggcaggagggggagaaaaaaagtaaatctataaagagcttgggacaccaagtccagaacttcatgcatataacagccaattaacaatcaaattttagaaagtctcagagagggacttgcaaacacan

SEQ ID NO: 11482 - DNA, 298 bp, Homo sapiens
  misc_feature 1, 2: n = A,T,C or G
nncactgtcataaatggagggtgaatagctcacttgacataatcatggtcatcctgggccctgcccttgacttctctgagcctcagtttccttatgtgaaagttgctggaaccaaaatggagtcacttatgccaaactctaataaaatggagtcggggggccacatagaagccctcacacacacatgcccgtaacaggatttaccacaagacacgcctgcatgtagaccagacacagggcgtatggaaagcacgtcctcaagactgtagtattccagatgagctgcagatgcttacct

SEQ ID NO: 11483 - DNA, 466 bp, Homo sapiens
  misc_feature 1, 2, 3, 4, 5, 6, 7, 8, 9, 10, 11, 12, 13, 14, 15, 16, 118,125: n = A,T,C or G
nnnnnnnnnnnnnnnnatgcttgatattcgaattcctgcagctccggggagatccactagtttctagagcggccgattacgcggggcatttaactataagtatactgcctgcctatgngacgacnatccaaaaaccttctactgggacttttacaccaacagaactgtgcaaattgcagccgttgttgatgttattcgggaattaggcatctgccctgatgatgctgctgtaatccccatcaaaaacaaccggttttatactattgaaatcctaaaggtagaataatggaagccctgtctgtttgccacacccaggtgatttcctctaaagaaacttggctggaatttctgctgtggtctataaaataaacttcttaacatgcttctccaaaaaaaaaaaaaaaaaaaaaaaaaaaaaaaaaaaaaaaaaaaaaaaaaaaaaaaaaaaaaaaaaaaaaaaaaggct

SEQ ID NO: 11484 - DNA, 3001 bp, Homo sapiens
cgcgtccgggaagatacagattcagagaattcctcctcagagaagaaattaaaaacatgataaatacaaagggaaaacaaaaagctacaaaagtagccttacaaaaaaaaaaaaaaattgtttagtgaatacagaggaaaggaaaaacaagtattaaaggcacatgaaaccagggcctgaaattttgtgtctgatgctgctcccttctatccaacattcaacaacgggtctgaatgtctagctggccattggcttgtgctgtgttaagaaaggggaaaaaaaaataacccaagtgactcctttctagtgagacgtgagcgtagtgtgccgcgcaaggctctgtggaagtaaatctttgttgagacgttcgacttgttcttgtgtacgcacaatggcacgtgtgcgcttattgtctcataagaccttccttttagttctccatcagaaaggacctatgaatttgtactttttgccatctcaccctgtttacatgccataggtgttctggtctggatgatgggtgcctgttaaatcaggttgtgctgccagtgagttgtagatttatgctggaagaatggagaatggaaacaggccttcagcccattggctgcgctggagaggaaagcatggttcctttcttaaagaaatcttccatgttttctctaagtaacacttctttattgagcatttaatgtggacatactataaaaaagaatttttaatgctaatgagaggtttagcacttaagatcagattcaagagaatatagattcctgataaatttcactgtttgcaaattgagcagtgctgcaacatgtactgtatgaaggccataaaatagagctagtcatggataacagactttaaccagttaggtgctagatcctaagaggcactcacaaggccagcaggtgcttccttggctcccatgatcgatcgaggcatagtgaaagaagggcaaagacagctttccagagctttgtgctcaggctactaaagtagttgttataggtgtgttaacgaagaagcttagtgaggagcagaatgtggtactatattcatttaactcaacccagaaccattggtcagaattggtgggactggcatcttccctcagacttgcagttgatagaggctgtggtgttctcactagactttgcagagcagtaggcatctcaaggtaacagattcttattgagtaggtctattaggagtcagaaggtgttggggaggagtctctggcttatgactcctggttcccattagtcttaagtcttctggttcccataaaagactcagttttattgaggtagatacaggtttagaagagaaaagagcaacagattttcagcgttgcagtcactcggttatctatgaagggttgtgcaaaacaggaaggtctgggaatgaccagatatcttgttggcataaatgttatgaaaaggcagaatactggcaagaaatgaggaagagagagaaaaacaatataactttcttgagtgcaaaggtgctaggcaactaggagcccagctgggattggtgtagggagggccgaacgctgactagtgtggcctcactgccccaggcttcctttcagaggaaggcctgtcctgctggaactggagccaaggggaggctgcctatgaaggcagaagatgtggatgaattcaggcactgggggtgggggggttatttataaacacaaggtggttggtttaagccaaaaggagataccatcctgataagctctgtgaaagagaagatgtgcctggtgtgtgtaatgcggctggggtatgaaaacactgagaaggagatgaaggagtgtgtgtagcatgggggtgtgtacaacttaacacctggacttttactgggggagtgggaaagtgattctgtaaccaacattagaattactttggatttgtaatcagattggttctatgatttgtctttgactattcacagataattgtaaatgctggttttataagcccaagtcattttacatttgcttttccaaaatgtattaaattggaattttttaatcctttatatacaaaaaaaatacgatcactcagtgtgtgtttctcttccccttcttagtcagcacacccagtcctttattttattctattctatttattttattttaataagtacttagcctcttctgacttctcaaaggacaatcggatacatatcttcctgaaaagaagtagttaaagttcccttgggaactagctacttggtagttacaattcccaaatgcagaacttggtcttttcatgttaaaagccttaatctcatttgggtactcaaaagagaaatcagagtttattctggttaacttgagaagccaagaaagatcatttttagcaagtatgccttccatccttggcagaggcttcccagcatcctaggctcagcttaccgggtgataggccccataagacacacacatgagcagggtgagaaatgcttgctttatagctgctccaccctcatctccagagattttgtgtctatggttgtgggtctggaaacctggcaggaaccacttctagagtacctttgcctaaactcttttagaattgaggccccaactttgatggcacatttaatacccaatttcttccataatagatatttttaatagcaggacagatggcactgattagatcaagaactatttggaagtgcctcttatgtttttttcctgcattctgtacataaagttttaagtggcaggtccagatatgtaaaatcatttctctctattttccagctggttttgttaatgattctctaggacagcaggtaaatgagttaagttgttgggcttggggcaagtgaagtttgtgactatgcttgatttaataagctgagagtctcttgtttgtctgtcaaggtgccttcctctgctgaagccttacctccttctcacccagtaacggttaactcttctcttgtgtatatgcaaataaacctattattcacttcaaac

SEQ ID NO: 11485 - DNA, 1372 bp, Homo sapiens
cagaagaatgtagtttgatatttatttagtataaaacgtttgtgcacagtgttaacaaatacaatttttacaaatctgttttgaaaatgtggtggctgtttatttgggtttcatactcttaattacttcatccatcagttttttaacttctttgtgtcttgtaactgctcggctcatacagtcctgaagtttagctccagttagcccacttccacctgaaaaattattttgccaatacttttaatctcagttatcattccttttcaaaaaacattaatgtcatgtcaaattataaaacaaaaaaattggataatgtaaatcagggtacagtctcaagatctacaagttagtttcacaagacctccaagtgattctaatgtatgtcttaagtttaagaaccactgacatataccattaagatggaagaacattttaggtagctaagaaactatactaaaattaggtaaataaaatatcccatattctatttggccctccctaatttaaggctcacactgagttttcatctacatatgtttaggactgaagtggcgggaacatgcctggtttgtgaagacaacagagtttgccttcctcatccattactattgttaaggttcctgttgccagatgttcctcctctccagtagggtcaactataagcaaagtgtcatcaaacacagcaaaggaagttgcaactggatgagttctaatattcaaataacttttcttctttaaattaacttctgctaaagcagtttcttcatttatagtaacttcaggcaactgtacattttttaaagccgctagcaaagcaaatgtgcaggcatccaaaatgtttccatcgtagtcgaggcaaatgagatcacagtatagaacccagacaagctttcctggagaaatgcataagtcctctttctgaattatctgtgaattttcaatgacatctgcaatgaattggctagccacttgggcctcttctccaggaggtccagaccggaatctcgatgaacacaggggtggtagatccacattaggaacaacgtatcctttatcaggggcatctgttgatggtgctgcaaattctgctttaactccacagattactgtagtatttcccaacttcactaaagcagaaccatctgcggtactaattgaaccgatgttgacagttgtggttctgaattcaccaagttctcttccatcaggacggcagttctctttcagaaatctcctgtaatactccagaggttccacggttttgaacccagccgccatcttcccgcccgcgcgtctgcccccgcgtaccagctgtttccacaaagcccactcttggtaagaatcttctttgtggcaaaaaagcttcccgcgt

SEQ ID NO: 11486 - DNA, 479 bp, Homo sapiens
  misc_feature 1, 341, 342, 348, 352, 355, 476, 477, 478, 479: n = A,T,C or G
ncgactactatatggctagattggagctccaccgcggtggccggccgcccgggcaggtacgcgggatagcattgacttttacacacattcacacaagaaaaaaatcctttcaaaattcttaaatcttctgttcctcctttttccaagggaagagggcaaaaagtggcctgggctctgttggtgtgcgtgttccgtggcggagagaagaaaatgggaaagacatctcactggtgcttttctcttttgttttagtgccccccgcccccatccctataatatctgtaactactcctaaaaaggttttgattcaggcttttttttggtttcattttgtttttttnngaaaangaanaanaattaaaaaaaaaaaaaagggccccccggccccttaaaaaattggggaccccccgggccgggggaattttttttaaactttttttttccccccccccccgggggggggcccggcccccccnnnn

SEQ ID NO: 11487 - DNA, 1800 bp, Homo sapiens
cgcgtccggaaacccatgccaatggaactgagaggagctggcatggctgccatccaggtaaagggagggggcaggtaggcagggaggatgctctggccaacgccgggtggaggtggcctccagcatacagcgggtgttcagtgaaaatgcttgcagtgtccaagacccctgcatccgaggaggacaatttgagtttctggacgggaaccttcccagattcttggtgccaccattgagaactccaggattgtcctgcagatcgacaatgcccgtctggctgcagatgacttccgaaccaagtttgagacggaacaggctctgcgcatgagcgtggaggccgacatcaacggcctgcgcagggtgctggatgagctgaccctggccaggaccgacctggagatgcagatcgaaggcctgaaggaagagctggcctacctgaagaagaaccatgaggaggtgggtttgaagctgggcctttcttccatccttccctaacctcccagcggctgaagactcttttattctgtattctctgaccgtggtaacacttggtgcaccctcaccatggccctgggtgtgggatcatggatcccagggttccaagaggaatcagtgacgacccagtctgtcccccagtgctagttactaggcctgcacctgaaaactaagcccctttagcctgaagggtggggaagtgacctgggccaggcccagtggggtctgggccctgacatgcccatctctgctgtatcttttcaggaaatcagtacgctgaggggccaagtgggaggccaggtcagtgtggaggtggattccgctccgggcaccgatctcgccaagatcctgagtgacatgcgaagccaatatgaggtcatggccgagcagaaccggaaggatgctgaagcctggttcaccagccggactgaagaattgaaccgggaggtcgctggccacacggagcagctccagatgagcaggtccgaggttactgacctgcggcgcacccttcagggtcttgagattgagctgcagtcacagctgagcatggtatgtgtccccccaccgccgccgcttccctgtgcaattcacacttatacccttgcagcctagggcagcctggccggtggctgtgcccatgccctctccgggaaccaggctctgctgagtcacaaccccctctccctatcctcagaaagctgccttggaagacacactggcagaaacggaggcgcgctttggagcccagctggcgcatatccaggcgctgatcagcggtattgaagcccagctgggcgatgtgcgagctgatagtgagcggcagaatcaggagtaccagcggctcatggacatcaagtcgcggctggagcaggagattgccacctaccgcagcctgctcgagggacaggaagatcactacgacaatttgtctgcctccaaggtcctctgaggcagcaggctctggggcttctgccgtcctttggaggatgtcttctgggtagagggatgggaaggaagggacccttacccccggctcttctcctgacctgccaataaaaatttatggtccaagggaggaaggacgtttggtttattatttcagcccatggagagaataggtcgttcggtttgttatttgaacccttggagagatgggtcctgccttggccctgtttaggttttatttgaaccaaagttcactctgtcccaggaaagggaggggagggtactcacatactttgcctgtaatggtaattcctgtttacagaagtcttcatttatttaacccgttccttaaaataa

SEQ ID NO: 11488 - DNA, 471 bp, Homo sapiens
  misc_feature 104, 105, 106, 107, 108, 109, 110, 111, 112, 113, 114, 115,116, 117, 118, 119, 120, 121, 122, 123, 124, 125, 126, 127,128, 129, 130, 131, 132, 133, 134, 135, 136, 137, 465, 466,467, 468, 469, 470, 471: n = A,T,C or G
taaaacttgcagcaatgtgaattgggccagaagatcagagtgtaatatgtgtaatactccaaagtatgctaaattagaagaaagaacaggatatggtggtggtnnnnnnnnnnnnnnnnnnnnnnnnnnnnnnnnnnccccccccccccttaaaaaacaaggaccccccccccccccaaaaattcaattccccctttttccccccccccccccccgggggggccccccccccccccttttttccccctttaaggggggtaaatccccccccgggccaaacccgggccaacctttttccccgaaaaaaaaaaatcacatccccgcaactacctatttctctccccaccacattcccccatcttcccacattcccccccctcccaaatttccccccatcccaattctccccatatcttcacacccgccatatatcccacttcatacaaatttccacctctcacaaannnnnnn

SEQ ID NO: 11489 - DNA, 1125 bp, Homo sapiens
ggccgcccgggcaggtacagtggcacaatcatagcttagtgcagcctcattctcttgggcacaagcgctcctcagcctccctcctcagcctcccagttgctggaacttacaggtgcaccaccataaccagctagttttattttttgtagagacagaagtctcactttttttcctagactggtctgaaatagaccattctatttgctagaatggtctcaaaccatccttctgcctcagcctcccaaattgctggaatttcaggcataattcatcatgcctagccatttcttttttctgctgcattgcagagttagaaccaatttcatttgtcctgcactgagaatgtgcattcccagcagatcatggttgagctcagcacacctgcaactcagccagcctctttgaagggtgcacagttactaactgtcagcgttgcacagccacctttagcaggtatgttcagaacttacattcccaccctttctaaaacagctcacagtaacaagagaacgggatttaacttttgacatgcacactcatgaaaaccaatgattttggaaagccaaattgttgagaagataaggtggggattctgactactagtatttttacaaatctgattgtcgttgcaggttttgttttattttgttgtgttaatgctgagagtggagaatagattggaatatttgcctcttgtgtttctttttgctttgtaacattgcaagtggtccacattttcctttatttaaaatttaaagttggtgcctggggtttctggtgttaaatagaagtgatacttctgcataaagtattatggagatgctctgttccatccagggaggtgcaggtgaaaagagggcagttcatcctcctcacacttagggcagggagcagcatgcaggggcagatcagcagctttgcatgttgacaaatccactctctgctgcagatgcctaggggaagttgcagacttaaattttcttttgtaaaatgggggaacacaaacagatcttatgtcacactggttactccagaaaaaaaaagaaaaagaaggaaggaagaaaagaaaaagaaggaaggaagaaaagaaaaagaaggaaggaagaaaagacagaaggaaggaag

SEQ ID NO: 11490 - DNA, 608 bp, Homo sapiens
  misc_feature 1, 2: n = A,T,C or G
nngattaatgtaaagctttgctaagaattccttaagttgaatgaaacctgtcctgtaaaaaatgaatggagatgacaggtgagctggcatagttctcaggaaccaagaggaactttggaagttatggcttgtacctggaaataaaccagctttactgtggaggaatgtgatggagaagggtgagtatcaattttgcggcgtttttgttccctttcaggctctggaatatctgatctgggaacaggtgatttcaaggacccagaaactggtgttttttctcctcctttaacattttcctttgatttcatttcctttgctatatctctttctctggatggctccttctctctttccctttcttgagttgattttgattctgcgttggggacagtggtcttaaatttctcatctttagctttttcttccttcttgaatttttctttctctttgtcagacttcggcgctctttccttggtctctcttgctttttcatctttatttggccgctcttcctttggtttttctttaccatctttaccaagtacctgcccgggcggccgctcgattaatgttgtagttggggtgaaataggactacttctcccgcgt

SEQ ID NO: 11491 - DNA, 644 bp, Homo sapiens
ccgggcgtttcgaggagtgctgtgaggcccagcagcactggaagcagttccaccacatgtgctactgggagctgatgtggtgcttcacctacaagggccagtggaagatgtcctacttctacgccgacctgctcagcaaggagaactgctggtccaaggccacctacatttacatgaaggccgcctacctcagcatgtttgggaaggaggaccacaagccgttcggggacgacgaagtggaattatttcgagctgtgccaggcctgaagctcaagattgctgggaaatctctacccacagagaagtttgccatccggaagtcccggcgctacttctcctccaaccctatctcgctgccagtgcctgctctggaaatgatgtacatctggaacggctacgccgtgattgggaagcagccgaaactcacggatgggatacttgagattatcactaaggctgaagagatgctggagaaaggcccagagaacgagtactcagtggatgacgagtgcttggtgaaattgttgaaaggcctgtgtctgaaatacctgggccgtgtccaggaggccgaggagaattttaggagcatctctgccaatgaaaagaagattaaatatgagcactactgatccccaacgtcctgc

SEQ ID NO: 11492 - DNA, 475 bp, Homo sapiens
  misc_feature 1, 2, 3, 4, 5, 474, 475: n = A,T,C or G
nnnnnaccaccctcggctgaactcctctcggcgttcaaatgttcctcttctctctttctctgctgtatcgtttcaccattcatctgcttgtctgggatggtgaagacaactgtttgctcattctaaacgacacggaatagaggcgtctcctcatctgctcatctgcttctggagctgcttggcgataggtgattgcctcgccgctcagctataggcgatggtctcaccactcggtgataggcgattgtcccatctaggtcgccaaaatgtgtctggagttggtgggttcttcgtctcactgacttcaagaatgaagccgcgcacactcccagtaagtgcagcagttcttcaagcgggcatgtatacagcatgatcgttatcatgatctggtgtgctcgccccctcttcagtgtggtcgggatcgaggtgtcgcaggttcaagacttcaagtgtggacctatcgagtaggtgtann

SEQ ID NO: 11493 - DNA, 2223 bp, Homo sapiens
cctttcctgaatacactccccaaaacaccccttttccagttacaattagcatcggtgatccaagcagatgccacatggaagaggaatcgccatttactcagaaaaaatgtcccttacaggaaccggcagcagctaggcagtcaccggcccgcctccatccaaaatcacgctcgcgtgcttcggaagcatccgggtcactccttctccgctttttcttgcagatgggcctaggccggtgtcggttctgtttctccccttggctgcctgtacgcccacagccttctggctgcgacattatagaatcggccgtgtcccccctggtgggggattggggatctgtgtttagccatttatatctactttagctgttaaagaggtccaaatgaaaatcaggtgattgtggaaccatggggacttgggggtggggcagaggtgggaacatttgtatcagttgagtcagcttggtggctccctgtggagccagggctgagccttgtcacgcgcactcgccaattaagagatggaccagccagcagtcaagtgcattctccagtccttgcaagaaggatcagccctttctgtgccagcctcgatcgccttgtgctttggtctctttttctcccccccgcctggatcctgcctcgcgcgggccgtcctgttgctgagactcggggtaccgttctgctgacccagctccctttagtcacgtttgcttggctctggtaccaaatagttgggattaccgaagagtccccttccttgcgtgtcagcacggatgctgtgactgccacctgcgtcctcgtcaagtgcccgagctcgccgccgtgtgtgctgcgctgagtgagttatgaggtgcctttcccggaaccctcctctcgcctggacccaagagaggcgacagctgtggctggggctcttggtttccagagggtctggactggtttgggtgctttaaaatagatatttagttcagtggtgcttatgggggagatgggactagaacttaagtgtgagacttgggtggatgggaaagttaaatattggtctcttcaagttttttttttcttttgctttgttaccacttgtcactgtctccatgttaaaatgccaaaaatgatgtagttgttgttgcttttttccctattttccaccccagtcgctccttaccgtgactcctgcccttggagggcatgtagcagtgtctgtcctgccagtcccaaggccctgtgggaggagactggcctgcatctctctaagacttagtctgacgccacgcgcatctcttgttctgtgttcaatcagtagtccaggggagaagcttctgctacttcagagctttgctaaactaacctaatttgtccaaatcaccccaaaaccaccatctctgacgtaagcttccatgcgacagcctgatccgtttccctggacaggtctctttcctggaatgcagcccaggcacctgtgctcctggcacccttgaggcctctcctttgagccgtggtcaccgagagggttgaggacgcagcacccgaggtcccagcctttgcaggagcctccctgggcttagctggacttagatcttcggtggcctcatgtaaacgtggcagccagcctcttctagaaccctagcccagggactggagcaggaaagggaccttcaaagtgaagactgccttgtcccgcagctccttctggcttagattgaaaaatgggcttcctaatgggttaaatcctttaaaacaaggagttgtgggggaagggtgtcgtgcactcctagagaaaggtacacagttgcccggttgggaatgtgcttggcgctgaccctgcgggcatctgactggtcttccagctcaggaaaaagaatttgaaagaggcttagcgtgaaggggaatcaaagaggaggttgtgatttggtcgaaggtgcctggtttagtgctgtaattgtcttattattttttttatatatatatttcttggagtaaacattttaaataaacaacaacattgtctactgtcaaaaaaaaaaaaaaaaaaaaaaaaaaaaaaggagaagaaaacaagattcaagaagggagagaataagagaccgagttaggaaagaggggagtgagagggaataaaaaagacgaaataaaagggagggaatttggccggaaaaacacacggggcgcaggcaaatcaaaggcggagtaaaggagagagagaacagtggagggaaagata

SEQ ID NO: 11494 - DNA, 1109 bp, Homo sapiens
accttggttcagtccagtaaggtgggacaacccttaagtgggggcttcctggttgtagtagataagagacaaaaggttgcattcttttgagttcttgatcagccttccactgaacacacaatttagtctggctcagtgagtctgcatttttacagaagcgataggggaaaggaagcaatcagctatgcaggtgagcctcagggggatgactgtgaatagaatgggaggcagctttgccctaagcagttcccagcttgactttttcctttagcttggtgattgtggagtctcaagatttgttttctttccacaatctgaaattcaaagttccctgggtatcctgtattttcatttgtacactttggcgccctagtcccagagtcctggagcggcatactgggggtggctgtgcagtcccagcatccccaacccagcatgtatagagagcatccatccttacatccagctgacccatgcccatgctcctccctgtggctggaggttcaacaataacataagtctcttctttgccctccagatatttctccctcgagtgactgggaaacttggcaagagaccagaggacccaaatgcagacccttcaagtgaggccaaggcaatggctgtgccctatcttctgagaagaaagttcagtaattccctgaaaagtcaaggtaaagatgatgattcttttgatcggaaatcagtgtaccgaggctcgctgacacagagaaaccccaacgcgaggaaaggaatggccagccacaccttcgcgtcaccgtcccaatgagaaacaagaaggagcaccctccacatggactcccacctgcaagtggacagcgacattcagtcctgcactgctcacctgggtttactgatgactcctggctgccccaccatcctctctgatctgtgagaaacagctaagctgctgtgacttccctttaggacaatgttgtgtaaatctttgaaggacacaccgaagacctttatactgtgatcttttacccctttcactcttggctttcttatgttgctttcatgaatggaatggaaaaaagatgactcagttaaaaaaaaaaaaaaaaaagttggcggccgcaagctta

SEQ ID NO: 11495 - DNA, 1825 bp, Homo sapiens
  misc_feature 1817, 1818, 1819, 1820, 1821, 1822, 1823, 1824, 1825: n = A,T,C or G
actggctttggtgccttgtctaccaggcagttgagttggttactgctggtgcctttgtgggcaaaactaggttgtaaaagcagccaaaaaatttccagatgggagagtttcatagcgggcatattttggcttgtgaattgactgttatgtctcaaggtagtctcttggtgggagagagttctgctctgtagcgtctaactaagagcacatagttagatgaacttgccctgttgggagtgtctggtgaaggggagataaaagattataattgcatttctaaagagctaagtaggaagcagagaaaaggagagagaagtgaagacagaataattttaaataatgaagagagaaatgaagaaggaataattttcctgcttttccattggttctttggacataacaggcaaaagtgtcaatcagggtgagactgttccttcaagggcagagatcagacaagtgtcctgaaactctgcctccattgtgggggcaaccatttggccatgttccccactgtcagtgagatgaatagctctgctgctgcctgcaaaagcctctgaaacctgtcaggaaaggacattaattaaggtcccataatgctaggatgaagctcttttcctatttgctactttgaattatggcctgatatgttgtccatcctcactaacatgagaagattagtcagtgagcaacatctgatggggtagccacagcagtgataatgccagcactcttaaacatgacatttgaacagtatgaactttcttgtctaaataagatactaaagtgaaattgaggcccacctatgaaattctcctgttccaggttgaaaagaaatggaacatcgctgtgtctctctgttcacgctaggttatattgctgtagcaaatggcctccaaatcaaaatcttagtggctaacatgacaaaaatgtgtttctctcttgtgtccatctccatcatgggtcagcaatggatctgtggctcatgtctttattctgagacccaggctgaaccagcagccccaattttgggcatgttgggcttgaggcagaggggaaaatataagagacagaggcagctgctctgcctatggagtgctattcttttattcctttattttcttaataaactgctttaactttaaaaaaagagacaaaagcatcatacaataatacttacagtgtctgcttggcagaggccatatcatctttatcatttcattggccagagaattcacatggccacaacatcagtgaagtcgcccaggaggaaggggcagtgatagaggactggggttagtgcaacagtgcaaggaaaaatcttcagagcatttcatagtgcccagccagaaggccatcacaggaatgtcccacccacccacaaaggcttctgtgcagtcctagagaggtgtcctttgcccaggtcccacccccttcccagagcatggcctggtaggtgtggctggatctcagtccctgtgtgccactcaccaggatggttgggcctctgcctgcacagctgcacaggccaccccagaaacagaagattgactagatgcaggatgcttcctgtgatatttcacaatttatcctgcattaatgatattttcccatacagagaaccatgcagtagttcccaaggttgggttccctgagggggaatcattcatatttgatttcagaaaccctcccttcaggccattgctaacttttgctgtaacaccagtcactctctgaggttcagtaacagcttcatcttcctcaccctgtgccacaactttaagactggttcggcctcgtgccgaattcttggcctcgannnnnnnnn

SEQ ID NO: 11496 - DNA, 326 bp, Homo sapiens
agcggccgaggtacagtcggccctcattattcatggattctgtatttgcaaattcgctgacttactgacgtttatttgtaaccttcgagtcaacactcacggtgctttctcagtcctttgcagacgtgtggaatggcaaaaaaatttgagttatatgacgtatatgttcccagctgaggctgagcaaggctcacttctccttgcagccctcagactataaacaagtgtccctcttgctatctacttcgtgttatgatttttgcattttcataatccctgttgatgattttgctgtttaaaatggcccctaagcatggtcctgaagt

SEQ ID NO: 11497 - DNA, 2873 bp, Homo sapiens
  misc_feature 1, 2, 2851, 2852, 2853, 2854, 2855, 2856, 2857, 2858, 2859,2860, 2861, 2862, 2863, 2864, 2865, 2866, 2867, 2868, 2869,2870, 2871, 2872, 2873: n = A,T,C or G
nnacccacgcgtccgcgagccaggcggtgacaggacggcggggcgagccagacaaaaagtaaccttcctgaagaggacatgtgattggaagttgtcaattgttgaagcattggtaactccagtctctaacgttttagaaaatcataacaagcggttctgtaccctgtaaagaacagaaacctggaaatctaaggctcaaagacatccaagtaattggtatctgggagatttgggattcaaacccagctctgcttgacttggtgaactactgagttcttcattatgtctgatggagattatgattacctcatcaagtttttagctttgggagactctggtgtagggaagaccagtgtactttaccaatatacagatggtaaatttaactccaaatttatcacaacagtgggcattgatttcaggcaaaaaagagtggtgtacagagccagtgggccggatggagccactggcagaggccagagaatccacctgcagttatgggacacagcagggcaggagaggtttcgtagcttaacgacagcgttcttcagagatgctatgggttttcttctactttttgatctgacaaatgagcaaagtttcctcaatgtcagaaactggataagccagctacagatgcatgcatattgtgaaaacccagatatagtgctgtgtggaaacaagagtgatctggaggaccagagagtagtgaaagaggaggaagccatagcactcgcagagaaatatggaatcccctactttgaaactagtgctgccaatgggacaaacataagccaagcaattgagatgcttctggacctgataatgaagcgaatggaacggtgtgtggacaagtcctggattcctgaaggagtggtgcgatcaaatggtcatgcctctacggatcagttaagtgaagaaaaggagaaaggggcatgtggctgttgagaagtcaagtaagcgacatagtagttcaggtggcccatgcctgggatcttctctatgattgatacatggcacagtgagagattaatgggcattgtgtacaaattgcttctcaccatccccattagacctacgaataaagcatccggttctaaaattaatttgttgcagctttgtaaatatttctttaagattcagcctgagagttaggagaaatatttcagagccaaaagtgccttatacaaccttagcctattatagtaaatcattcaaggattcagaattttgcagtcacagaagagtgtatttattatgtagaatgaatgagggtactgtcacctgccttaatgtaggtaggcccagagtcttacatttaagatcttacatgcagttataaaaccgccacagtcttcaatccagatttgaagactcatgccataggtgacattctaaaataccattaaagccacttaaatgttaaataagaatatacatgcacatcagctcaatgtctttgagtattaattttatgtaagcattctatttaacatgaatataggacaaatcatggctatatctatagaccttggataaactggattgaccaattatacactcacggtgacttttttattggtgggaaggggattggggtggggcaggctggcttaatgtaatatgagcaaccaaagtgggacttctgtctccccgctatattcccattgctctgaatggttgattgaagggtcagggaactagattttatggctttagttcactgtgattgtacatttatacttggcctatgtgctggccgcacctgaacatagctggtgcttatgccgagttatttgtgatgagtaaatatttagtttctttttcttcatatttataatgttgatctggcatcctcaggctgcagctttattagcttataacttactcatctctatctttaccagcaggctctgtattgttgatatttgcaacttgttttgcttttccattggtggaattgaaataattagtttttaattacataagatgcctgtttgctatttggtggaagatagatgttcatattgaagcagtcacatttgtactgtagttcaataaaagaaaaatgaagtattctgtagcctatatttttcatagagctcatgagcatttactgtacttgctgggtcttgccaagatcatttattccgctgcattgccaaagtgtcttcataccaaattaaaggtggttttaatatatgtttcatggaagttgtttataaaattcaaaggtatttcatttaggtgaaaagtcttatttattaaagtggtttgaataaagtagatcaaaacttccagagatcttaatggctatataggaagaaatatcactcaccataatttaaataaagaataaaaatacatgtattttgtggtggcaaatgtttggtagaactgtaattagaaaaatacaagtatatttgcgtgatggttacactagaagcccagactttacgactacacaatatattcatgtatctaaactgtacttgtaccccctaaatttatttttaaaaaaggaaaaataaaagtatcatgaaaaaacctatttttttttccactgtccttccactactcccataacaaacttatccatggttggtaaaattttacatatttctatccttgaaatgaaggcttcttttaaattccaaagaagtcatggaggcctgtgcatttgaattgtatatgctagtgaggaaaagatttagacatttcaagagcagggttggccaggcgcggtggctcacacctgtaatcccagcactttgggaggccgaggagggcggatcacgaggtcaggagatcgagaccatcctggctaacacagtgaaaccccatctctccnnnnnnnnnnnnnnnnnnnnnnn

SEQ ID NO: 11498 - DNA, 814 bp, Homo sapiens
  misc_feature 1, 2, 3, 4, 5, 6, 7, 8, 9: n = A,T,C or G
nnnnnnnnnccccccagggggccattttttcccccccttaaccccggcctaagaggcaacaaaatttgggtccgggccccccccccgggtgggcggggtgaaaaaaggttaaattaaattcccgcgccccgggggatccccattttttaaaacgcccccgggaactttttttgggtttttctttttttattggggaggttgaatgcaagggttttattgagtggtggaggtggtcctctgaaggatggatgcagagctggaagcggggatggcacgggaagataatcttcctgctgggtggccaaacctctccgaccaccctcggctgaactcctctcggcgttcaaatgttcctcttctctctttctctgctgtatcgtttcaccattcatctgcttgttgcttggcgataggtgattgtctcgccgctcagctataggcgatggtctcaccactcggtgataggcgattgtcccatctaggtcgccaaaatgtgtctggaattggtgggttcttcgtctcactgacttcaagaatgaagccgcggacactcgcagtgagtgttgcagttcttaaaggcggcatgtctagagtttgttccttctgatgttcggatgtgttcacagattcttccttctggtggggttcgtggtctcgctggctcaggagtgaagctgtggaccttcgcggtgtacagctcataaaggcagtgtggacccaaagagtgagcagcagcaagatttattgcaaagagcaaaagaacaaagcttccgcggtgtggaaagggacccaagcaggttgccactccccgcgt

SEQ ID NO: 11499 - DNA, 2099 bp, Homo sapiens
  misc_feature 1, 2, 3, 4, 5, 6, 7, 8, 9, 10, 11, 12, 13, 2096, 2097, 2098,2099: n = A,T,C or G
nnnnnnnnnnnnngagagctcaaaagatttagttgtttggtaaagatgcctcatttgatacatttgaatgttacatgttacattgtaaacatcaagtaacttttttaacattttaaaaaaggaagtttattggtctttaaatggctcaaattgcaaataaacaaatcgggtagtggcatcagcctaagacacgtgatgcatctttgtcagttggcttcatagcacctcagtacccaggagaggaaaggtctcaaagcaaagtcacaatgttagtggttaggacccctggttaaataagactgtaataagtacacatggagattgctgggcccgctggccagtgttacattggtaacttgaattccgcacatggcatagcctatgagaaatacgaaatgaaagatgtacatctcaaaccctttaaggacaaatatttaacatgagaagctggatgtaaatatctaaagagtgagttcctaaaaagcctatttttaactttacatacacacctgttacctggaatgcctgaacacatctttgacctgttcaaattaggactgagaaaaaagaaaaaaatactttgttgaatcaactgtcctagccccactgcaaagaggaaaaaaaaaaaaatcggtcagtggcatatttcccactgaaattatgtccccaagtagcatgctagaattcttccagcaggtacaccacacaatggtgacacagcctaatgtgtggtcagtgtgtgccacgttttctgcactatacccaggtttgatggcttgatgttaacttctgaaaatgtagctacagtgttcttcattataaacagaaacagaaaagaattactcctaataattcctgtatcaaactgtaactttatgaatataaatttagaaatgaacagatggcaagcatgaatattttcccgaagcgttctagtgcaaaatgcattagcactactgacattttcttcctatgccctgctcccagattaaaaacttaacacttacatgctcaccactagcagaaagggatttccagggaccagaatctcagagaaaaggagggttcattcaaacataactggtgctgaatccttgcagctgaaaattatcttgcaagtatatatgctggcccttcatttaaaatgaacttgcagtttattaaaagcgatcaaagagctctggaatcttattttcaagaaccagaatatggcacacattttaaatttggacagacttctagcggacagttacttctcaagaattttctatacaaaagctgtgccaggcatatattttctcaccaggacacatggggcagcggacccctggtgtcagtaagaacacacccagaatgatataaccggatatttttcagtttctaaattaaggcatattcaaaaaattccatgtacaagtttacaccacttttctaagttactcaccaggtaattaaagcagattcacagatgaattactctcagtttaactatatgcaacaaccatgccaataacttttcttctaaattttgcataataatggttaaaaaaagtggtagtttaactatcatgttcacaattgtcatttttcaaggcagtagaagaccaagacattttaaaatgatataaaatttaagctttataataaacaccagaggaagtcacctttcctcccactccccacccccatttcacctcttcaatttcaagaaagactgcccaagaaacacaagcttacacgctacattcaggaccatgataaatgtaggcaattatgaaataagttgaactttgcttcttggtgaagccatattaatttctttttaaagtaaatttgactttcattgcagttccaattcatgcttttagtgatatacaacaatttccaaaatgttaaagtaatttcagtcaattaagccttcaatggcaatgcttataaattatatttattagtatggtcaagataagaaaggagtttgggctttgattataaaatgcagcatctttctctgattctcttggctaaacttttcctcttcttttttccattcttttctttgctgtcttccatctttctcgcggacgcgtgggtcgacnnnn

SEQ ID NO: 11500 - DNA, 2576 bp, Homo sapiens
  misc_feature 1, 2, 3, 2575, 2576: n = A,T,C or G
nnncgaccatcgggaagccggaattacttgcagggctaacctagtgcctatagctaaggcaggtacctgcatccttgtttttgtttagtggatcctctatccttcagagactctggaacccctgtggtcttctcttcatctaatgaccctgaggggatggagttttcaagtccttccagagaggaatgtcccaagcctttgagtagggtaagcatcatggctggcagcctcacaggattgcttctacttcaggcagtgtcgtgggcatcaggtgcccgcccctgcatccctaaaagcttcggctacagctcggtggtgtgtgtctgcaatgccacatactgtgactcctttgaccccccgacctttcctgcccttggtaccttcagccgctatgagagtacacgcagtgggcgacggatggagctgagtatggggcccatccaggctaatcacacgggcacaggcctgctactgaccctgcagccagaacagaagttccagaaagtgaagggatttggaggggccatgacagatgctgctgctctcaacatccttgccctgtcaccccctgcccaaaatttgctacttaaatcgtacttctctgaagaaggaatcggatataacatcatccgggtacccatggccagctgtgacttctccatccgcacctacacctatgcagacacccctgatgatttccagttgcacaacttcagcctcccagaggaagataccaagctcaagatacccctgattcaccgagccctgcagttggcccagcgtcccgtttcactccttgccagcccctggacatcacccacttggctcaagaccaatggagcggtgaatgggaaggggtcactcaagggacagcccggagacatctaccaccagacctgggccagatactttgtgaagttcctggatgcctatgctgagcacaagttacagttctgggcagtgacagctgaaaatgagccttctgctgggctgttgagtggataccccttccagtgcctgggcttcacccctgaacatcagcgagacttcattgcccgtgacctaggtcctaccctcgccaacagtactcaccacaatgtccgcctactcatgctggatgaccaacgcttgctgctgccccactgggcaaaggtggtactgacagacccagaagcagctaaatatgttcatggcattgctgtacattggtacctggactttctggctccagccaaagccaccctaggggagacacaccgcctgttccccaacaccatgctctttgcctcagaggcctgtgtgggctccaagttctgggagcagagtgtgcggctaggctcctgggatcgagggatgcagtacagccacagcatcatcacgaacctcctgtaccatgtggtcggctggaccgactggaaccttgccctgaaccccgaaggaggacccaattgggtgcgtaactttgtcgacagtcccatcattgtagacatcaccaaggacacgttttacaaacagcccatgttctaccaccttggccacttcagcaagttcattcctgagggctcccagagagtggggctggttgccagtcagaagaacgacctggacgcagtggcactgatgcatcccgatggctctgctgttgtggtcgtgctaaaccgctcctctaaggatgtgcctcttaccatcaaggatcctgctgtgggcttcctggagacaatctcacctggctactccattcacacctacctgtggcgtcgccagtgatggagcagatactcaaggaggcactgggctcagcctgggcattaaagggacagagtcagctcacacgctgtctgtgactaaagagggcacagcagggccagtgtgagcttacagcgacgtaagcccaggggcaatggtttgggtgactcactttcccctctaggtggtgccaggggctggaggcccctagaaaaagatcagtaagccccagtgtccccccagcccccatgcttatgtgaacatgcgctgtgtgctgcttgctttggaaactgggcctgggtccaggcctagggtgagctcactgtccgtacaaacacaagatcagggctgagggtaaggaaaagaagagactaggaaagctgggcccaaaactggagactgtttgtctttcctggagatgcagaactgggcccgtggagcagcagtgtcagcatcagggcggaagccttaaagcagcagcgggtgtgcccaggcacccagatgattcctatggcaccagccaggaaaaatggcagctcttaaaggagaaaatgtttgagcccaaaaaaaaaaaaaaaatcacgacgacgagcacgcacacaaggaggcatctacaaactacacagagacaaaggcggggggcgcgataatccggggcgaccaccccacctttgtagcgcgccaaagagagtttaataagcgggcgacaacgggcgcacagctcgcttgtgggcacctcgggggcagggcccacaactccggataactggtcggcgcccgcggctagtctatcataggcctgacggcgctacgggtatcgtcctacaann

SEQ ID NO: 11501 - DNA, 666 bp, Homo sapiens
actgcatgttgccgtgtgagccctgtgaaaggggagcatataaggaggttatccacatactgtagaagttatgcccacctcaagagattgctcagttagatttttgctagagcttgtctgaataaatgtgggcaatttctaaacccctgagttaggactgaccaggatgaagttaatagataaagatttaggtagctttcccaggagaaacagggctattaaagggaaagatgaattcagagatcatgtgaatattaagcagacacccatcttggaaagtatatttttgcaccaaagaggtgtgggatatttagacattcattacccagggactgatgggagaatggtaattggtcccttaaataatataaaggagtgtgaatcttttcttttggagggaagtggtgccatttgcccccattacctggcaggattcggaggagagttgtttagaaaagattagcacagagtaggcagctcttaaacccaaagggaaatttataattttacttgccacctccagagttgcccttggctttgttctgttgatggtgaggtctgatttggaaactggccagagcgtagagctccttcagctcaaggccatcgggggtggggattctgtcctaggcacccttcagccctcaaggcagccccgtttccagt

SEQ ID NO: 11502 - DNA, 3935 bp, Homo sapiens
  misc_feature 1, 2, 3932, 3933, 3934, 3935: n = A,T,C or G
nnctgttagtttatactaatttgacgcaagccgcctgttgagtctcctccagatcgcagctgaaggatctgttgagcgcttcaggaaaggcggacaggcgacactaacaggtgaagatctcgggagaccatgactaagaaaagaattgctgtgattgggggaggagtgagcgggctctcttccatcaagtgctgcgtagaagaaggcttggaacctgtctgctttgaaaggactgatgacatcggagggctctggaggttccaggaaaatcctgaagaaggaagggccagtatttacaaatcagtgatcatcaatacttctaaagagatgatgtgcttcagtgactatccaatcccagatcattatcccaacttcatgcataatgcccaggtcctggagtatttcaggatgtatgccaaagaatttgaccttctaaagtatattcgatttaagaccactgtgtgcagtgtgaagaagcagcctgattttgccacttcaggccaatgggaagtggtcactgaatctgaagggaaaaaggagatgaatgtctttgatggagtcatggtttgcactggccatcacaccaatgctcatctacctctggaaagcttccctggaattgagaagttcaaagggcagtacttccacagtcgagactataagaacccagagggattcactggaaagagagtcattataattggcattgggaattctggaggggatctggctgtagagattagccaaacagccaagcaggttttcctcagcaccaggagaggggcttggatcctgaatcgtgtaggggactacggatatcctgctgatgtgttgttctcttctcgacttacacattttatatggaagatctgtggccaatcattagcaaacaaatatttggaaaaaaagataaaccaaaggtttgaccatgaaatgtttggcctgaagcctaaacacagagctctgagtcagcatccaaccttaaatgatgacctgccaaatcgtatcatttctggcttggtgaaagtgaaaggaaatgtgaaggaattcacggagacagctgccatatttgaggatggctccagggaggatgacattgatgctgttatctttgccacaggctatagctttgactttccatttctggaagattccgtcaaagtggtcaaaaacaagatatccctgtataaaaaggtcttccctcctaacctggaaaggccaactcttgcaatcataggcttgattcagcccttaggagccattatgcccatttcagagctccaaggacgctgggccactcaggtatttaaaggtctaaagacattgccctcacagagtgaaatgatggcagaaatatctaaagctcaagaggaaattgacaaaaggtatgtggagagccaacgccataccattcagggagactacatagataccatggaagagcttgctgatttggtgggggtcaggcccaatctgctgtctctggccttcactgaccccaagctggcattacacttattactgggaccctgcactccaatccactatcgtgtacagggccctggaaagtgggatggggctcgaaaagctatcctcaccacagatgatcgcatcaggaagcctctgatgacaagagtagttgaaaggagtagttctatgacttcaacaatgacaataggcaagtttatgctagctcttgccttctttgctataattatagcttacttctagttgtcctattgtcactgccctgtttttcattgggaagcttatctacagatgccttcagaatctgacgagattgactctcagtttcatattgcccagaaatctactttaatgtctctttcgaaagcattaattcactttcctttttcctacaatgaaacctgttttccatttgtattaactcatctcccttccactcatgatccgtcactcttccttgtggtaatccctagactgggagctcaggtactcttttagtcatctttgtatgtctttagcagagttcttgacatgtggtaggtgcttaataaatgtttgttgtttatcaaattttatggtagggagagtaagtcagcatcggtataaaatcgcttactccacgtaactcttcttctgatagggtttgattttctattagaagctcaattttagttttttttcatattataactaaatatgtttcctgagagataagagaaataatgttcctacaatagttgtatgtatctaagataagacatatagatgcttaagacattttgtttcacttgctattcactagtgtacttgaaacatggtcatttttagcccttttccttaggaaccatgtctttattttctcaataaagaaattactttcaactttctaggctcacagtcattcagatcatctaccatctgccaatgagatcaacttggttgagaattttgggattttaaattagctgtcctacctttttaaatctcttttaaatccttcccatattaggatccaacaaaactttatcttaggaaatatgataagtagcttccaattgttgtagtgtggtctacaaatgtgatttgattcatcttcccccactctaattttctccccttttctcctcccttacatggagtctaagtaagtatttgaacaagtcatttatgtattaaattagaactgatattaactaaatgtaggaacattctgcttataccagtttttctcatgtcgtaaagtgtagttctgaaaaacagagcaaatgaaatgcaaagcaggtacttgggtttacatcccagtgccactgatgattctgttttctcatctgtggaagtttcactgttcttgtttcatggagaaattaactaagtgtcagctgtcaggcacactgaactcaggtgatgttcattaatagctgttgtacaatatgtttgtatttggattgctgcttattacttaacaacaggataaacctgaacaatggaaaagaccaacattagagagtattatctttccaaatacacacacctgtaagagaactggaaatgtgagaactacaacttcttcttatttaaacatttgaacaattgccggccctttcaccgaatttacctgtggaatgccttttgagagttagagaactgagaactggtattacttttcaggtcttttgctttccctaatccttgtgatactggagatttatcatctattaaaatggacctagtatttttaaatctgcatatcaaaagcaaattgaatgtctcttgcttccttttaatttcttttaacatataaatttctcttttagcatgtaaatttgttgaattaacagccctttgataatataattcctagttatcagcaataagtacaccagtttcttttttaaattaggagtatgtaattctaaattaattgattctctcattgtacatattatatgcaaggttacaaaaaaaaatcaatggttaatgattttttagctcaaccaagctaaaagatgtgaacaagaaattgaactcaaaacaacttaagatacaaagctcttgttactgataatgtctaataatattcatcaatttaccatatcttgttcttatattaaaatgttctatcattttcctaattattttaaagtcgattacaaaaatatatatatattcttgtagtgccagaaaattgaatacattaataaatggggtagaatagatgaatctcccatgaagaagaattccaaataatttatgaactctgccctcaaggatatggagcagaacttcctacttctctagtgtgagctgaatagtgacttccttccaaaaattacatatggaaagggggaaaataactttgtagtggagaaatctgataaacactatctcggctaggttatcaagattaacactaacagtaataagtcacactgatagtatgtacnnnn

SEQ ID NO: 11503 - DNA, 1847 bp, Homo sapiens
  misc_feature 1821, 1822, 1823, 1824, 1825, 1826, 1827, 1828, 1829, 1830,1831, 1832, 1833, 1834, 1835, 1836, 1837, 1838, 1839, 1840,1841, 1842, 1843, 1844, 1845, 1846, 1847: n = A,T,C or G
tcgacccacgcgtccggcctaagcaggagcagcaggctttaaggaggcggccgacacggagcggctcgccctgcaggccctcccgcctcccggaggagatccggagactggaggaagagctccgccagctgaagtccgattcccacgggccgaaggaggacggaggcttcagacactccaagctttcacctatctaaacagtagtggtgagtccactctccaagccaccccaaacatggtgccactctcattatatggaacttctgctttttgccaactaatcagaaataggaaagtgcacaccagtatgcacaatgacctaattgctcatatggaattcaaacagcagtcatgctgtcccccactgtaaaagatctagttctccaattaatcacaatctgttacgatgagtgaggaggtttgaggtgttggggatacccaacaacgtggaatcactccagaaggtgcaggagcaggtgcacacgctgctcagtcaggaccaagcccaggccgcccgtctgcctcctcaggacttcctggacagactttcttctctagacaacctgaaagcctcagtcagccaagtggaggcggacttgaaaatgctcaggactgctgtggacagtttggttgcatactcggtcaaaatagaaaccctcgcttgcatgcggagatgagcgaggcgggcgcacggatggacagcagggtcgttgtggtcttaagtgatttcccgtttagcggttttcgtgtagaggtctcagttatgttgtggggcttcttcatttacggcacaatgggtttcaatggtctcggcgcctgtggttcctcttgagaggctggttcactgctttcaacgcggccttttttttagcgccctagtgttccgaatgagttgcgttcaatgtggtctctgagcgcgccccgtaaacagggcttctaagagtttttagtcgagcaatgttaaagcgttaattgggggttccagaaccggtgttccctccgaatcccttttgggtgcaaattcaagttaaaaataaaaggttggttcgggggacccttgtctcgtcaggtgtcttctaaggcaaattagtgtactttgtgtttgttctggccgaaatttttatgagatatctctcacctgtcttcccctttgaaccggttaaagctcatagctgtcagctctgaatgaggaggggagaagcccccgggtctttctttgaaaggaatcccctgctttgagggctgcctccctcatggtgtgcgctgtcgtttctcttcctgacgcatcttgtgatatcagaggtaactatgccaaagcatccaggcggttctgaatgtgaagcactacacccagcagagtcccggtgccctctgtccccactgccggcccatgttctctctccggaggtcaccaaggaatgcacaggtttcgactaccagaaaggggagtccttgggttctttcaaaaaattcgtgaggagagctgtctacagtggaatagggggtctccctggggaatgcaggccaagtccttttattttaacatgatgtccatgaagaggtttgccgtctgggcagccctgtcggcaaggagcgtgcatactgcgtttgtgtaattgtttgctgtatctcccttccctctgagctgtattgttctttaatggctgtcttgcccttccaaaaaaaattgaaaaaaaaaaaaaaaaccccgaaaagtaaaaaaaaaaaaaaaaagttttgtttagtttactgtgaaatgaactgtatggcttatttacagtatttttaattcttaataaacacttgagctttgttatgacnnnnnnnnnnnnnnnnnnnnnnnnnnn

SEQ ID NO: 11504 - DNA, 1261 bp, Homo sapiens
  misc_feature 1, 1255, 1256, 1257, 1258, 1259, 1260, 1261: n = A,T,C or G
ncgacccacgcgtccgaaggccttggccgtttaaagtcttatttctgaaggtcactatcatatgacaaaggctttgccgcagttcatcttcctccctgtgtactttccatttgccttcctggttaaagattggtgcctggccagaaatgcctgtgaaacagctgtggtttaagcttcaactgtaaaagacagacggaatcctgctgcatcacagaagctggaagttctgatgttccactgaaatcacaatggaaagtcttgacttgactggtcacagtaatgaaaggcagtaatagaaataaggatcattcagcagaaggagaaggggttggaaaacgaccaaaacgaaagtgtcttcagtggcatccattgctagcaaagaaacttcttgatttttcagaagaggaagaagaggaagacgaagaggaggatattgataaggttcaacttcttggggccgatggcctagagcaagatgttggtgaaactgaagatgatgaatcaccagagcagcgagcccggagaccaatgaatgcatttcttttattttgcaaacgccatcgctctcttgtacgtcaggaacaccccaggcttgataaccgaggtgctaccaagatactagctgattggtgggctgttcttgatccaaaggaaaagcagaaatacacagacatggccaaggagtataaggatgcatttatgaaagcaaatcctggctacaaatggtgtcctaccacaaacaagcctgtgaaatccccaacacccactgtcaatccacgaaagaaactttgggccttcccatctgactcttcaagagacttgccaagccccaagaaagcaaagactgaagaaatgcctcagcttaactttggaatggctgatcctactcaaatgggaggcctgagtatgctgctgttagctggagaacatgctcttggcacaccagaggtatcctctggcacatgcaggcctgatgtttcagaatctcctgaattacgtcagaagtcaccattgtttcagtttgccgagatatcttcaagtacgtcccactctgatgcttctacagcagtgtccatctgccttgtttcagtttgcagagatttcttcaaacacttcgcagttgcggtgggtgctgacgcctgtaaaacgctgtgcgaaagtctgcaccctttcaactggcagaggcatgtgcctgagcatcagatggtgagataagatctgcagaggtggaaattacaaaatattctaacagtgnnnnnnn

SEQ ID NO: 11505 - DNA, 656 bp, Homo sapiens
  misc_feature 1, 2, 656: n = A,T,C or G
nncacctgagcatcggctcacacctgcaccccgcccgcgcatagcaccatgcctgcttgtcgcctaggcccgctagccgccgccctcctcctcagcctgctgctgttcggcttcaccctagtctcaggcacaggagcagagaagactggcgtgtgccccgagctccaggctgaccagaactgcacgcaagagtgcgtctcggacagcgaatgcgccgacaacctcaagtgctgcagcgcgggctgtgccaccttctgctctctgcccaatgataaggagggttcctgcccccaggtgaacattaactttccccagctcggcctctgtcgggaccagtgccaggtggacagccagtgtcctggccagatgaaatgctgccgcaatggctgtgggaaggtgtcctgtgtcactcccaatttctgagctccagccaccaccaggctgagcagtgaggagagaaagtttctgcctggccctgcatctggttccagcccacctgccctcccctttttcgggactctgtattccctcttgggctgaccacagcttctccctttcccaaccaataaagtaaccactttcagcaaaataaaataaaaaaaaaaaagtacttgcccggtcgcccgccaccccggtgcagatccgattctccctan

SEQ ID NO: 11506 - DNA, 1276 bp, Homo sapiens
  misc_feature 1, 2, 3, 4, 5, 6, 7, 8: n = A,T,C or G
nnnnnnnngggatttttatttgtaaatttctcttacattttacaattgttaaaacagtgtattataacttagcctaaattttaattttcctttgaatttctacatactttttagcaacccaatgaactttcatgtcttcctcaaatagctcacaatacttgctaagcaactatattaggacttggcaaacaacagtgtacaggccaaatatggcccatggcatgtttttgtaaatgaagctttattggaacacaagcaatttatttgcacagtaccacagctactcttgtgctacagtaggaaagttgagtagttgcaaaagacactgcaaaacctaaaatatttactatctgacttttacagaaaaacttttctaatctgtgagaatattgtagtttcataagacagcattttgaaatattttgattcacttctgaaagacaaaaatagttatatatctcaaaatgagattatgtgtacacaaacttcttgatccataaagaaatgtaactgtttttctccatcgtccatattgtgtattttatttttctttcttttcttctgtgcaattttatggattttttttctttggttgctcttttttttcccctttttggacattgttcttaaagtgtggtttcttgaccacctcaaagtcacccgatactcgtcaaaaatcaaatcactgggttccatgtcactgaagccggtgattcttcagctttccagtcacttatttttctttggtgtcagggcacgcattctcattccactgtgcttcacactggtcaatgcaaatgatagatttttagcaacttccaattccttttcagatttcataattcacagaatcagttaatagtttcagatatcattagaaaacttggaggattatctgccttaaaagcaaatgttattgattagaataagattgtcctgtaagaaaagaatttatgtagtttccccacattggaaaatcttttcatttgatctacgtaatagtgatctatttctgcatattacaaattacgcctataatccattagcttgaaataaatatgtcagtaattctgggcattggttttgcagggtgactttggaccagggcctctcagaagattgcaatcaaggtgctagccagagtgacagtcattgcatggcttgacttccatgctcactcacgtggcatttagaaggaagacttctgtcttcaatggaagctctcagcatggcagctgacttccttcacagcaaccaagaaaaagagaaagagagt

SEQ ID NO: 11507 - DNA, 741 bp, Homo sapiens
  misc_feature 1, 740, 741: n = A,T,C or G
ngcgtccgtagtatatacatatgtatgtctatgtatgattggtgtttgtgtattgttttttaggcccatcagttacccacatttcagagcctaggattagtttggcctttcttttgctcattccattttcatttgttctgtgtttgttttactttgaaaattcagcaaaacataggtgtgattgcagcatttacagttgcagtccttgctgcgggtatctcctttcattacttcagtgattagggtgaggcacaaagagtttcttgatcatccagagaacattgacagacaattatgaataataaagatgttaacaatccatctgtatttaaaacactagcagccagatctgctgccatgatgcctatttggtgtgtttctgattaaaatgaaatcacaagctgccttgtttagcctgctttacattgtaggtggcccgcatttccagaaataacgttatgcatctagatggaagctgcatgtaacaaatcattattatctatttttaaaagcttcaaaatgatgggatatgatcatagattttagtcttactaatctgaatcacatattaatcaggacattaaaaactttaacagaggcatgatggctcacacgtataatcctaatgctttgagaggctgaggtaggagcatcacctggggctgggagggagttggagaccagcctggatgacataatgagattctgcttcttctggaaaaaaaaaaaattagctggann

SEQ ID NO: 11508 - DNA, 694 bp, Homo sapiens
  misc_feature 1, 694: n = A,T,C or G
natagtctcgatctcctgacctcgtgatccgcccgtctcggcctcccaaagtgctgggactgcaggcgtgacaccagcgcccggccaacgtcattttcttttcaggagtcccttctgttatttagcaagacacactactacaatggagaaaaaagatgccccctccttcaagccctgagatcttcaggactttggcgaaaagtctgcgcccgaagagacccaggaaggattcttggaattgtagtccaaaggcatcccgccttctgcgcagactcacaagtccctgtggacggaattcttgaagtgtagcgccgctcagtccttccaccggaagtgtccgatcggaatcagccctgtccgagagatggctacagaaccaaagaaagctgcagcccagaactctccagaggatgaaggacttctgatagtgaagatagaagaggaagaatttatccatgggcaggacacttgcttacagagaagtgaactccttaagcaggagctctgcaggcagctttttaggcagttctgctaccaggattctcctggacctcgcgaggcactgagccgcctccgggagctctgctgtcagtggctgaagccagagatccataccaaggaacagattctggaactgctggtgctagagcagttcctgaccatcctgccaggagatttgcaggcctgggtaccn

SEQ ID NO: 11509 - DNA, 770 bp, Homo sapiens
agaacttaaagtcttagaatggaaaaagtaaagaaatatcaacttccaagttggcaagtaactcccaatgatttagtttttttccccccagtttgaattgggaagctgggggaagttaaatatgagccactgggtgtaccagtgcattaatttgggcaaggaaagtgtcataatttgatactgtatctgttttccttcaaagtatagagcttttggggaaggaaagtattgaactgggggttggtctggcctactgggctgacattaactacaattatgggaaatgcaaaagttgtttggatatggtagtgtgtggttctcttttggaatttttttcaggtgatttaataataatttaaaactactatagaaaggactacagagccccgaattaataccaatagaagggcaatgcttttagattaaaatgaaggtgacttaaacagcttaaagtttagtttaaaagttgtaggcgattaaaataatttgaaggcgatcttttaaaaagagattaaaccgaaggtgattaaaagaccttgaaatccatgacgcagggagaattgcgtcatttaaagcctagttaacgcatttactaaacgcagacgaaaatggaaagattaattgggagtggtaggatgaaacaatttggagaagatagaagtttgaagtggaaaactggaagacagaagtacgggaaggcgaagaaaagaatagagaagatagggaaattagaagataaaaacatacttttagaagaaaaaaaaaaaaaa

SEQ ID NO: 11510 - DNA, 1813 bp, Homo sapiens
  misc_feature 1, 2, 3, 4, 5, 1812, 1813: n = A,T,C or G
nnnnngagccttcaaaggacttgccccgagaatttcactcatttcaaagtttaacatctttacattttaatgaaaaagtagataatctatttgaaaagtacaaactcaattgcaatttcaagaaaaaaatatgtatttatataccataaataagcaaaattggactctgaagccctaatacttcaaaagcattcatcctattccataaaaacctagtattattcagcaacagtactactactgatttaaaaatagaaagcaagtctatcttcacatgtagttctttgtctttaatttgtacaactcaccaaggttattttcattcttagcacccggggttcaccagggtgtgatccaaagcaaaccagcataggtttttaacagaaaatctttgccaggaacttcatgacctgtattttcctcacctaggaagaagctgtccccactcgcatgattttgaacagtgtgttgatgttattgcttcgaattgcatcccgacaagcagtgatcacctggttctttggttttccaacccgcagacgacctgctctttgaattgcttgatttactgctttgaggtttcccaacagctctgtgtgattgttacagcgaattttatatccatttagcaagtctctattaaggtcatagagttccatataacgactcttcattgttttcatgtccctcatcagacgagcatcctcagctccgaccagcaaacttcggatcaaattagaatgatcagccatatcagcactgagcttctgatgcactgaatgatattcatccaccttaactagcacctttcgtaattcctcaaaatagacaggaaaatccgcttctacttgaaggtcttcaatagcaaaaaatgatgccattgactggatgatatcaccagccaaatcaatatcatcagtatttatagtgatctctccactaagttttatttttatatgcaggtggccgccattccgtaaagatgtgaaacacacttgaaatggagcattctgaatgtgagtgtcttctggtaacagaaagttctgaccgagccatacaacaaccctctgtgcccgttctgcaatggtaaagttaacataactgattggctcactggcagggtccaggctggtcagcgcatacatggagaatcgagggagctgtcttgtcgattcaaatacatgaaactgggtgctgcttctgtaacccacgaatgccttcaagtgcagatccacagggacatctttgggaggcacaatagggatgcagatggaactggagaggttgtgaatgctgggatgtaccacgtggctttcacctgtaaaaattccttctgcaaaaatcaatactgctcggatgatggtgtcattagaagtggaaatgcgtaattctgtatgagcagtttgggtctcattccccaggctgactgagagcgtggtgtggagcctggtattggctgggattatgccccgatgcccatcagcctcgttcagtggactggccaattcagccttggcattttcctcatagttacggagttccagcaacagattctgcttcttctgactcagctctcggatcaggtcctgctctgcactggtgtccatgaggttgcccctcatctcagccgtgccaggcaggtagccccggatttccccatccactgagcagcagattaactgtatgtggccatccatccggtaatctccctctaccacaccggcaattgcagaagaaaaattgtccttaaagatgacctccccagttcggtcacttcgagcatcaaccttccccattgggacaaacaggtcnn

SEQ ID NO: 11511 - DNA, 268 bp, Homo sapiens
acgcgggtgggctggccagtttttcatgcatgcagcttgacgattgagcacagtcaggcctttgtattaaaaatgaaaaatgaaaaaacaaattcaaaacctattcaaatgggttctagttcaatttgtttagtataaattgtcatagctggtttactgaaaacaaacacatttaaaattggtttacctcaggatgacgtgcagaaaaatgagtgaaggataaaccgttgagacgtggccccactggtaggatggtcctcttgtacct

SEQ ID NO: 11512 - DNA, 2923 bp, Homo sapiens
  misc_feature 1, 2, 3, 2900, 2901, 2902, 2920, 2921, 2922, 2923: n = A,T,C or G
nnnaagagtcgaacggaaagagaaggcgggtgcaattcccccggtgctctcttttctttttcaacccccccagtgtttttcctccttgccattgcattgcctccgggaagttccccatcgatccacgaaagttttttattttagggaacttagtaaagtaagtttttctggcttctagcctttacctttgactcagcccctcccaccaccagttcccagacaccgggactggggcatctgtacatgtaacagacactttcactgagtccaaattaggagcaaaaatacaaaggttcacattggtcttaggtagatacaggcgaaaaaggattgagctgtttagctcagaaacaaacaaaacaaagtttctaaagcaccactaaattatataaaaatcagaccatggacggattgaaactggtattctggtgaaatactttactattttgtaaaaagttttacaaaaaattacaaattaaaagtatcaaccctctgagttcaaagcagcattttgaaaatgaactggtagttaatcctgtaaccacccttagagttgtaagtggcccttgggaatagggatggatgggttccacctgtttgaaatcctcgaaaaccctcctaactccctgcctgtccccctccccgtcagcactgtccttgggaataaactgtcctttgtaagagtggtgacggtaaaatgaatttcagatgggttacacacactatcacttgtctacctgatgatccaccactaagaccaatgcccacttctctgatgctacccttcttgtgggattagcctcctgcaaagactctggaattggagtatcctactcttgcatttcctttttaacttaggatcccaaatgatcactttgtgccctgaggcccttcagaagatttttaaatggctgtgggacaagggctttgggagctccttttgggagaaggcagtccctctggtgagggtgagacagcagtgagcttagttcatcagaaccagctctttggtgccctccaagtcgggagtagggggaaggggttgaagctgcatcttttaaaacaaaagcaaaacaacaagttccctgactgagccagctaaatggaatcctgtttccatgcagaaacttgctcctgattctgccatctctagggcttcaggtgtagtttcactggaaaggaggagcccacccaagaggtggggtcgacatgatgaaatccattgtcctggaggggcctgggaggcccaatggactttaacaacatattctttcctttctcttgaaaacacattgaacctacgctcttgccgcagtactaaggcaggctggagggtggtcagttccaacagcttgaactcagaaaaacatgacttcaaactgtagcttatgctgatctttagatctaatccttgtgtgggtagggggagggagccccttccccagtctttctcactcctgtctgccaagaaatgcaaacggttcatgtctagcttgggtactgcctctgggaggagaagtgacacgttaagtaactgataccaggaattctagggtggcgattgtctctgccaggttttaacattaagattttcacaaataattgcctggggtaacatttttgcaaaagatcttactgattactttgtagtattgttcacacacaaaaataaatatttacacgaattcaaatgttgagtagtactgagcaggtggggccagatgtgtggatggctggggtgtgggagaggccttgggcactggaggttgtgctgtgctaagggtgagtctcaggtgtcctggccctgaccagaggcctggggattggtcagatggaaggcagaggtggtgtggctggatggggtattggaggccacttgagagataacgaccacccccaacctctaggggccggaagtaagcacggggtgggcaccctacctttcagagttctggacctgaggcaggatggggcatcctcactggtgcccccccatccctccttggggggagtctgccacagtgccgggaggcagtggccacagctgcaacaggcaattggctgcagaaaagctggtttgggaaggggtgcctgttctgggagcgagtggctctccgtggccatcctaggatccactcggccctggctcccctggggcctctctgctctgagggaggaaaggcaacagagggcttctgccagctctgggcaggggcgggcagcagagagctgctgtcatggctacggagtgttgcacggagaggccctgggggcctgctgaggtctgggcgagtccctggtttagcagcactggtaggtattgcactgagcaagaggaagtgcctatcaatcaatcaatcaatcagggaggaaggaaaccaggccagctttttctttttgccctttttcacactccagggattatgggtttcttccaggaccggcccctccggaagggctggtcttaggagaacccaagtggctcctccacttccactgatccctttactccaaacatggcgcaaggggatgggagctgcagcccgccctggagctcacggctgcctgatagccggggctcaccctgaagaagtggcccctcttggcaggagtgagtctgaggggccaggcctgtgcacagaagttcagacctggctcctgggcagcggggtgtgagggcaaggccctgccaaccggctgccatctcccagcagtccaaggccggtcaagcagctgagggccagagctgggagggcggcaggggctggttagggacaggacgctctctgggttccagctcctggacacccagtctggacttacttacctcccaggcagacacattgtgtgggggagttggggttacagctgttcagaacaggctcagggcacatcctggnnnaagcccacgctggagtgnnnn

SEQ ID NO: 11513 - DNA, 2315 bp, Homo sapiens
  misc_feature 2291, 2292, 2293, 2294, 2295, 2296, 2297, 2298, 2299, 2300,2301, 2302, 2303, 2304, 2305, 2306, 2307, 2308, 2309, 2310,2311, 2312, 2313, 2314, 2315: n = A,T,C or G
tccgctacagccggggagagccagcccggcctacagtgcggacacaggacagaggggagccaggttctttgcactgaccaatgctgagagcagaccctcggagcagccgggttggaagtgtctctccacagtcaccagacagatccaggataggatgggcagcccagtgcaccgagtgtcattgggggatacctggagcaggcaaatgcaccccgacatagagagcgagaggtatatgcagtcctttgacgtggaacggctcaccaacatccttgatggaggtgcccagaacactgcactccgcaggaaagttgagagcatcatccacagttacccggagtttagctgtaaggacaattatttcatgacccagaatgagcgttataaggctgccatgcggagggcattccacatccggttgatagctcggcgcctgggttggttagaagatggtcgtgaattaggctacgcttacagagccctttctggagacgtggccttaaatatacacagagtcttcgtgagagccctcaggagcctgggctcagaggagcagattgccaaatgggacccactctgcaaaaacatccagatcatcgcaacgtatgcacagacagagttgggacatgggacatatcttcagggcctggagactgaagccacctatgacgcagccacccaggagtttgtgatacacagccccacgctgactgccaccaaatggtggcctggagacttgggacggtcagccacccatgccctggtccaggcccagctgatctgctcaggagccaggcggggcatgcacgcttttattgtgccaatccggagtcttcaggaccacaccccactgccaggaatcatcattggggacatcggacccaagatggactttgatcaaacagacaatggcttcctgcagctgaaccatgtgcgggtccccagggagaacatgctgagtcgctttgcacaggtcttgccagatggcacctacgtcaaactcggtacagcacagagcaactaccttcccatggtggtggtgcgggtggagctgctgtcaggggagatcctccctatactgcagaaggcctgtgtcatcgccatgcgctactcggtcatccgccgccaatcccggctccggcccagtgacccagaggcaaaggtcctggactaccagacacaacagcagaaactctttcctcagctggccatcagttatgccttccatttcctggcagtcagcctcttggagttcttccagcactcctacactgccattctgaaccaagacttcagcttcctgcctgagctccacgcgctgagcacgggcatgaaggccatgatgtcagaattctgcacccagggagctgagatgtgccgcagggcctgtggcggacatggctactcaaagctgagtggcctgccatcactggtcaccaaattgtcggcctcctgcacctacgagggtgagaacacagtgctctacctgcaggtggccaggttcctggtgaagagctacctgcagactcagatgtcccctggctccacgccacagagatctctctctccatctgtcgcatatctcaccgcacctgacctggccaggtgtccagcccagagggcagccgacttcctctgcccggagctctacaccacggcctgggcacatgtggcagtaaggctcataaaggactcagtgcagcatttacagaccctgacgcaatccggagctgaccagcacgaggcttggaaccagaccactgtcatacacctccaggctgctaaggtgcactgctactatgtcactgtgaagggttttacagaagctctggagaaactagaaaatgaaccagcgattcagcaggtgctcaagcgcctctgtgacctccatgccatacatggaatcttgactaactcgggtgactttctccatgacgccttcctgtctggtgcccaagtggacatggcaagaacagcctacctggacctgctccgcctgatccggaaggatgccatcctgttaactgatgcttttgacttcaccgatcagtgtttaaattcagcacttggctgttatgatggaaacgtctacgaacgcctgttccagtgggctcagaagtcaccaaccaatactcaggagaaccctgcctatgaggaatatataagaccacttttacaaagttggagatccaagctatgaaataaccaacagtattcaagaagcaaccagcaccatcatgtgataatggtactatggcatatatgcaacattaaaattttaaattagatannnnnnnnnnnnnnnnnnnnnnnnn

SEQ ID NO: 11514 - DNA, 1145 bp, Homo sapiens
  misc_feature 1, 2, 3, 4, 5, 6, 7, 8, 9, 10, 11, 12, 1096, 1097, 1098,1099, 1100, 1101, 1102, 1103, 1104, 1105, 1106, 1107, 1108,1109, 1110, 1111, 1112, 1113, 1114, 1115, 1116, 1117, 1118,1119, 1120, 1121, 1122, 1123, 1124, 1125, 1126, 1127: n = A,T,C or G
  misc_feature 1128, 1129, 1130, 1131, 1132, 1133, 1134, 1135, 1136, 1137,1138, 1139, 1140, 1141, 1142, 1143, 1144, 1145: n = A,T,C or G
nnnnnnnnnnnnaccatttccggtctccttccatgtagcattacattgtggtgactcgggcctaaagaggcaatccgtttagaatgaatactcctcttgacgaccaagcagccattgaagtcaaggttcttaaatccgggtgaggagtaccaccagttaagaatgacaagaaggcttcaaaacttgctggcaaccaaagcctcaattgggaaaatgcttcgcctttcttactgaagctggtccatatcaagagcacatagagcgagatgagagtcagctcctgcccttaagtgggaggccccggcattgggacggaaccattgtaggacgttgggcaacgtttgcttcttgtcttagcggtgctcacagtgaacatgcctgcagattcatgtgaatctccatggacgctagctgcctgtggaggacatgttgaattggcagctctacttattgaaaggggagcaaatcttgaagaagttaatgatgaaggatacactcccttgatggaagctgcccgggaaggacatgaagaaatggtggcactactcttagcacaaggagcaaatataaatgcccagacagaagaaactcaagaaactgctcttactttggcttgctgtggaggattttctgaagttgcagactttcttattaaggcaggggctgatatagaacttggctgctccacacctctgatggaggcatctcaggagggacacctggaattggttaaatatttgctggcttctggcgctaatgtgcatgctacaacagcaacaggagacacagccttaacctatgcttgtgaaaatggacatacggatgttgcagatgttttacttcaagcaggggctgatttagacaagcaggaggaagaagactattttggagggcatagatccggccaagcatcaggtgagggtggcctttgatgcttgtaagctactacgtaaagaatagatgttgtaggtaaccagaactctggatatctgaattccagccaagaagttccaggaccctgctgggtgacaaaggaaatcctcttcaattgaaaaagattatgaagtcccaataaaaagagatttgtattgctggnnnnnnnnnnnnnnnnnnnnnnnnnnnnnnnnnnnnnnnnnnnnnnnnnn

SEQ ID NO: 11515 - DNA, 1246 bp, Homo sapiens
  misc_feature 1168, 1231: n = A,T,C or G
gagtcgacccacgcgtccggattgaggtgtgccctggtgcataaatagagactcagctgtgctggcacactcagaagcttggaccgcatcctagccgccgactcacacaaggcaggtgggtgaggaaatccagagttgccatggagaaaattccagtgtcagcattcttgctccttgtggccctctcctacactctggccagagataccacagtcaaacctggagccaaaaaggacacaaaggactctcgacccaaactgccccagaccctctccagaggttggggtgaccaactcatctggactcagacatatgaagaagctctatataaatccaagacaagcaacaaacccttgatgattattcatcacttggatgagtgcccacacagtcaagctttaaagaaagtgtttgctgaaaataaagaaatccagaaattggcagagcagtttgtcctcctcaatctggtttatgaaacaactgacaaacacctttctcctgatggccagtatgtccccaggattatgtttgttgacccatctctgacagttagagccgatatcactggaagatattcaaatcgtctctatgcttacgaacctgcagatacagctctgttgcttgacaacatgaagaaagctctcaagttgctgaagactgaattgtaaagaaaaaaaatctccaagcccttctgtctgtcaggccttgagacttgaaaccagaagaagtgtgagaagactggctagtgtggaagcatagtgaacacactgattaggttatggtttaatgttacaacaactattttttaagaaaaacaagttttagaaatttggtttcaagtgtacatgtgtgaaaacaatattgtatactaccatagtgagccatgattttctaaaaaaaaaaaaaataaatgttttgggggtgttctgttttctccaacttggtctttcacagtggttcgtttaccaaataggattaaacacacacaaaatgctcaaggaagggacaagacaaaaccaaaactagttcaaatgatgaagaccaaagaccaagttatcatctcaccacaccacaggttctcactagatgactgtaagtagacacgagcttaatcaacagaagtatcaagccatgtgctttagcataaaagaatatttagaaaaacatnccaagaaaatcacatcactacctagagtcaacttctgcccagaaactctaagtacacaacttncattagtaattaaaa

SEQ ID NO: 11516 - DNA, 1009 bp, Homo sapiens
  misc_feature 1, 2: n = A,T,C or G
nnactggaaagatgaactgatcatatggagatgtcagccttgtaaatcgaaaataaaattctaagccccccagtcaactgaacagactttccttttggccaaagagatcccccaaaacctgaaaataaactagttcaggaaggcagggggcaggggcggttggacatgtctcattacaccctcttccctctggaggttagacaaaattgactagtgttaacattaaaatagagatcttaaggactgacaaaacagactctgtagcaataagacaccaaattccaacctgattctagtgtaacatcacatgacagatagtgggtcctaaaggaaatcaaagtattttgctccaaaatatacttccctgacatattttgaaatgggcctgaaaagctatctcttgcgggggaagttatattctatagagactctccttcccctacgaggtcttttcaggagattttgacatcttttagctctaataagaaacatgcacatctattctctctgaactctgctacttggaggcttcatctacatgacaggaaccttggtttccacaactcgacctctcttaccttaccttaactcaagctgactcaactcttcaggaagagcttaattctttcaaccaattgccaatcaggaaatctttgactccacctatgacctggaagccccacactctacccggctttgagatgtcccacctttccaggccaaaccaacatataccttacatatattgatttatgtctttgcctgtaacttctgtcttcctaaaatgtatacaatcaagctgtaacccaaccgcctttgggacatgttctcagaacctcctgaggctgtgtcacaggccatgattttaaccttggcaaaataaacgtctaaattaagacctgcctcatactttttggtttatagcctcaaatggcattttaaggagatactcatgacatttgaactcacagcaatagcaacaggaagcagctacaaaattaactgtagt

SEQ ID NO: 11517 - DNA, 1187 bp, Homo sapiens
acttaactagggttagccgaggtcaggagggtggatgccttattatgggattagtgcccttctaagagggacagtagagggcttgttcatgctctctctctccatgcacaagaaagagcacacagtgagaaggaaagaggccctcaccagaacctgaccatgctggcaccgtgattgcagacttccagcctccaggattgtgagaagataaatatctgtggtttaagtcaccaagtctgtggtgtgttttatggcagcacaaggtaacccagatgatgcttttcaccactgggtggtccagcctttcatggaagctgtcagctcctcagccttgcaaaaaatgcttgctggtcactctctttggtcctttcagatgcctttcttagtggtgcctctaccaggcccttgacttcatccttttctgtcagaggaagggtgagtaaagtacctcctccctatgcatctgctgtgggaagtgtgggtaactcacagatgatgccacagggcatgtattcaggcaccacaggcagcagtgaatgaatgaagtgaaatggtatttatccatttcctggaaaggtccagggtttggctctgcagggccaagagaacagctttagctgtgccttaacccagtcctggagaagccagcaggccgtaatcacggggaggaaacccatcttttaagggctcctcgctcaggtggtgacaaggtgaggtggtcatctatgctgtctttatcagtatctgtcctaaatactgtgctctgacattgatgctaatattccatattatcagggcttctgtggtgtttaggcctctaatttttctcttcagtaaggggaataactttgctgtgtcagcgcagtgcctcaggagggttgcaatctagaaacagtgattgttaaaattgcctataaacacacaatataaacaatatgccacagacacagaggcccccagcatagtttctggaaggtgaagtctcacctctgccagagtagagtcacagtgggaattgaggcttggcatctgggtgcctctgaagctcttcctgtggctcctgttagacaattgaccccgaaacacagaagatagagattgcacattgcgttcagtaattgttgtttatttatgttatttctgaaaataaaagacagcacaggctgcttatctttaaaccacacagt

SEQ ID NO: 11518 - DNA, 600 bp, Homo sapiens
  misc_feature 600: n = A,T,C or G
actgccagaaaaacactgagagaaaaacactgaaattgaaaaacactttcaatttatttgaaagataactttcaaagaaattttcataactcaaatgtgtttcttttttccagagaagtatatcagagaattccctggtagcaatggacttctcaggccagaaaagcagagttatagaaaatcccactgaagccctttcagttgcggttgaagaaggactcgcttggaggaaaaaaggatgtttacgcctgggcactcacggtagccccactgcctcttcacagagctctgccacaaacatggctatccaccggtcccagccatggtttcaccacaaaatttctagagatgaggctcagcgattgattattcagcaaggacttgtggatggagttttcttggtacctgcccgggcggccgctcgacctgccataacccaataccaaacgcccctcttcgtctgatccgtcctaatcacagccagcctacttctcctatctctcccagtcctagctgctggccttactatactactaaacagaccggaaccttaacaccacctttttcgaccccgccggaggaagagaccccattctatan

SEQ ID NO: 11519 - DNA, 2419 bp, Homo sapiens
acgcgtccgcacagatgtagttttctctgcgcgtgtgcgttttccctcctccccgccctcagggtccacggccaccatggcgtattaggggcagcagtgcctgcggcagcattggcctttgcagcggcggcagcagcaccaggctctgcagcggcaacccccagcggcttaagccatggcgtgagtaccggggcgggtcgtccagctgtgctcctggggccggcgcgggttttggattggtggggtgcggcctggggccagggcggtgccgccaagggggaagcgatttaacgagcgcccgggacgcgtggtctttgcttgggtgtccccgagacgctcgcgtgcctgggatcgggaaagcgtagtcgggtgcccggactgcttccccaggagccctacagccctcggaccccgagccccgcaagggtcccaggggtcttggctgttgccccacgaaacgtggcaggaaccaagatggcggcggcagggcggcggcgcgggcgtgagtcaagggcgggcggtgggcggggcgcggccgccctggccgtatttggacgtggggacggagcgctttcctcttggcggccggtggaagaatcccctggtctccgtgagcgtccattttgtggaacctgagttgcaagcagggaggggcaaatacaactgccctgttcccgattctctagatggccgatctagagaagtcccgcctcataagtggaaggatgaaattctcagaacagctaacctctaatgggagttggcttctgattctcattcaggcttctcacggcattcagcagcagcgttgctgtaaccgacaaagacaccttcgaattaagcacattcctcgattccagcaaagcaccgcaacatgaccgaaatgagcttcctgagcagcgaggtgttggtgggggacttgatgtcccccttcgacccgtcgggtttgggggctgaagaaagcctaggtctcttagatgattacctggaggtggccaagcacttcaaacctcatgggttctccagcgacaaggctaaggcgggctcctccgaatggctggctgtggatgggttggtcagtccctccaacaacagcaaggaggatgccttctccgggacagattggatgttggagaaaatggatttgaaggagttcgacttggatgccctgttgggtatagatgacctggaaaccatgccagatgaccttctgaccacgttggatgacacttgtgatctctttgcccccctagtccaggagactaataagcagcccccccagacggtgaacccaattggccatctcccagaaagtttaacaaaacccgaccaggttgcccccttcaccttcttacaacctcttcccctttccccaggggtcctgtcctccactccagatcattcctttagtttagagctgggcagtgaagtggatatcactgaaggagataggaagccagactacactgcttacgttgccatgatccctcagtgcataaaggaggaagacaccccttcagataatgatagtggcatctgtatgagcccagagtcctatctggggtctcctcagcacagcccctctaccaggggctctccaaataggagcctcccatctccaggtgttctctgtgggtctgcccgtcccaaaccttacgatcctcctggagagaagatggtagcagcaaaagtaaagggtgagaaactggataagaagctgaaaaaaatggagcaaaacaagacagcagccactaggtaccgccagaagaagagggcggagcaggaggctcttactggtgagtgcaaagagctggaaaagaagaacgaggctctaaaagagagggcggattccctggccaaggagatccagtacctgaaagatttgatagaagaggtccgcaaggcaagggggaagaaaagggtcccctagttgaggatagtcaggagcgtcaatgtgcttgtacatagagtgctgtagctgtgtgttccaataaattattttgtagggaaagtaaaaaaaaaaaaaaaaaaaacaaaaaaaaaaacattttggcgcgccgcgccttcgggcccctcggaaacgagtttttataacacccttctggtgagggagcccgggggccccatgtagtggtataaggtgagaaagtgtggcaaaagagggtgtgttccctaaggaagaaccccggggccacaagcaaaataggggacgggagattctttcaccccaatattataaaaaaagaccgcgggggtgagaaacaacaggaaggcgttctgtgagacgacacactctccaaggagtgggaggtcccgagaggggcctcaatacagggggagactatctattaacaggggggggttcacaagggagagacgacgaaaataataaatatccggagctagtgtgtgtggtgtg

SEQ ID NO: 11520 - DNA, 1399 bp, Homo sapiens
  misc_feature 1, 2, 3, 4, 5, 6, 7, 8: n = A,T,C or G
nnnnnnnnttttttttttttatgctgtctctctctctctctttttgacagggaaaacagctatcaggtttctggaacattcttgaatagctaattcctggagtccttgtcctcacttcttctcctctgtacctcactggcatttgctccaagatctccttttcaaacaacgtcctggcactgagctgagatttccaaatgttaactccctggcatccatcctgtaggtgcagaaaggattcttccctgatttgcacacaaaccttttcatttcgatgcatatcagggtcatctcggctttgtgccttgcctacaaggtggtttggaggccatgtcccagagaacaaattaaagagattttcctcctccttttcagaacatctccccccagccactctcacctgggcatctggaaactcagtccttccaggctcttatttttacctccgtgggctgagtcccagggtggacactgacctacataccagcttttcagactcctttcaggaaggcctgcaaaatcctccagcagcttgcctgtgctgttctcatgcccttgctcaggggaaagcttgtctaaagctcctgtgatcaaaggacctttccttcccaggtgccactatcaatacaatttcagcagagcaccagggggcagtctacatgtctcctctgggtgaaggtgtgtcctcacctgcctgatatccattagtttccacattctctacctgattcttagaaacagaatttaaatggagcatagtaagagggggaaaagaggaaaagaaagaaacagaggtaaagagagaatccactcattcatcactcatccagccattccttccttcactcatgcattcatacaggctttttttagtgttactctatggagctgagaaaagtgttggggattcaaaggtgtaaatggtgcggtctttgccctccagaaactcaagactctactgaagaaagagaaagaattccaactgtgtataaacagagcctattacttaagtaattaaccaatgctgaagcaagattaggggttcaataaaaacttcctagaagaaatagcgacttagttgaatcttgatggaaacagaaattctatggtaggcctgcttgggtcagacaatgacaagtgctaaataaatgtgaacaaaatagactctgtctctggcatcctgtaatgtaaattccagagcagaacatgagaggtgtggttaggagaagagaggaggatcatagagtctagctgtagaggacaaacatgagttgccaattattgatgttcctatgtccctggcatcacattaaacacctcatatttaatctttacaatgacattatgtagcaggtattgttatttgcattttaaaagtaatactactaaaatttagatc

SEQ ID NO: 11521 - DNA, 305 bp, Homo sapiens
aagaattcgggatccaaaccagggaggtaaagacataacagaggagattatgtctggaggtggcagcagaaatcctactccacccataggaagacccacgtccacacctactcctcctcagctgcccagccaggtccccgagcacagccctgtggtttatgggactgtggagagcgctcatcttgctgccagcacccctgtcactgcagctagcgaccagaagcaaggaacgcctttttacccaagtcagccggtgtatcagtcagcacctatcatagtgcctacgcagcaacagccgcctccag

SEQ ID NO: 11522 - DNA, 1650 bp, Homo sapiens
  misc_feature 1647, 1648, 1649, 1650: n = A,T,C or G
agggcgaattggagctccccgcggtggcggccgacgtacgcgggggaggtgagtccggtcccttttgcatccctaccccgacactgcgggttgtcacaacggcaccctcccgctttctctctgcctcggatttagtcgtgactgtgtgtctccgccgtggtgcagcttcaggcctctcccgcatctactctctcacgcttccgctgcggcctgagggagggcggcgggcggaccacggaccggggttagcatacgtatcaaggacagtaactaccatggctcccgaagttttgccaaaacctcggatgcgtggccttctggccaggcgtctgcgaaatcatatggctgtagcattcgtgctatccctgggggttgcagctttgtataagtttcgtgtggctgatcaaagaaagaaggcatacgcagatttctacagaaactacgatgtcatgaaagattttgaggagatgaggaaggctggtatctttcagagtgtaaagtaatcttggaatataaagaatttcttcaggttgaattacctagaagtttgtcactgacttgtgttcctgaactatgacacatgaatatgtgggctaaagaaatagttcctcttgtataaataaacaattaccaaataaaaaaaaaacaaaaaacaaaatacacacaaaacccccaaaacatccaccaaaaaaacattgtgggggggcgccccgagaaattccaaacaccctgggggggggcgcccccaagaaagaacggccacagtgacacagaaagcgcgacacaaagggtgcttcacacaaaaagcggggcggggtggaaaacagggctcggctcggtccacgccctcaccccgcgccccccccacgaaacacagaaaaacccgcaggagcaacacacatgggggggaagaagaagagagagagaagagagagaagggacaggactacgcgagagacgagagagaacacagaacagaaagcagcagccagagaggcgaagagtaagaaaagaaagcaggaggaggcgcagagaaagacaggagagacagagaagaaggcaagagaaaggaagagaagagcaaagaggaggccaggaagaaagcagcgagagacagggagaggaacaggggaggagggaaagagagaggaaggagaaggagagagcggggaggggaggggagagagaaggagggaggagaggagagggaaagcgaggggggggagggaggaggagagaggggagggagagagaaagagaggcggagggagagggagaggagggagagcgagggggaggagagggggaggacagagcaggagggatgaggaggaagacggacaagcaagaagacgaggagacggagggagaggaggacggagagcggcgagagaaaggagcacgacacagaagaaacgcaagcgagagaaagaacgagacggagagacaaacgagaggagaagagagagcagagcggagaaggaaagaggcagacaagagccgtcgaggcaagaaccaacgcgaggacgaaaagaccgagacagacagaacgagagaagaggacaggagtccgagccacaacggcgaacacacggcaacgacaagaaggaagacaaacagaagagacgaagggagaggaagaggacnnnn

SEQ ID NO: 11523 - DNA, 1808 bp, Homo sapiens
  misc_feature 1799, 1800, 1801, 1802, 1803, 1804, 1805, 1806, 1807, 1808: n = A,T,C or G
cgcggtggcggccgaggtacgcgggggaagacatagctgcgggtggctgtgctggtggcgttcaagatgtcgaccaagaatttccgagtcagtgacggggactggatttgccctgacaaaaaatgtggaaatgtaaactttgctagaagaaccagctgtaatcgatgtggtcgggagaaaacaactgaggccaagatgatgaaagctgggggcactgaaataggaaagacacttgcagaaaagagccgaggcctatttagtgctaatgactggcaatgtaaaacttgcagcaatgtgaattgggccagaagatcagagtgtaatatgtgtaatactccaaagtatgctaaattagaagaaagaacaggatatggtggtggttttaatgaaagagaaaatgttgaatatatagaaagagaagaatctgatggtgaatatgatgagtttggacgtaaaaagaaaaaatacagagggaaagcagttggtcctgcatctatattaaaggaagttgaagataaagaatcagagggagaagaagaggatgaggatgaagatctttctaaatataagttagatgaggatgaggatgaagatgacgctgatctctcaaaatataatcttgatgccagtgaagaagaagatagtaatcacggacccatgagaggcgcacagtgggtccaattcggatttcagacaatcccccagtaagggaggcgcgtcagattctagggaactgtctcaacagctggcacaacgtcgcggtttcccaatttctttctctccttctgcatatcatctcttagatatcttatctctccggaccatacagcataccacatcacaaactcacaaaatcactcaacaacatcacacaacacacatacaccataacacacacgaacacaacacaacaacaatcaacacacaacaaacaacacaaatcacaataccaccaacacaacaaacacacacaaaccagagagtacagcgagagggggaagaggagacgcggagagaggagccgaggggggacggaggcagagcgaggcaggggaagagagcgggagcggagacggggggaggagagagggagacagcgcgagagccaggagaggcgagcgacgaggaacaggaggcacagagagaggagaggagaagaggagagcaaaggcagaaggcaggagagggaagacggaagaaggagagagagagaaggagacagagagggagggcgagagagacgaggacgagcagacaggagagagagaggaggcgcagaagggccagagaacacagccacaagaagagggcacagagaatcggacacagaccgcgagcagaacacgcaccgaggacgcacacgaggccgacggagcaggagccgagagagaggacgacgacacagagcgagagaaacgcaagccgcaagaaggaagcatcccagcaggcagcacacagaacgtcagcaggagacagaaaaggaacgtacggcaagcgcgaaaaacaacagggaagagaagcagaaacgagcagcgaagagaaccaggacgaagagacaagagagcacagcgccacagcacaaagcgaagacagcggaaagagagcagacaaggaagacgaacaaggagagagaggaggaagagaggagaaaacaggaaagagaacggacagaggaaggagaagagaaggagaagcgagagagagaacagcgcgaacgaaacaggcaagaccaaagacaaccaaagcacacccgcacgagagaacgcagaacaggacaccgcacagagagaaacagacannnnnnnnnn

SEQ ID NO: 11524 - DNA, 1811 bp, Homo sapiens
catagtaagtgaggagtacatttcttggtcttctcccttgaccactccaagtctctgatctaccagagatggcagtttatttcctctggaagaagccagtaatgaacacctgtctgttggctttgttcacagtcatggcagggggtctgtgtactgaggatgtcttcatgttaagctcctcttcactatctgtgcaggattcacctcgtgccgaattcggcacgaggaactagtctcgagtttttttttttttttttttaattcttcagctaaaacagcggaagaggtgatttattatatggttgttacactcggccacaaataaacacagaaatagtccagaatgtcacaggtccagggcagaggacccaacatgggcattttgtttatgagcaaggtgggtctcagaggtgatcggcgatcagagggcgatgaagttctagatccattgagacaagctctagacagtagcatgcagtcccacaacttgtaccagcatccccagcgtctggcattccatgtttctgctcctgtggcctccacggtgcaacaagctagcggtttacttggacctctgcctcatctttcttcttttgcgcttcagcctgcgcattcgcttcttcctccacttggctctcggccttagcgccatttttttggaaacctctgcgccatgagagccaaggtgagcggttcctggtagtaagcttgggaggtaggagttggcgagtagtagcggggagacgaagtggaggaagaagcgaatgcgcaggctgaagcgcaaaagaagaaagatgaggcagaggtccaagtaaaccgctagcttgttgcaccgtggaggccacaggagcagaaacatggaatgccagacgctggggatgctggtacaagttgtgggactgcatgctactgtctagagcttgtctcaatggatctagaacttcatcgccctctgatcgccgatcacctctgagacccaccttgctcataaacaaaatgcccatgttgggtcctctgccctggacctgtgacattctggactatttctgtgtttatttgtggccgagtgtaaacaaccatataataaatcacctcttccgctgttttagctgaagaggtgatttattatatggttgttacactcggccacaaataaacacagaaatagtccagaatgtcacaggtccagggcagaggaccaacatgggcattttgtttatgagccagatgggtctcaaaggtgatcggcgatcagagggggatgaagttctagatacaatgagacaagatctagaaagtagcatgcagtcccacaaattgtaccagcatccccagcgtctggcattccatgtttctgctcctgtggcctccacggtgcaacaagctagcggtttacttggacctctgcctcatctttcttcttttgcgcttcagcctgcgcattcgcttcttcctccacttggctctcatggcgcagaggtttccaaaaaaatggcgctaaggccgagagccccgcgtacttaatagatgagcttgcaatgaccatcacctcaattttttaaataacaccaagatccacaagccaaaataaacatttgattaaaaagttatgttattcaagataactcagtttcctttttctctttaaaattggaaggggctgggtctttaaaaacctgaagaggagttggtaagaggaaaaaatcctcaatgctttaaaaaactcaactggttagaagtccatacaactactatgctggcatggacagagatgtttcctgtcacagaactgttcactttcccatagaagt

SEQ ID NO: 11525 - DNA, 507 bp, Homo sapiens
  misc_feature 507: n = A,T,C or G
actttttttttttttttttttttttgaaggttgaatgcagggttttattgagtggtggaggtggttctctgaaggatggatgcagagctggaagcggggatggcacgggaagataatcttcctgctgggtggccaaacctctccgaccaccctcggctgaactcctctcggcgttcaaatgttcctcttctctctttctctgctgtatcgtttcaccattcatctgcttgttgcttggcgataggtgattgtctcgccgctcagctataggcgatggtctcaccactcggtgataggcgattgtcccatctaggtcgccaaaatgtgtctggaattggtgggttcttcgtctcactgacttcaagaatgaagccgcggacactcgcagtgagtgttgcagttcttaaaggcggcatgtctagagtttgttccttctgatgttcggatgtgttcacagattcttccttctggtggggttcatggtctcgctggctcaggagtgaagcn

SEQ ID NO: 11526 - DNA, 2460 bp, Homo sapiens
  misc_feature 2459, 2460: n = A,T,C or G
atttggccctcgaggccaagaagctaggtacgaggctggtttgaatcgggcgtggcatggaaacgaaagcggccaagtagagctccgtcctgacgcgccgcctcccgtgggctccggccggctaagccgcggcggacaactatgctgaaagccaagatcctcttcgtggggccttgcgagagtggaaaaactgttttggccaactttctgacagaatcttctgacatcactgaatacagcccaacccaaggagtgaggatcctagaatttgagaacccgcatgttaccagcaacaacaaaggcacgggctgtgaattcgagctatgggactgtggtggcgatgctaagtttgagtcctgctggccggccctgatgaaggatgctcatggagtggtgatcgtcttcaatgctgacatcccaagccaccggaaggaaatggagatgtggtattcctgctttgtccaacagccgtccttacaggacacacagtgtatgctaattgcacaccacaaaccaggctctggagatgataaaggaagcctgtctttgtcgccacccttgaacaagctgaagctggtgcactcaaacctggaagatgaccctgaggagatccggatggaattcataaagtatttaaaaagcataatcaactccatgtctgagagcagagacagggaggagatgtcaattatgacctagccagccttcacctgggactgccacatccccagtgaaatcagcatgtttctcggtgcagatctgaaatcacatccagctcctgatgttttcttctccctctgactgcagaggaagtgttcctacctgcaggaaggcacctgtcacacagggcgttcactcagaccatctgtgctctgccctgagttcagttgagaaaatcctattatcaaatttggatttcctggccccagaacttcccaaagacctgtaaaatggagggatttaccacctcacatatgtccagttaaacagtttgtggacttgtaaccgtcgcagcccaatgatacaacagtagtttaatcacgtgtattggcttgaatgtgattttcattccttgattcacccaacaaataccgactggctgagcacctgctgtgtgtgcactgctgttctagctgctgaccatagacagcataaatgaaaaagacagaaattcccaccttcgtggaactctccattttcctaaatgttaggttggtgcaaaactaatcgtggtttttgccatttttaatttttaatggcaggggccactattacttttgcaccaacctaataggccgattcagaaacttgagtgcaatgtcttggatatgcaaaaaagaaaatcaaaacgcattcttcattctctataagagttctaggcggggcgtggtggctcacacttgtaatcccagcactttgggaggccaaggtgggcggatcatgaggtcaggagatcgagaccatcctggccaacgtggtgaaaccccatctctactaaaaatagaaaaatcagctgggtgtggtgccgcgtgcctgtaatcccagctacttgggaggctgaggcataagaattgtttgagcctgggaggcagaggttgcagtgagccaagattgcgccactgtactccagcttgggcaacagagcaagactccatctcaaaaaaaaaagagttctagcccaggagcggtggctcacacttgtaatcccagcactttgggatgctgaggcgggcggatcacttgaggccaggagttcaagaccagcctggccaacatggcaaaatcccatctctactaaaaatacagaaattcacagggtgtgttggcacacgcctgtaataccagctactcaggtggctgaggcataagaattgcttgagcctgggaggcagagattgcactgagccgagatcgcgccactatactccagcctgggcaacagacatcctgtctcaaataaattacattaaatgtttaagaagaagtctaaataagtttcatatgctgccctccctcagataatgagggaacctggggtacttaaaatgccaaatgaacgtatacttgatccttattcatagattttgtatttgagaatttgcctactcactaaaatatgtttgtaacccccaaatcaatactgtggcactttctcagttattcgcagacacacagagacaaaaaatttgaagtgcctggctgggcgtggtggctcacgcctgtaatcccagcactttgggaggccgaggcaggcggatcacaaggtccagagatcgagaccatcctggccaacatggtgaaaccccgtctctactaaaaatacaaaaattagctgggcatggtggggcatgcctgtagtcccagctactcagaagggtgaggcagaattgcctgaacccgcgaggcggagactgcagtgagccgagatcgcaccactgcactccagcctggtgacagann

SEQ ID NO: 11527 - DNA, 4552 bp, Homo sapiens
  misc_feature 1, 2, 4551, 4552: n = A,T,C or G
nngcaacctccgcctcccgggttcaagaagtttccctaccttaggctcctgagtagctgggactacaggattacagtttaaagacaatttctgtgatcaagttgtcatttggaagattaaaccgcgttcacgaggacttggagcctggtccttgctttgaggaagccgtggcttgtttcaagaagccacttctgatctaagaatctacccagcatgcctaatcaaggagaagactgctatttttttttctattccacatgtaccaaaggcgacagctgcccattccgtcactgtgaagctgcaataggaaatgaaactgtttgcacattatggcaagaagggcgctgttttcgacaggtgtgcaggtttcggcacatggagattgataaaaaacgcagtgaaattccttgttattgggaaaatcagccaacaggatgtcaaaaattaaactgcgctttccatcacaatagaggacgatatgttgatggccttttcctacctccgagcaaaactgtgttgcccactgtgcctgagtcaccagaagaggaagtgaaggctagccaactttcagttcagcagaacaaattgtctgtccagtccaatccttcccctcagctgcggagcgttatgaaagtagaaagttccgaaaatgttcctagccccacgcatccaccagttgtaattaatgctgcagatgatgatgaagatgatgatgatcagttttctgaggaaggtgatgaaaccaaaacacctaccctgcaaccaactcctgaagttcacaatggattacgagtgacttctgtccggaaacctgcagtcaatataaagcaaggtgaatgtttgaattttggaataaaaactcttgaggaaattaagtcaaagaaaatgaaggaaaaatctaagaagcaaggtgagggttcttcaggagtttccagtcttttactccaccctgagcccgttccaggtcctgaaaaagaaaatgtcaggactgtggtgaggacagtaactctctccaccaaacaaggagaagaacccttggttagattgagtcttactgagagactggggaaacgaaaattttcagcaggcggtgacagtgatcctccattaaagcgtagcctggcacagaggctagggaagaaagttgaagctccagaaactaacattgacaaaacaccaaagaaagctcaagtttccaagtctcttaaggagcgattaggcatgtcagctgatccagataatgaggatgcaacagataaagttaataaagttggtgagatccatgtgaagacattagaagaaattcttcttgaaagagccagtcagaaacgtggagaattgcaaactaaactcaagacagaaggaccttcaaaaactgatgattctacttcaggagcaagaagctcctccactatccgtatcaaaaccttctctgaggtcctggctgaaaaaaaacatcggcagcaggaagcagagagacaaaaaagcaaaaaggatacaacttgcatcaagctaaagattgatagtgaaattaaaaaaacagtagttttgccacccattgttgccagcagaggacaatcagaggagcctgcaggtaaaacaaagtctatgcaggaggtgcacatcaagacgctggaagaaattaaactggagaaggcactgagggtgcagcagagctctgagagcagcaccagctccccgtctcaacacgaggccactccaggggcaaggcggctgctgcgaatcaccaaaagaacagggatgaaagaagagaagaaccttcaggaaggaaatgaagttgattctcagagcagtattagaacagaagctaaagaggcttcaggtgagaccacaggagttgacatcactaaaattcaagtcaagagatgtgagaccatgagagagaagcacatgcagaaacagcaggagagggaaaaatcagtcttgacacctcttcggggagatgtagcctcttgcaatacccaagtggcagagaaaccagtgctcactgctgtgccaggaatcacacggcacctgaccaagcggcttcccacaaagtcatcccagaaggtggaggtagaaacctcagggattggagactcattattgaatgtgaaatgtgcagcacagaccttggaaaaaaggggtaaagctaaacccaaagtgaacgtgaagccatctgtggttaaagttgtgtcatcccccaaattggccccaaaacgtaaggcagtggagatgcacgctgctgtcattgccgctgtgaagccactcagctccagcagtgtcctacaggaacccccagccaaaaaggcagctgtggctgttgtcccgcttgtctctgaggacaaatcagtcactgtgcctgaagcagaaaatcctagagacagtcttgtgctgcctccaacccagtcctcttcagattcctcacccccggaggtgtctggcccttcctcatcccaaatgagcatgaaaactcgccgactcagctctgcctcaacaggaaagcccccactctctgtggaggatgattttgagaaactaatatgggagatttcaggaggcaaattggaagctgagattgacctggatcctgggaaagatgaagatgaccttctgcttgagctatcagaaatgattgatagctgaaggtggtagtgaggacactttaaaaaaaaaatcgccaaaaaactggacttagtttcatctattgtaacatttacctgagatgatcatttctttagtctagaatttgccccaaatcagaagtatacctctgaattatctgtatgtgtcctggattccttggggtcagatttttaaagttactttataaccattttgtccatttgatgccattgtttatcatcttttgagaaaaaagttctgtcatacccttctctccacaaaaaagagactgagagggagatcaagtgaaagggtgcaagcgaacttagtgactccttgaggtgtttgtcagttttggcttttttcttctttgttgtattctttatgtattgtcttgatgtacttaatattacctgagtttgaaatggatgaagacagctgctaccattaaggaccaaattttatgctaccactaaacaaaaatacccactcagtctgtgttaaattgtatgtctttttaaaggtatttaaagattcaactaagctttaaagagggctgagcagctcaggaagcctgtaatgtgggcataactctttggacctgatcttgatgcttctgctgctctgttagcctctgaagagcaatatctaatttattattactgtaattttttaaaaggctttaaagtgcctcaggggtcccctgaaactaattttctatttctgggattccctggattcattatatgagatggtgacatgattagaggaattcttttttagtatgaaaattgtcccttttcttcttcagtacttgcctccttgctggcattgaattaacacagggacaaaatttggttaattttttatttctaactctcccaacaaacccctgttgcccagtatttgtttggtggcctttaaccacctgagggaaaaaatgagcttattcaagctgccaatatttatctatgggctgtagcagtacactgaattgtactgtgccagggatattgagatgctctgggggtgtattgtatacctgccagttttcttcatttctgaattgagttttcttttcttgatgttggtttccttcatatcacctcaaggtttagatttgtgaaggaataagcatgatggaaataatagtcttgaaaggagatatgttgtatataatcaggaggaagaggaaggaaggacttacccattttgatattttgctgtaggtggccagttttgtttctcatagggaaatctgacccacctgtcatgttggctcctaaggaactgctgttgtaagcggctcatcaagagttgaacttcacgtagccttgttgggaatatggaaaaggaagaaagccacaggactgcccattcagtcttgggaagattgggatgattctgcacaagcaaaaatgactgaagtttatgtatagacacacctctaccaatccatcttcagctgactgaatgttgtatgatagcccttctccaaagcagaggtagaatgttcaggtttcaccatggattttctacttatttcgtttttggaatcaccttacagattccaggtcccttttgtatatattctttattcttttgcttttttaaaaaataattttgtttcatatttaaagcacttgtattagtcaatgtttcgtgttccgcattatttgaaccatttgcccttacagaaagagaaatacttgtttgtgttttaaataaaactgatgtaggaaagtcaaaaaaaaaaaaaaaaaaaaaaactaaaacttaaaaaaaaaaaaaaaaaaaaaaaaaaaaaaaaaacacaaaaaacagagaataataaaccaaaacaattcgacataaccggggggcggcgtttattattcataaaaaaaaagacccccctattcccctttaatttattaataaaaacann

SEQ ID NO: 11528 - DNA, 926 bp, Homo sapiens
  misc_feature 1, 2: n = A,T,C or G
nncggcgaattggtgctccaccgcggtcggcggccgaccggccaggtactcgggtcaagaaacccatctcacgtgcatttccatacataggctcaaaataaaggaatggagagatatttcaagcaaatgcaaaacacaaaaaatcatgtgtagcactcctattttctgacagaacagactataccaatcaagataaaaaaagagaaggacattacataggtggtcctgacctttgataaatctcattattgcttgataccaacctgggctatttgtattgcccacaccaataggataatttgctgacgttgaggagcttctccccttcacacagtccctgatctccgaaaatttggttgagatgtaaggttgattttgctgtacaattccttttttgaagttttactcatttccaacaaggaaggcaagttttcctgcttccattgacaaaggagagcaggcacctcctttcctgagtttcagcttgcttctgacagggaaggtgagtgtaagtttttccagcttctaagatggcagagaatgatcacccagtctgagccttatttccaggtaagtagctgaattagagttttgtcttaaaatttttccttaatgactaaaatttaagattacccaccagctgcttttaattcctccttaccattagaacactcagttaatcatatgaattgtgcattggttggttttgcttaactccttttggttatggtttggggtttattgttgctgtttcacttctctcccatctcttcctgacttgggcaaatccaaaggaatgttccaaattgtggggagcaaggcatctgaattggctaaaactcctgtggctgccaaacaaaacccaaccaaccaaccaaaaaaacaaacaataaaaaaaaggaaaaagaaaaaaagtacctgcccgg

SEQ ID NO: 11529 - DNA, 935 bp, Homo sapiens
  misc_feature 930, 931, 932, 933, 934, 935: n = A,T,C or G
accacaccagcctcagaacccgctccactggccccccatgaggaccaccagcaaagggagaccaaagagaatgaccccatggacagccatcagtcccaggaatccccaaacctggaaaacatagcaaaccccctagaagaaaatgtaacgaaagaatcaatcagtagtaaaaaaaaggaaaaaaggaaacatgtggaccacgtagaaagttcactatttgtagcaccaggaagtgttcaatcctcagatgacctagaagaagacagtagcgactacagcattccttccaggactagtcacagtgactccagcatttaccttcgacgacatactcataggtcttcggaatcgcccagagctttgaaattactggcatgcaacagctatacttttggatagaagacaagcagattggaaccttatcattaagcacagtccgatcggatatccggtttgggcaataagagatgtaaataaagtgaggattttaaagcccaaaggcctccttgctataaaaacgcacccaaaacgcctcacctggaccccgcgcgcacccagaaggatcacgttcagagacagaggtgcaacatgagtcaagagatttcatctttactaattgggttgcgggggcttttgtttataaatttcactgtaggatcattttagctatgttcagttgaggaacgcagcagatctggatgacagaagaaaccgaatattaaccaggaaggccaacagctcaggagaagccatgtcactggggagccacagcccgcagagtgactccctgacacagcttgtccagcagccggatatgatgtattttattctcttcctgtggctcctggtgtactgcttgctgctcttcccacaactggatgttagcaggctctgatacgtgtgtctggataataaaaaagacaggacccnnnnnn

SEQ ID NO: 11530 - DNA, 875 bp, Homo sapiens
  misc_feature 1, 2, 3, 4, 5, 6, 7, 8, 9, 10, 11, 12, 13, 14, 15, 16, 17,18, 19, 20, 21, 22, 23, 24, 25, 26, 27, 28, 29, 30: n = A,T,C or G
nnnnnnnnnnnnnnnnnnnnnnnnnnnnnnggttttggttttaggaatagtcattatgactaggggaaaataatatttcattgtggttttgatttgcatttatataatgattagtgatgttgagcattttttcatatatcttttggccttttgtatgtcttcttttgagaaatgtctatttatatcctttggccactttccagtggaatttttttttcctgttgagttgtttgggtttttggtaaattctaggtattagtccactattagatgaacagtttgcaaatattttcttccattcaggaggttgtctcttcactctgctgattatttcttctgctgctcagaagctttctaagttaattaagtcccatttgtctatttttatttgtgttgcttgtggcttttgaggtgttagtcataaattctttgcctagacaaaaggccaggaaatttttccctaggttttcttcaagtatttttatagtttcaggtcttctgtttaagtttttaatctactttgagttgattcttgtatatagtgagatagtggtccagtttcatttttctggatgtggctatccaattttcccagcaccatttattgaagagtgtgtcctttccccagtgtcagctttgttgaagatcaaatcataatgtagaatccgtggaaactctgagcttatttttctgcaactagatggtctcatctgggggcaaagtgagacagtgacatatcatcaggcattagattctcatatgaagcacacaacctagatccctcagatgagcagttcacaacagggttcatgctcccacggggtacctgcccgggcggccgctcggccaccgcggggagctccattcgccctata

SEQ ID NO: 11531 - DNA, 1631 bp, Homo sapiens
  misc_feature 1571: n = A,T,C or G
acgcggggattcattgcccctgtaacctgtcaaagaagagctaagggagctttcggggttggcttcttggaggctgctttctcctttacttggaaggcttcgctagtgatggacccatacatgattcagatgagcagcaaaggcaacctcccctcaattctggacgtgcatgtcaacgttggtgggagaagctctgtgccgggaaaaatgaaaggcagaaaggccaggtggtctgtgaggccctcagacatggccaagaaaactttcaaccccatccgagccattgtggacaacatgaaggtgaaaccaaatccaaacaaaaccatgatttccctgtccattggggaccctactgtgtttggaaacctgcctacagaccctgaagttacccaggcaatgaaagatgccctggactcaggcaaatataatggctatgccccatccatcggcttgctatccagtcgggaggagattgcttcttattaccactgtcctgaggcacccctagaagctaaggacgtcattctgacaagtggctgcagccaagctattgacctttgtttagctgtgttggccaacccagggcaaaacatcctggttccaagacctggtttctctctctacaagactctggctgagtctatgggaattgaggtcaaactctacaatttgttgccagagaaatcttgggaaattgacctgaaacaactggaatatctaattgatgaaaagacagcttgtctcattgtcaataatccatcaaacccctgtgggtcagtgttcagcaaacgtcatcttcagaagattctggcagtggctgcacggcagtgtgtccccatcttagctgatgagatctatggagacatggtgttttcggattgcaaatatgaaccactggccaccctcagcaccgatgtccccatcctgtcctgtggagggctggccaagcgctggctggttcctggctggaggttgggctggatcctcattcatgaccgaagagacatttttggcaatgagatccgagatgggctggtgaagctgagtcagcgcattttgggaccctgtaccattgtccagggagctctgctcaagtccaatgctgatctctgttatggggcgttggctgccatccctggactccggccagtccgcccttctggggctatgtacctcatggttggaattgagatggaacatttcccagaatttgagaacgatgtggagttcacggagcggttagttgctgagcagtctgtccactgcctcccagcaacgtgctttgagtacccgaatttcatccgagtggtcatcacagtccccgaggtgatgatgctggaggcgtgcagccggatccaggagttctgtgagcagcactaccattgtgcctgaaggcagccaggaggagtgtgattaggcctgcaatccattctccctgaggattgcgtcccaatctaggtgaaggcctggactagggcctggcgggctccttcagggactcagagtggcgctaactggtaataagggccccctctgccaccattcgtcaagggattctaaggattgggtcnctggcttttataccccaagcgactctcatcacttctcctacgatctccagattctctccg

SEQ ID NO: 11532 - DNA, 728 bp, Homo sapiens
  misc_feature 1, 2: n = A,T,C or G
nnaataatccataaagaagaactgtatactttaaaaatttcaagccgacaccagcctggcatctacaaccttcttttcttttctcgttctgctaccatcccatcctgtggttatttccctacaactcacagactaagcaataaacttcaccactagaaccttgttaagcaagagaaaactactacaggtctttcacacagaataggaaaaaggctaagtgtgagctgtgttttcagtcttcagataccccagcaaagaacaagcagcaggtacccaaaccgcaggtgaacaccgcagtctgtttctggtctgatagtcacaaatgtatttgtaactctcctccccaagctgggccaattgcccttggctttcagctcacccaaacctttagtcctacagggccttggtctcctctccaaataagaggacggaattgtccttaaccttcatgctacacctggtaggatataaggagacacacaggagcatcctagtttctatccattgcatggtaacagccccatttacccttggcaaccaggactaactccagccaactctgtggcccccatctgttgcctgttaacctagtgggatgaggagccagctattatcaggtgacactcctcacttccaatggcctttctggaagcactcctttcccttggagaaggcaacagaacacaatggttaagagtcaggctttgcagtcgtactcggccgccacg

SEQ ID NO: 11533 - DNA, 1549 bp, Homo sapiens
  misc_feature 1, 1546, 1547, 1548, 1549: n = A,T,C or G
nactacgcggggtttaacaggcagcatccaccgcaggcttactgtacacatgctagggtccaggacagcaggaccaagccagcagaaacagcctgagcccaccgcagactggcctggctatactggacaatgccactcctcctgtacacctgtcttctctggctgcccaccagcggcctctggaccgtccaggccatggatcctaacgctgcttatgtgaacatgagtaaccatcaccggggcctggcttcagccaacgttgactttgccttcagcctgtataagcacctagtggccttgagtcccaaaaagaacattttcatctcccctgtgagcatctccatggccttagctatgctgtccctgggcacctgtggccacacacgggcccagcttctccagggcctgggtttcaacctcactgagaggtctgagactgagatccaccagggtttccagcacctgcaccaactctttgcaaagtcagacaccagcttagaaatgaccatgggcaatgccttgtttcttgatggcagcctggagttgctggagtcattctcagcagacatcaagcactactatgagtcagaggtcttggctatgaatttccaggactgggcaacagccagcagacagatcaacagctatgtcaagaataagacacaggggaaaattgtcgacttgttttcagggctggatagcccagccatcctcgtcctggtcaactatatcttcttcaaaggcacatggacacagccctttgacctggcaagcaccagggaggagaacttctatgtggacgagacaactgtggtgaaggtgcccatgatgttgcagtcgagcaccatcagttaccttcatgacgcggagctcccctgccagctggtgcagatgaactacgtgggcaatgggactgtcttcttcatccttccggacaaggggaagatgaacacagtcatcgctgcactgagccgggacacgattaacaggtggtccgcaggcctgaccagcagccaggtggacctgtacattccaaaggtcaccatctctggagtctatgacctcggagatgtgctggaggaaatgggcattgcagacttgttcaccaaccaggcaaatttctcacgcatcacccaggacgcccagctgaagtcatcaaaggtggtccataaagctgtgctgcaactcaatgaggagggtgtggacacagctggctccactggggtcaccctaaacctgacgtccaagcctatcatcttgcgtttcaaccagcccttcatcatcatgatcttcgaccacttcacctggagcagccttttcctggcgagggttatgaacccagtgtaagagaccacccacccagagcctcagcactgtctgactttgggaaccagggatcccacagaaatgttttggagagcgggaggtttcccccaatctcctccaagttcttctccctccaaccagagttgtgtctaactttaggcatcttttaataaatgtcattgcgactctgaaaaaaaaaatctaacaaaaaaataaagtnnnn

SEQ ID NO: 11534 - DNA, 620 bp, Homo sapiens
tagggcgaattggagctccactcgcggtggcggccgaggtacgcgggattcatcacttggatgagtgcccacacagtcaagctttaaagaaagtgtttgctgaaaataaagaaatccagaaattggcagagcagtttgtcctcctcaatctggtttatgaaacaactgacaaacacctttctcctgatggccagtatgtccccaggattatgtttgttgacccatctctgacagttagagccgatatcactggaagatattcaaatcgtctctatgcttacgaacctgcagatacagctctgttgcttgacaacatgaagaaagctctcaagttgctgaagactgaattgtaaagaaaaaaaatctccaagcccttctgtctgtcaggccttgagacttgaaaccagaagaagtgtgagaagactggctagtgtggaagcatagtgaacacactgattaggttatggtttaatgttacaacaactattttttaagaaaaacaagttttagaaatttggtttcaagtgtacatgtgtgaaaacaatattgtatactaccatagtgagccatgattttctaaaaaaaaaaataaatgttttgggggtgttaaaaaaaaaaaa

SEQ ID NO: 11535 - DNA, 2251 bp, Homo sapiens
acgcgtccgagtgattccactgcctcagcctcctgagtagctgggattacaggcacctgccaccacacccaactaatttttatattttagtagagacggggtttcaccacgttggctaggctagtcttgaactcctgacctcaagtgatccgcctgccttggcctcccaaagtgttaggattacaagtgtgagccaccgagcctggccaagatagtttaaaaaaaaaattatatctacattaaagccacaagtcaccctttgctgaagtcagtattagtagttggaagcagtgtgttattcttgaccccatgaagtggcacttattaagtagcttgcttttccataattatggcctagctttttaaaacctactatgaacaccacaagcatagagttttccaaaagttcaagaaggaaaggaaaccaattatactgaatcaggtagattcttaactgaaataattagatgttttaatagcctcttatgaactttcttccagaaccaaaaacttttgctagaaaatcagcttttacgagagaaaactcatggccttgtagttgagaaccaggagttaagacagcgcttggggatgggatgccctggttgctgaagaggaggcgggaagccaaggggaatgaagtgaggccagtggccgggtctgctgagtccgcagcactcagactacgtgcacctctgcagcaggtgcaggcccagttgtcacccctccagaacatctccccatggattctggcggtattgactcttcagattcagagtctgatatcctgttgggcattctggacaacttggacccagtcatgttcttcaaatgcccttccccagagcctgccagcctggaggagctcccagaggtctacccagaaggacccagttccttaccagcctccctttctctgtcagtggggacgtcatcagccaagctggaagccattaatgaactaattcgttttgaccacatatataccaagcccctagtcttagagataccctctgagacagagagccaagctaatgtggtagtgaaaatcgaggaagcacctctcagcccctcagagaatgatcaccctgaattcattgtctcagtgaaggaagaacctgtagaagatgacctcgttccggagctgggtatctcaaatctgctttcatccagccactgcccaaagccatcttcctgcctactggatgcttacagtgactgtggatacgggggttccctttccccattcagtgacatgtcctctctgcttggtgtaaaccattcttgggaggacacttttgccaatgaactctttccccagctgattagtgtctaaggaatgatccaatactgttgcccttttccttgactattacactgcctggaggatagcagagaagcctgtctgtacttcattcaaaaagccaaaatagagagtatacagtcctagagaattcctctatttgttcagatctcatagatgacccccaggtattgtcttttgacatccagcagtccaaggtattgagacatattactggaagtaagaaatattactataattgagaactacagcttttaagattgtacttttatcttaaaagggtggtagttttccctaaaatacttattatgtaagggtcattagacaaatgtcttgaagtagacatggaatttatgaatggttctttatcatttctcttccccctttttggcatcctggcttgcctccagttttaggtcctttagtttgcttctgtaagcaacgggaacacctgctgagggggctctttccctcatgtatacttcaagtaagatcaagaatcttttgtgaaattatagaaatttactatgtaaatgcttgatggaattttttcctgctagtgtagcttttaattgcatgggtagttttaaataaatggagaaagcacctttcagaagctacactagcaggaaaaaattccatcaagcatttacatagtaaatttctataatttcacaaaagattcttgatcttacttgaagtatacatgagggaaagagccccctcagcaggtgttcccgttgcttacagaagcaaactaaaggacctaaaactggaggcaagccaggatgccaaaaaggggaagagaaatgataaagaaccattcataaattccatgtctacttcaagacatttgtctaatgacccttacataataagtattttagggaaaactaccacccttttaagataaaagtacctgcccgg

SEQ ID NO: 11536 - DNA, 3283 bp, Homo sapiens
  misc_feature 1, 3283: n = A,T,C or G
nacccgcgtcctgtgggctggagaggtcctgccgtggtaccagcctccagcctgcccccaggactgcccctgacccaggcgcgcccgctgctcggtggcaggagggccggcggagcgccatggcctgcatcctgaagagaaagtctgtgattgctgtgagcttcatagcagcgttccttttcctgctggttgtgcgtcttgtaaatgaagtgaatttcccattgctactaaactgctttggacaacctggtacaaagtggataccattctcctacacatacaggcggccccttcgaactcactatggatacataaatgtgaagacacaagagcctttgcaactggactgtgacctttgtgccatagtgtcaaactcaggtcagatggttggccagaaggtgggaaatgagatagatcgatcctcctgcatttggagaatgaacaatgcccccaccaaaggttatgaagaagatgtcggccgcatgaccatgattcgagttgtgtcccataccagcgttcctcttttgctaaaaaaccctgattattttttcaaggaagcgaatactactatttatgttatttggggacctttccgcaatatgaggaaagatggcaatggcatcgtttacaacatgttgaaaaagacagttggtatctatccgaatgcccaaatatacgtgaccacagagaagcgcatgagttactgtgatggagtttttaagaaggaaactgggaaggacagagtccagtctggctcatatctcagcacagggtggtttaccttccttctggccatggacgcctgttatggcattcacgtctacgggatgataaatgacacctactgcaagacagaagggtatagaaaagtcccctaccattattatgaacaaggaagagatgagtgtgatgaatattttcttcatgaacatgccccatatgggggtcataggtttatcactgaaaagaaagtgtttgctaaatgggccaagaagcacaggataatatttacacatccaaactggacattgtcttgataatggttttcctgatcttgccgcatcacttaatgtgatccccatactgcaactgtgatgctgatgatgctaatggagatgatggtaatgataaagacaacaacaatgattatcaagttcctgtacactctcagatgtggatggtgactctgctagtaatttaaacttggcatttcatggaggatggttgtgctcatgatgttctttctggaggttcaacactacgtaccgcactttataatttaactggaattgagatgaaggccagtgacatgacaactgtgacctaagaaatgggaagattatctttcaagatagctgcctagaattgttcaacagtgagtaacttccagaagccaaaagagtttggcttcatgaggcaaggtgattgactcaatggcttgttgaatctcagcagttccgccatcttgaagaatgattgattgtcaaacactgacccaagaactgctatcagggtgcaagtatcttactacttagcctaacgatgggaaaatatatcttcctaatataccatctttctacagtatttcctacagctaaagcctcaggccgttgcctaattaacaatgagaatttcatggacatcctacacttcaggattacttgactatctcaaacacataaatcaaaatgggccaagtagcaaatcttgatgaatttccactcttaccatccattcttactaccaacagtataactgaacatgtgattagaatgatctatattaatgtttaggtatttttggttgagtgctaaatatttcagaaggctacttaacatgtaagataccaacttcaacactgtaataacatatactgtgaaaacattcctaaaaagtaaccaaagggtttgctaactctgcttcaacatccaacaacacaaaactatatgatttttaaaatcatgaaatagagacagcaaagcatatttttacatcaatttgtatcctatcatacttcataatatatatttgtatattcaaatttctattttataggcccaaggtgtgtttctccaaacattacattctcattgccaagtgccagctgttacacatggagaggaaatgattccttatattaaacctgaccagagctttttgccttctagggatttatttttcccatagtgtatcagttgttatgccacaataacaacaataataatgttcttaatgtccaaagtgctttgtcatttagagtcctttaacatctgttataccatgtgatgcccttgaacaccccattgggctattgtctgtgtattctgctctctttagcagatgatctgtaatttggtcattgttctgttatattccagattgctctacttgctaatatttgtatagaatagaatttatgtaaactagtaaccagttgatctctgtgccaaatacattatatcaggattacacaaaaagtatcacaaaggatggtcttggccatatgctagggcccctgtgaaaataagtagttttgaagaagtttttccaatatacgtatatatacacgtgtggttcctatttaggtggggaaaaaatgaaaaagcagggacaacaggaggaaatgaaggcagagaaatatagtttcctttcctaggattgagacaattctatttttcatatactcgttgctcattaaatagtaaagggttgatttgctgcaagagtagctgagaattcaaaaacatccttgcagaatgattcaaaagacaaaagccaggctcaacttatagaatgttttggaaactggaagtaatgatacatttcacttcagaagcacttgtaggtctttactagtgctaagtattatggtgagctatcattaaagtgtgccatcttggataaaggccttttgcctactctcttctgcaattttgacacctcaatattcacacccataaacattactaagccccagttctatcgttggaaggagttgttattcttttgttgttcccttatgcaatttttaattctatgaatgttaagtttttttgagctaatgatagatagaaatgcccactcaaagaaaaataaacagagacaaatgttaaaattgccatacagactgtttttccccctgttgtttcactttaaaataaaaagaaatccttgattaatccggaaaaaaaaattaaagggaaaactcgagggggggccccggtacccaattcgccctatagtgagccgtataccaattcactggcccgccgtttacaacgan

SEQ ID NO: 11537 - DNA, 943 bp, Homo sapiens
  misc_feature 941, 942, 943: n = A,T,C or G
tatagggagtcgacccacgcgtccgcggacgcgtgggccggccgggagccgcggaaagagtagggctccccagacaacggggtccgacgagcagttgggcacgggctgagtccgcctgccggcagaatgtccctggctgcttattgcgtcatctgttgcagaagaataggaacctctacttccccaccaaaaagtggcacacactggagagatatcagaaatataataaagtttactggatcacttattttaggaggttctttatttcttacatatgaagttctggccctgaagaaggctgtgacattagatactcaagtggtagaacgagaaaaaatgaagtcatatatatatgtgcacacagtttctttagataaaggagaaaatcatggtattgcctggcaggcaagaaaagaacttcacaaagcagtaagaaaagtattggcaacatcagccaagatactgcggaatccatttgctgatccttttagtacagttgatatagaagatcatgagtgtgctgtgtggctgctcctacggaagagcaagtcagatgacaaaaccacgcgactcgaggctgtgcgggaaatgtcggagacccatcactggcatgattaccagtataggataattgctcaagcctgtgatccgaaaactcttattggtttggcacgaagcgaagagagtgatcttcgcttttttctcctaccacctcctttgccatctttaaaagaagattcttccactgaagaagagctcagacagttgctggcttccttacctcaaacagagctagatgagtgtatccagtattttacatctttggctcttagtgaaagcagtcagagtctagctgctcagaagggtggtttatggtgttctttgaggaccttgctctcccgtcgctgaggctggtgtcatactccacagatataattccnnn

SEQ ID NO: 11538 - DNA, 1047 bp, Homo sapiens
  misc_feature 1, 2, 1044, 1045, 1046, 1047: n = A,T,C or G
nncccatcaagaaccatcctggaaaccctcaaggtggtagacaacgagaaggagcgtgagaagattaaccaggagctaagggaggagagtacccggctggccaaggagaaggagcagagcctcacggcagaaaaggatgaggacgaagagaacgatgcctctctggccaactcctccaccaccactttggaggacaaaggccctggccatgccacttttggccgcgaggccaccaaatttgaagaggaggagaaacctgacaaggcctgggaagccagacccccacgagagtccagcgatgttccccccacgaagagaaataactggatctttattgatgaggagcaagcctttgggcgtcagacgacacgccccgggccggggccgtggtttcagagagttcacttttcgtggtccccctcctgccggaaatgggagcggcctctgtgctgggggggtcctgggggcccgcagcatctactgcagcagtcagcgcagcggccgtggccggggcctgcgagagtttgcgcggccagaggactgccccagagccaagccccgacggagagttgccagtgagacccatagcgagggctcagagtatgaagaacttcccaagcgccgccggcagaggggctccgagaacgggaatgaaggctcgctcctggagagggaggagagcaccttgaagaagggcgactgcagagattcttggcggtccaacaagggttgctctgaggaccacagcggtctagatgccaagagccgaggccctcgggcctttgggcgagccctccctccccggctgagcaattgcgggtatggacggagaaccttcgtctccaaagagtcaccccactggcagagcaaaagtccaggcagctcttggcaggaatatggcccttccgacacatgcggatcccggcgacctacagacagagactatgtcccagattcctacagacaccctgacgcatttggtggccggggctttgaggacagccgcgtggaggacaagagatccttcttccaagatgaacacgnnnn

SEQ ID NO: 11539 - DNA, 1496 bp, Homo sapiens
  misc_feature 1, 2, 3, 4, 5, 1496: n = A,T,C or G
nnnnncccttaaatcagatgcctctaaggactttcctgctagatatttctggaaggagaaaatacaacatgtcatttatcaacgtccttagaaagaattcttctagagaaaaagggatctaggaatgctgaaagattacccaacataccattatagtctcttctttctgagaaaatgtgaaaccagaattgcaagactgggtggactagaaagggagattagatcagttttctcttaatatgtcaaggaaggtagccgggcatggtgccaggcacctgtaggaaaatccagcaggtggaggttgcagtgagccgggattatgccattgcactccagcctgggtgacagagcgagactccatctcaaaaaaaaaaaaaaatcaaggaaggataaaaggaagttcagtattgtaccacacttggaacttcctccatttcttccattttagaaggatatgaacctggaacttttgatgattctaagccttaaactatcaaaaagatcagggattgccaatgcttctaatggcactgcaagtatatgccataaccgttccctcctaaaagtgaaaaatgagagaaattcagtattttcccaggctcagcatccagaagtctagctctgggctggaagaaaagggtactaatatttagggaagagatgagaataagtagtgggtggcaggagagggctgagctagtgcctgctaacattttagttgtatcttggaaagatttagcaaaaataactcaccaggatagctgctgaagagttgatgaatgggagaagaaagatgtttgagaaataaagaaaacagcagcctgcaatacaataacttgcctttttaatagtttgattactcttgatacctacagcacaaatgctggacctgaatcagctcttcaaggaccctagcacaaatgtcaactgatcacctctgggagagtagaaaactttttttttttggagacgaagtctccgcctcggtggccacaggccgggattgcagggggcaccatctcagctcactgagcgtccgcctctggggttcaagtgattctcctgcttggtcctcctgagtcgctggtattacaggtgcctgcatcacacccagctaatttgggagttctgatagagacaggtttctccatgtggccaggctgtctcaagctcctgactcaagtgactaccacccttggctcccacagtgctggaagcattgactggtcagaaactttatgggagacgaggcctgcccaatcagcagggggaaggagcgcggaacacggacagggaactccctccgagtagggaatctccttctaagcccaggagttggttattgggtgggcccagtacgcatttgggtttagacaagggggcaccagacaggggtccaaccgacagagtgcacccgcgcaaggttgaggggcccagcggcaacttaaaagggacaacaacgcgtgacgttaggacagaagagccgccacacacan

SEQ ID NO: 11540 - DNA, 2022 bp, Homo sapiens
acccagcgtccgggatcatgggagacaaagtggcttccgaagctcttatgaagtaccacatcttaaatactctccagtgttctgagtctattatgggaggagcagtctttgagacgctggaaggaaatacaattgagataggatgtgacggtgacagtataacagtaaatggaatcaaaatggtgaacaaaaaggatattgtgacaaataatggtgtgatccatttgattgatcaggtcctaattcctgattctgccaaacaagttattgagctggctggaaaacagcaaaccaccttcacggatcttgtggcccaattaggcttggcatctgctctgaggccagatggagaatacactttgctggcacctgtgaataatgcattttctgatgatactctcagcatggatcagcgcctccttaaattaattctgcagaatcacatattgaaagtaaaagttggccttaatgagctttacaacgggcaaatactggaaaccatcggaggcaaacagctcagagtcttcgtatatcgtacagctgtctgcattgaaaattcatgcatggagaaagggagtaagcaagggagaaacggtgcgattcacatattccgcgagatcatcaagccagcagagaaatccctccatgaaaagttaaaacaagataagcgctttagcaccttcctcagcctacttgaagctgcagacttgaaagagctcctgacaacctggagactggacattatttgtgccaaccaatgatgcttttaagggaatgactagtgaagaaaaagaaattctgatacgggacaaaaatgctcttcaaaacatcattctttatcacctgacaccaggagttttcattggaaaaggatttgaacctggtgttactaacattttaaagaccacacaaggaagcaaaatctttctgaaagaagtaaatgatacacttctggtgaatgaattgaaatcaaaagaatctgacatcatgacaacaaatggtgtaattcatgttgtagataaactcctctatccagcagacacacctgttggaaatgatcaactgctggaaatacttaataaattaatcaaatacatccaaattaagtttgttcgtggtagcaccttcaaagaaatccccgtgactgtctatagacccacactaacaaaagtcaaaattgaaggtgaacctgaattcagactgattaaagaaggtgaaacaataactgaagtgatccatggagagccaattattaaaaaatacaccaaaatcattgatggagtgcctgtggaaataactgaaaaagagacacgagaagaacgaatcattacaggtcctgaaataaaatacactaggatttctactggaggtggagaaacagaagaaactctgaagaaattgttacaagaagaggtcaccaaggtcaccaaattcattgaaggtggtgatggtcatttatttgaagatgaagaaattaaaagactgcttcagggagacacacccatgaggaagttgcaagccaacaaaaaagttcaaggatctagaagacgattaagggaaggtcgttctcagtgaaaatccaaaaaccagaaaaaaatgtttatacaaccctaagtcaataacctgaccttagaaaattgtgagagccaagttgacttcaggaactgaaacatcagcacaaagaagcaatcatcaaataattctgaacacaaatttaatatttttttttctgaatgagaaacatgagggaaattgtggagttagcctcctgtggtaaaggaattgaagaaaatataacaccttacaccctttttcatcttgacattaaaagttctggctaactttggaatccattagagaaaaatccttgtcaccagattcattacaattcaaatcgaagagttgtgaactgttatcccattgaaaagaccgagccttgtatgtatgttatggatacataaaatgcacgcaagccattatctctccatgggaagctaagttataaaaataggtgcttggtgt

SEQ ID NO: 11541 - DNA, 1356 bp, Homo sapiens
ccacgcgtccgattggaggcccttggaagagacggtcacttcacactctttgctcccaccaatgaggcttttgagaaacttccacgaggtgtcctagaaaggatcatgggagacaaagtggcttccgaagctcttatgaagtaccacatcttaaatactctccagtgttctgagtctattatgggaggagcagtctttgagacgctggaaggaaatacaattgagataggatgtgacggtgacagtataacagtaaatggaatcaaaatggtgaacaaaaaggatattgtgacaaataatggtgtgatccatttgattgatcaggtcctaattcctgattctgccaaacaagttattgagctggctggaaaacagcaaaccaccttcacggatcttgtggcccaattaggcttggcatctgctctgaggccagatggagaatacactttgctggcacctgtgaataatgcattttctgatgatactctcagcatggatcagcgcctccttaaattaattctgcagaatcacatattgaaagtaaaagttggccttaatgagctttacaacgggcaaatactggaaaccatcggaggcaaacagctcagagtcttcgtatatcgtacagctgtctgcattgaaaattcatgcatggagaaagggagtaagcaagggagaaacggtgcgattcacatattccgcgagatcatcaagccagcagagaaatccctccatgaaaagttaaaacaagataagcgctttagcaccttcctcagcctacttgaagctgcagacttgaaagagctcctgacacaacctggagactggacattatttgtgccaaccaatgatgcttttaagggaatgactagtgaagaaaaagaaattctgatacgggacaaaaatgctcttcaaaacatcattctttatcacctgacaccaggagttttcattggaaaaggatttgaacctggtgttactaacattttaaagaccacacaaggaagcaaaatctttctgaaagaagtaaatgatacacttctggtgaatgaattgaaatcaaaagaatctgacatcatgacaacaaatggtgtaattcatgttgtagataaactcctctatccagcagacacacctgttggaaatgatcaactgctggaaatacttaataaattaatcaaatacatccaaattaagtttgttcgtggagaaacagaagaaactctgaagaaattgttacaagaagacacacccgtgaggaagttgcaagccaacaaaaaagttcaaggatctagaagacgattaagggaaggtcgttctcagtgaaaatccaaaaaccagaaaaaaatgtttata

SEQ ID NO: 11542 - DNA, 6662 bp, Homo sapiens
  misc_feature 1, 2, 3, 6662: n = A,T,C or G
nnngccatcgtgagagattggtacatgatgtgtaaattcagttcagcatatgtttcttcattatgaaaccactagcaatcccagctaaccatggagttatgggccagcaggagaaacactcacttcctgcagatttcacaaaactgcatcttactgacagtctccacccacaggtgacccacgtttcttctagccattcaggatgtagtatcactagtgattctgggagcagcagtctttctgatatctaccaggccacagaaagcgaggctggtgatatggacctgagtgggttgccagaaacagcagtggattccgaagacgacgacgatgaagaagacattgagagagcatcagatcctctgatgagcagggacattgtgagagactgcctagagaaggacccaattgaccggacagatgatgacattgaacaactcttggaatttatgcaccagttgcctgcttttgccaatatgacaatgtcagtgaggcgagaactctgtgctgtgatggtgttcgcagtggtggaaagagcagggaccatagtgttaaatgatggtgaagagctggactcctggtcagtgattctcaatggatctgtggaagtgacttatccagatggaaaagcagaaatactgtgcatgggaaatagttttggtgtctctcctaccatggacaaagaatacatgaaaggagtgatgagaacaaaggtggatgactgccagtttgtctgcatagcccagcaagattactgccgtattctcaatcaagtagaaaagaacatgcaaaaagttgaagaggaaggagagattgttatggtgaaagaacaccgagaacttgatcgaactggaacaagaaagggacacattgtcatcaagggtacctcagaaaggttaacaatgcatttggtggaagagcattcagtagtagatccaacattcatagaagactttctgttgacctataggacttttctttctagcccaatggaagtgggcaaaaagttattggagtggtttaatgacccgagcctcagggataaggttacacgggtagtattattgtgggtaaataatcacttcaatgactttgaaggagatcctgcaatgactcgatttttagaagaatttgaaaacaatctggaaagagagaaaatgggtggacacctaaggctgttgaatatcgcgtgtgctgctaaagcaaaaagaagattgatgacgttaacaaaaccatcccgagaagctcctttgccttttatcttacttggaggctctgagaagggatttggaatctttgttgacagtgtagattcaggtagcaaagcaactgaagcaggcttgaaacggggggatcagatattagaagtaaatggccaaaactttgaaaacattcagctgtcaaaagctatggaaattcttagaaataacacacatttatctatcactgtgaaaaccaatttatttgtatttaaagaacttctaacaagattgtcagaagagaaaagaaatggtgccccccaccttcctaaaattggtgacattaaaaaggccagtcgctactccattccagatcttgctgtagatgtagaacaggtgataggacttgaaaaagtgaacaaaaaaagtaaagccaacactgtgggaggaaggaacaagctgaaaaagatactcgacaagactcggatcagtatcttgccacagaaaccatacaatgatattgggattggtcagtctcaagatgacagcatagtaggattaaggcagacaaagcacatcccaactgcattgcctgtcagtggaaccttatcatccagtaatcctgatttattgcagtcacatcatcgcattttagacttcagtgctactcctgacttgccagatcaagtgctaagggtttttaaggctgatcagcaaagccgctacatcatgatcagtaaggacactacagcaaaggaagtggtcattcaggctatcagggagtttgctgttactgccaccccggatcaatattcactatgtgaggtctctgtcacacctgagggagtaatcaaacaaagaagacttccagatcagctttccaaacttgcagacagaatacaactgagtggaaggtattatctgaaaaacaacatggaaacagaaactctttgttcagatgaagatgctcaggagttgttgagagagagtcaaatttccctccttcagctcagcactgtggaagttgcaacacagctctctatgcgaaattttgaactctttcgcaacattgaacctactgaatatatagatgatttatttaaactcagatcaaaaaccagctgtgccaacctgaagagatttgaagaagtcattaaccaggaaacattttgggtagcatctgaaattctcagagaaacaaaccagctgaagaggatgaagatcattaagcatttcatcaagatagcactgcactgtagggaatgcaagaattttaactcaatgtttgcaatcatcagtggcctaaacctggcaccagtggcaagactgcgaacgacctgggagaaacttcccaataaatacgaaaaactatttcaagatctccaagacctgtttgatccttccagaaacatggcaaaatatcgtaatgttctcaatagtcaaaatctacaacctcccataatccctctattcccagttatcaaaaaggatctcaccttccttcacgaaggaaatgactcaaaagtagacgggctggtcaattttgagaagctaaggatgattgcaaaagaaattcgtcacgttggccgaatggcttcagtgaacatggaccctgccctcatgttcaggactcggaagaagaaatggcggagtttggggtctctcagccagggtagtacaaatgcaacagtgctagatgttgctcagacaggtggtcataaaaagcgggtacgtcgtagttcctttctcaatgccaaaaagctttatgaagatgcccaaatggctcgaaaagtgaagcagtacctttccaatttggagctagaaatggacgaggagagtcttcagacattatctctgcagtgtgagccagcaaccaacacattgcctaagaatcctggtgacaaaaagcctgtcaaatccgagacctctccagtagctccaagggcagggtcacaacagaaagctcagtccctgccacagccccagcagcagccaccaccagcacataaaatcaaccagggactacaggttcccgccgtgtccctttatccttcacggaagaaagtgcccgtaaaggatctcccaccttttggcataaactctccacaagctttaaaaaaaattctttctttgtctgaagaaggaagtttggaacgtcacaagaaacaggctgaagatacaatatcaaatgcatcttcgcagctttcttctcctcctacttctccacagagttctccaaggaaaggctatactttggctcccagtggtactgtggataatttttcagattctggtcacagtgaaatttcttcacgatccagtattgttagcaattcgtcttttgactcagtgccagtctcactgcacgatgagaggcgccagaggcattctgtcagcatcgtggaaacaaacctagggatgggcaggatggagaggcggaccatgattgaacctgatcagtatagcttggggtcctatgcaccaatgtccgagggccgaggcttatatgctacagctacagtaatttcttctccaagcacagaggaactttcccaggatcagggggatcgcgcgtcacttgatgctgctgacagtggccgtgggagctggacgtcatgctcaagtggctcccatgataatatacagacgatccagcaccagagaagctgggagactcttccattcgggcatactcactttgattattcaggggatcctgcaggtttatgggcatcaagcagccatatggaccaaattatgttttctgatcatagcacaaagtataacaggcaaaatcaaagtagagagagccttgaacaagcccagtcccgagcaagctgggcgtcttccacaggttactggggagaagactcagaaggtgacacaggcacaataaagcggaggggtggaaaggatgtttccattgaagccgaaagcagtagcctaacgtctgtgactacggaagaaaccaagcctgtccccatgcctgcccacatagctgtggcatcaagtactacaaaggggctcattgcacgaaaggagggcaggtatcgagagcccccgcccacccctcccggctacattggaattcccattactgactttccagaagggcactcccatccagccaggaaaccgccggactacaacgtggcccttcagagatcgcggatggtcgcacgatcctccgacacagctgggccttcatccgtacagcagccacatgggcatcccaccagcagcaggcctgtgaacaaacctcagtggcataaaccgaacgagtctgacccgcgcctcgccccttatcagtcccaagggttttccaccgaggaggatgaagatgaacaagtttctgctgtttgaggcacagacttttctggaagcagagcgagccacctgaaaggagagcacaagaagacgtcctgagcattggagccttggaactcacattctgaggacggtggaccagtttgcctccttccctgccttaaaagcagcatggggcttcttctccccttcttcctttcccctttgcatgtgaaatactgtgaagaaattgccctggcacttttcagactttgttgcttgaaatgcacagtgcagcaatcttcgagctcccactgttgctgcctgccacatcacacagtatcattccaaattccaagatcatcacaacaagatgattcactctggctgcacttctcaatgcctggaaggattttttttaatcttccttttagatttcaatccagtcctagcacttgatctcattgggataatgagaaaagctagccattgaactacttggggcctttaacccaccaaggaagacaaagaaaaacaatgaaatcctttgagtacagtgcttgtccacttgtttacaatgtcctccttttaaaaaaaaaaaaatgagtttaaagattttgttcagagagtaaatatatatccatttaatgattacagtattattttaaaccttaagtagggttgccagcctggtttctgaaaaaccaaatatgccggacagggtgtggccacaccaagaagacgggaagacctggcttgtgaccctggcttcccatgtccttctggtctcacccgcgaagtgccctatcctggaagtatgaaatgttagccaattaataccaagacacctcatctgctccttccccagtggatggggttcttctgtaaaactgtttgcacatggccaggggagggaactaggacccttgtgtcctgtctgagccttatggaggcaggacggtgtcattggcggatgtgtcctgctccattgagatggatggcaaaccccatttttaagttatatttctttgatttttgttaatttagaggtgtaggttttgttttttgttttttgtttttttttaagagaaacatttataactggatagcattgcagtgaaagcagcttgggatgttggagctaatgccagctgtttatactgctctttcaagacagcctccctttattgaattggcattagggaataaacaagcctttaaacgtgataaaagatcaaaaacctggttagacatgccagcctttgcaaggcaggttagtcaccaaagactaacctccaagtggctttatggacgctgcatatagagaaggcctaagtgtagcaaccatctgctcacagctgctattaaccctataatgactgaaatgacccctccactctatttttgtgttgttttgcacagactccggaaaagtgaaggctgccaatctgagtagtactcaaatgtgaggaactgctggtcttggattttttttccattaaattcagctgatcatattgatcagtagataaacgtaaatagcttcaaattttaaaagtggaattgcagtgttttttcactgtatcaaacaatgtcagtgctttatttaataattctcttctgtatcatggcatttgtctacttgcttattacattgtcaattatgcatttgtaattttacatgtaatatgcattatttgccagttttattatataggctatggacctcatgtgcatatagaaagacagaaatctagctctaccacaagttgcacaaatgttatctaagcattaagtaattgtagaacataggactgctaatctcagttcgctctgtgatgtcaagtgcagaatgtacaattaactggtgatttcctcatacttttgatactacttgtacctgtatgtcttttagaaagacattggtggagtctgtatcccttttgtatttttaatacaataattgtacatattggttatatttttgttgaagatggtagaaatgtactatgtttatgcttctacatccagtttgtacaagctggaaaataaataaatataacataaagcctagacaaccaaaaataaatggaaaaaaaaaaatcaacaggaaaaaaaacctgagtgcttagaaaacaaaaaaataggggcggccgn

SEQ ID NO: 11543 - DNA, 2109 bp, Homo sapiens
agggagtcgacccacgcgtccgtttttttttttttttttatttttactactcataacagtttatttttactttgtacaaaatacaaaaatgcaaatccaaggagtacagaccagtagtgacaggcacactgcacaacagcaaccttgtctagcaagacaggagttttttaaattttattttagtgaatacatgcattatataaaacaacaacaacaacaacaacaaaaacacaaagaggctagagatttcaccgtttctacccccaaaataacgcttgctatcaagactttggagggggatgggggaaaagaatttaaaaggcaaataatttttttttcataaaaagtaaaagctaccataaaacattttttttttctgtcacactgattaaatttcttctgaaaagccgcacatatagacaaaacaaaacaaaaattcctgaactggacaaacagcaaatactcaacagggttgttaacctaggtaacagttcagtagtttaaagaatcttttagacatctggaagcctttctattcattcctcagtacagtgttccagccatcctgcttgtttttttcctccaatacctcccagaacagaaacacttgcatcgagtctgttcctaagaactagttttgaaaaagaagcgatgtacaaaaatatttaacagaactatgaaagatgcaggaaaggagtctttcttcgtagcaaagtagtcgttgctttgcatggtttcttttgtatactcttcagggtttgtttatctgccccatgaataacacagcacctgtaggattatgtcggatgaaaaacagaaaaggtctgtctactataaaccagggaggcgatgatcttgcaatgagaattgcagttgttgctgctgaagctttggttccatcttcactgacttcaatttttgctttttgcaagatatgagaaacatggaggttttctgaccctgcttccagaaaataaaacagtatcagcatttgtttgataggcaggccattggttggttggggaagtaacctcaaagctcaaagccatggcaaattccaatttttaaagtgtcagaagacatgacctctgacagtcctggtgttgaaggctgcagacagctgttacttgtgaatttcagtccctgctaagtgaactgtgatactcacttctggagaagggcccaggccctcaaatgatttagtgcctctatcaattcaattctgatcactagaattgttttttaaaaatgaaaagagcagagctttaaaaaggaagcccggttttctggaagcagcaaggcaacaagattatttttcagttacagaatgcagatgcagaagggatttcagacagcatttacagatggggaaactgaggcctagaacgttaagtaatgttccctgcaatcatacggctagtagtggcagagtaagtcctggctcttcacaacagccactcatctcatgggcatgctagtaagagaagagtgtcgaacaagagaagagtttagattttcctggaagggccgatgtgtaaatgcagttgtgcctcagggacattctggtgaactcactttacttctcagcaaattctgaccattccagcaacacccactgggtgtagctttcacagagaatgaaaaacttaagttgatattagtctggatgggacataggtctggatgcaaagggaaaatgtgctttttgtgtcatctgcttgtgaactatctgcaccaatgcccagctctaatatgaccaaattgtgactgagatgcacatttatagggcccaagtcacatgcagtgttaaagaggactttccaggagaatctggggcacctggttcttcctgtgaacaccccccatttagtatttcagctaccatgaacaaccttgaagggaaaagtgcagatgaaaatggtgcttctcagtctttgctgggctgagggactgtgttaaaatggattctggttcagtgggtctgggttacacccaagattgtgtatttcaaacaagctcctgggtgatgctaatgctgctgggctggaggcctgagtttgagtcatgagggatgaacggctatcagaatatccatggagctgcaggtca

SEQ ID NO: 11544 - DNA, 2719 bp, Homo sapiens
gaatgtgctaagtaaagatccagagttaatattaattatataaagaatgacaacaatttattgaatgtcttagattctgtaagttttctaaccttgttgtccaagacttctgttggaaaatgagaacagtttacataaaaccttgagagacagaaataaccgtgaactatgattttatccagtctgggcctctttaaatgaatctttttgtagaatacaatgctagaaatcatattattatattttgtagtagtttgtcttacctttaccattgttgacaccggatgaatcctggatagatttttcaacatggattcaataagatcagccacacttaatccaatagcccagttggtatatccttttagcttgatgacttcataggcactttcaaccaccatcttatgcacttccttccaattttcactatcattgtcagttcccatttctggattcaattcctggagagaaacacctgccacattcacaccactccacacagccacacttgagtcgccatgttcccccaaaatccatccatggcagctgctgggatgaatgccaagtttttcagccataaggtagcgaaatctagcagaatccagattacatccacttccaatcacgcggtgtttgggtaatccacttagtttccaggtaacatacgtaagaatgtccactgggttggaaaccacaattatgatgcaatcaggactgtacttgacgatctgaggaataatgaatttgaagacattaacatttctctgcaccagattgagccgactctccccttcttgctgacggactcctgcagttaccactacaatcttagaattggcggtcacaaaataatctttatctgccacaattttaggtgtctgaagaaataagctcccatgctgcagatccatcatttctcctttaagcttatcttccaaaacatccacaagagcaagttcatcagccagagactttcccagaatgctgatagcacacgccataccaacttgtccaacacccactacagtgatcttattgtttggaactgttgcctcttcttccgcaactggtgcaatgagtttttccttaagagttgccattttgcacaggagagagaaggctctggaggagacgcacgcagctgactttgtcttctccgcacgactgttacagaggtctccagagccttctctctcctgtgcaaaatggcaactcttaaggaaaaactcattgcaccagttgcggaagaagaggcaacagttccaaacaataagatcactgtagtgggtgttggacaagttggtatggcgtgtgctatcagcattctgggaaagtctctggctgatgaacttgctcttgtggatgttttggaagataagcttaaaggagaaatgatggatctgcagcatgggagcttatttcttcagacacctaaaattgtggcagataaagattattctgtgaccgccaattctaagattgtagtggtaactgcaggagtccgtcagcaagaaggggagagtcggctcaatctggtgcagagaaatgttaatgtcttcaaattcattattcctcagatcgtcaagtacagtcctgattgcatcataattgtggtttccaacccagtggacattcttacgtatgttacctggaaactaagtggattacccaaacaccgcgtgattggaagtggatgtaatctggattctgctagatttcgctaccttatggctgaaaaacttggcattcatcccagcagctgccatggatggattttgggggaacatggcgactcaagtgtggctgtgtggagtggtgtgaatgtggcaggtgtttctctccaggaattgaatccagaaatgggaactgacaatgatagtgaaaattggaaggaagtgcataagatggtggttgaaagtgcctatgaagtcatcaagctaaaaggatataccaactgggctattggattaagtgtggctgatcttattgaatccatgttgaaaaatctatccaggattcatcccgtgtcaacaatggtaaaggggatgtatggcattgagaatgaagtcttcctgagccttccatgtatcctcaatgcccggggattaaccagcgttatcaaccagaagctaaaggatgatgaggttgctcagctcaagaaaagtgcagataccctgtgggacatccagaaggacctaaaagacctgtgactagtgagctctaggctgtagaaatttaaaaactacaatgtgattaactcgagcctttagttttcatccatgtacatggatcacagtttgctttgatcttcttcaatatgtgaatttgggctcacagaatcaaagcctatgcttggtttaatgcttgcaatctgagctcttgaacaaataaaattaactattgtagtgtgaaaaaaaaaaaaaaaaaaaactcgagaaaagtctctctcccggagcgggaggtgccagcgccgggggaccgggccgtgggtgtctgagcgggggtcgcaggatccgttaatcctcaatcaagaaccgggaggacaaagcgctggccatgggtactgcctttcggatcgtgcaacccaaagcggtcgaggagggttgcggggcccggcgaaagcaacaccatgtggggtccaattaacatgaccgcgaagagcaaatcgtgcggggtccgcacccggtcctgggcctcatcgggctacaaaacatggagc

SEQ ID NO: 11545 - DNA, 1882 bp, Homo sapiens
cacgcgtccgcactgcagagctgcaaggcctcagaccgggttctgagtacacagtcagtgtggttgccttgcacgatgatatggagagccagcccctgattggaacccagtccacagctattcctgcaccaactgacctgaagttcactcaggtcacacccacaagcctgagcgcccagtggacaccacccaatgttcagctcactggatatcgagtgcgggtgacccccaaggagaagaccggaccaatgaaagaaatcaaccttgctcctgacagctcatccgtggttgtatcaggacttatggtggccaccaaatatgaagtgagtgtctatgctcttaaggacactttgacaagcagaccagctcagggagttgtcaccactctggagaatgtcagcccaccaagaagggctcgtgtgacagatgctactgagaccaccatcaccattagctggagaaccaagactgagacgatcactggcttccaagttgatgccgttccagccaatggccagactccaatccagagaaccatcaagccagatgtcagaagctacaccatcacaggtttacaaccaggcactgactacaagatctacctgtacaccttgaatgacaatgctcggagctccccatgtgagtcatcgacagcctcacactgaccatatgatgcaccattcaacctgcgtttcctggaccagacacaacccaagtatccattgactgcgttatcatgcgcacacaggaccacgttgccagagatttacccgggactaacagtcatccaaggtatgagaaagcactggggctctcacgtacaccaagaagagaggtggatacccactcggaaaccacgtaccttggaagcgtcacaggcagagcctaacatacttgacactgggacctggaacacaccggaggacaaccggaacataatagcaccgcgccactggtacactaggacccgtgacaagcactaacgcccagaaacgagcagaaaccccacagcataggagacagagaaacaacccgcaccagggcacacaggaaagccatagtcggcagccacaagacacaccacagctccattgtgcggaaccccagaagatatccacatcgggcaagagcctatccaagacaagtacccagtcaacaactacacaatgctcaaatcgccaggataggagacaccctagacatggaatcggaaaacggccgtaagaaagggacgcacaggggagagcccatggggtaggccaacaacaacagaaagagggccaccatcgatgagagaaggagcaatcaaaccataggacggataccaacgccataagacagcccagcacaacaatgggaagggccagatgaccagcgacaccaaataacacacgagcaaaaagggactccagcgacctaagaggtagtcaaacaagagacgtaaaagacgacgacaacacaacaaggtgaaagagacaacaacagagactaaacacgagaagacaaagaccaagagacacaaacggacaaaggagaaaacagaaaaaaagaagaatgacaagaacagaacaacacgaaccagagctcaagtggactgcacgaacgagctacggaagcacgagatacgaatacagacagagagaagactgagagaacgcaatcgaaggaaacgacacaagccagcagagaggcacaaggcagacagcacagcagagcagaggaaaggagggaagagaacgaagagacagaggaaggcgacgagaacacaggaaagaagaagaagagtagcaggaagagaagagaggagaaagaaaagaaggaacgaagaagaaagggaagagggaacaacgagaaatgatggacacagacgccaagaggagaa

SEQ ID NO: 11546 - DNA, 4248 bp, Homo sapiens
acttattggagaccagcagaatggtgcttgtgatgggaatttttctccgactagcaaacgaattcgaaaggacatttctgcggggcatggaagccatcaagcaatttgcccagtaacatgccactgccttcagcttctcctcttcaccaacttgacctgaaaccttctttgcccttgcagaacagtggaactcacactcctgggcttctagaagatctaagtaagaatggtaggctccctgagattaaacttcctgtcaacggttgcagtgacctggaggatagcttcaccatcttgcagagcaaagacctcaaacaagaacctctcgatgaccctacttgcatagacacatcagaaacatctctttcaaatcagaacaagctgttctcagacattaatctgaatgatcaggagtggcaagaattaatagatgaattggccaacacggttcctgaggatgacatacaggacctgttcaacgaagactttgaagagaagaaggagccagaattctcgcagccagcaactgagcacccctctctcccaggagagtgcgagcgtgaagagcgacccctctcactctcccttcgcacatgtctccatgggatctccccaggcgaggccttcttcttctggtcctcccttttctactgtctccacggacactagtttaccttctggtgacagcactcccgcagctccaaaccctgcaagctcaccagcaaacttgtgcttgtccagtccccttcaaaacttccaaaccaagcccacactccaggccaagctccacctcggcctggaaatggttatctcctgaatccggcagcagtgacagtggccggttcagcgtcagggcctgtggctgtgcccagctctgacatgtctccagcagaacagctcaaacagatggctgcacagcagcaacaaagggccaaactcatgcagcagaagcagcaacagcaacagcagcagcagcagcagcagcagcagcagcagcagcagcagcagcagcaacagcactcaaatcagacttcaaattggtctcccttaggacctccctctagtccatatggagcagcttttactgcagaaaaaccaaatagcccaatgatgtacccccaagcctttaacaaccaaaaccctatagtgcctccaatggcaaacaacctgcagaagacaacaatgaataactacctccctcagaatcacatgaatatgatcaatcagcagccaaataacttgggtacaaactccttaaacaaacagcacaatattctgacttatggcaacactaaacccctgacccacttcaatgcagacctgagtcagaggatgacaccaccagtggccaaccccaacaaaaaccccttgatgccgtatatccagcagcagcaacagcagcagcaacagcaacagcagcagcagcagcagcagcagccaccacctccacagctccaggcccccagggcacacctgagcgaagaccagaaacgcctgcttctcatgaagcagaaaggagtgatgaatcagcccatggcttacgctgcacttccatcccacggtcaggtaagtgtgaaagtgacacactcttcgagcagttcttgtggtgcatttcaagactgtcgatgtgtgatgttctacaaagcttccactgtagtggggtctaattgcctgcagaaaacctctttacaacatcctcaggtagtggccaggtttggagtgttctttttccatttctcctaagaaatggaaaagggtggcatgataaactttcgtgtatttcagtgtctaggaatcaaacttcttttattcccaactgcagataagaattacataaaattctcactctgagggagggaggctgcagaggtcactccaccaaacacggcactacctctgtagcttctctcccagcttgcatgatcccaggctctgggtggtgggaagcaggggacattcagggctgtctacaacagttttataaggccctgagcagccttcgagttttttaaattttattttagtgaatacatgcattatataaaacaacaacaacaacaacaacaaaaacacaaagaggctagagatttcaccgtttctacccccaaaataacgcttgtctagcaagactttggagggggatgggggaaaagaatttaaaaggcaaataatttttttttttcataaaaagtaaaagctaccataaaacatttttttttctgtcacactgattaaatttcttctgaaaagccgcacatatagacaaaacaaaacaaaaattcctgaactggacaaacagcaaatactcaacagggttgttaacctaggtaacagttcagtagtttaaagaatcttttagacatctggaagcctttctattcattcctcagtacagtgttccagccatcctgcttgttttttccctccaatacctcccagaacagaaatacttgcatcgagtctgttcctaagaactagttttgaaaaagaagcgatgtacaggcaatatttaacagaactatgaaagatgcaggaaaggagtctttcttcgtagcaaagtagtcgttgctttgcatggtttcttttgtatactcttcagggtttgtttatctgccccatgaataacacagcacctgtaggattatgtcggatgaaaaacagaaaaggtctgtctactataaaccagggaggcgatgatcttgcaatgagaattgcagttgttgctgctgaagctttggttccatcttcactgacttcaatttttgctttttgcaagatatgagaaacatggaggttttctgaccctgttgttatttttgcaaaatttgcctttgatgaatcaaacatgtctgtctactataaaccagggaggcgatgatcttgcaatgagaattgcaggattgttctgttttctccttcattatgtaaaccattgttgctgctgaagctttggttccatcttcactgacttcaatttttgctttttgcaagatatgagaaacatggaggttttctgaccttgttatttttgcaaaatttgcctttgatgaatcaaacatgtcagtaatgccaagaactttcagcggctccttcaaatctgtttgtgctacagctgtgaacttgggcaggatcacctgcaccctcttgggcaccatgatgctcatccagctgtctatggtcttggtgctgatgtgtgggatgatggcagacagcggagtggagctctcagtcggcagtgcaatcagcatgctgatgctttccccgtggtagggcagttcaatgaagttgtaccataaatcattgggggcacttgtcgacccacaccggaacacggagagctgggccagcattggcacttgataggatttcccgtcggctgccacgaaagtgcgtttctttgtgttctcgggttggaaccgtgatttccacagacccttgaaatacactgcgttgacgaggaccagtctggtgagcacaccatcaataagatctggggacagcagattgtcaatcatatccctggtttcatttttaacccatgcattgatggaatcacaggcagaggctggatcctcaaagttcacattccggacctcacactggaacacatctttgttccttgtaacaaaaggcacttcaatttcagaggcattcttaacaaacacggcgttagccactgtcacaatgtctttattcttcttggagacgatggccttgttgatcttctttaatattttaccaactccatttacgccgtatctcatcaccatggcaagctgcttcttggtcctgccgtccgcccccagctgaagcatccccaggaccgacgcaatcccatggggagagatcacgatgttgtcatgaggcctcgacttcacaatctgattgaaaacctggatccccgtgttggagcctagttcctcgagagacagaggattgaagtgggagcagatggaaggcagcgtcacagaggccaagaggaagagggggagatgccagttcatggttccttccaccaaggacgaccgcgctcgctggatccccagggggcggccgcggagggcggtgcggccgcaaccggagcgggagcctggtctcggcggcgcggggagtcggaggacgcagccaagcggcggcggcgaggagggtcacagccggaaagaggcagcggtggcgcctgcagacgccgcgcagcccgggcagccccacagcgcaacgggggggggggggggctcgacccgggaattc

SEQ ID NO: 11547 - DNA, 2024 bp, Homo sapiens
acgaggtgccctggaggtccggcggcagagcctggccactctcccattcatgccactcgtggagcgcacacggcaccaggctcccagctggctccccgcgctctggccaattgcctttctttcccaaccgcagccacaaagatccaagctgcctggaggggctttcactggcggcagaaattcctccgggtgaagagatcagccatctgcatccagtcgtggtggcgtggaacactgggccggaggaaggcagccaagaggaagtgggcggcacagaccatccggcggctcatccgaggcttcatcctgcgccacgccccccgctgccccgagaacgccttcttcctggaccatgtgtgcacctcttttttgctaaacctgaggcggcagctgccccagaatgtcctggacacctcgtggcccacgcccccacctgccctgcgtgaggcctcagagcttctgcgggagttgtgcataaagaacatggtgtggaaatactgccggagtatcagccctgagtggaagcagcagctgcagcagaaggccgtggctagtgagatcttcaagggcaagaaggataattaccctcagagtgtacccaggctcttcatcagcactcggcttggtacagatgagatcagcccccgagtgctgcaggccttgggctctgagcccattcagtatgcggtgcctgttgtgaaatacgaccgcaagggctacaagcctcgctcccggcagctgctgctcacgcccaacgccgtcgtcatcgtggaggacgccaaagtcaagcagaggattgattacgccaacctgaccggaatctctgtcagcagcctgagcgacagtctttttgtgcttcatgtacagcgtgcggacaataagcaaaagggagatgtggtgctgcagagtgaccacgtgattgagacgctgaccaagacagccctcagtgccaaccgcgtgaacagcatcaacatcaaccagggcagcatcacgtttgcagggggccccggcagggatggcaccattgacttcacacccggctcggagctgctcatcaccaaggccaagaacgggcacctggctgtggtcgccccacggctgaattctcggtgataaaggcgcccactggaccctcccaacgcccaatgctttgcttttctcctcctccccttcccagttaccaaagactcgaacttccagacagggacccagggacaccccgaagcccacctgcaatctcccacctcctgcccatccctctcttgagggagcagcaggggccaggagctaccccaggagtgggcccaggccgggcccctgcaataggaaagccagggccagagcgagccatgccagccctactgccgatgccaaatatttgagagaagggaacttttgctgaggttttctctgaggtttttttgatgctttataggaaactattttttaaaaaaagccatttcccacccaaggacacagtggatgtgttttccctgactccagcagggcaaggaatgtagccgagaggttgtgtgggctgggctctggtgccctcttccctggccaggacacctctcctcctgattcccttggcaccttgtctttctgtctgtttacctgtctccctgcctgcccatctgcatcttttgcagcccactctgacttccatctgggggctgagaccacccttgcctgcccccttctttctgccttaagaatgtccttttaggctgggcatggtggctcacgcctgtaaccccagcactttgggaggcggagacgggcagataacctgaggtcaggatttcgagaccaacctgacctacatggagaaactccgcctctggtaggaatacaaaattagccgggcatggtggtgcacgcctctaatcccagctactcgggaggctgaggcgggggaatcacttgaacccggggaagtggaggttgcagtgagccaagagtacaccactgcactccagcctgggcaacagagcgagactccgtcttaaaaaaaaaaaaaa

SEQ ID NO: 11548 - DNA, 1978 bp, Homo sapiens
  misc_feature 1903: n = A,T,C or G
cccacgcgtccggggccctgcagctggaggaggagaggaagcgggcacaggaggaggccgagcgcctagaggctgaccgtatggctgcactgcgggctaaggaggagctggagagacaggcggtggatcagataaagagccaggagcagctggctgcggagcttgcagaatacactgccaagattgccctcctggaagaggcgcggaggcgcaaggaggatgaagttgaagagtggcagcacagggccaaagaagcccaggatgacctggtgaagaccaaggaggagctgcacctggtgatgacagcacccccgcccccaccaccccccgtgtacgagccggtgagctaccatgtccaggagagcttgcaggatgagggcgcagagcccacgggctacagcgcggagctgtctagtgagggcatccgggatgaccgcaatgaggagaagcgcatcactgaggcagagaagaacgagcgtgtgcagcggcagctgctgacgctgagcagcgagctgtcccaggcccgagatgagaataagaggacccacaatgacatcatccacaacgagaacatgaggcaaggccgggacaagtacaagacgctgcggcagatccggcagggcaacaccaagcagcgcatcgacgagttcgaggccctgtaacagccaggccaggaccaagggcagaggggtgctcatagcgggcgctgccagccccgccacgcttgtgtctttagtgctccaagtctaggaactccctcagatcccagttcctttagaaagcagttacccaacagaaacattctgggctgggaaccagggaggcgccctggtttgttttccccagttgtaatagtgccaagcaggcctgattctcgcgattattctcgaatcacctcctgtgttgtgctgggagcaggactgattgaattacggaaaatgcctgtaaagtctgagtaagaaacttcatgctggcctgtgtgatacaagagtcagcatcattaaaggaaacgtggcaggacttccatctgtgccatacttgttctgtattcgaaatgagctcaaattgattttttaatttctatgaaggatccatctttgtatatttacatgcttagaggggtgaaaattattttggaaattgagtctgaagcactctcgcacacacagtgattccctcctcccgtcactccacgcagctggcagagagcacagtgatcaccagcgtgagtggtggaggaggacacttggatattttttagttttttttttttggcttaacagttttagaatacattgtacttttacaccttatttaagtgatcagctattttactatttattttaccaagtgtgataattacgagatttgtaaccatttgagttttaaaaaagggaaagtttggtcctgtatatttggtaccttttacagaataaaagaattacttttgaaaaaccctctaaaccatggcacttgatgtgatgtgcgcaggagggcgtggtggagctggacctgcctgctgcagtcacgtgtaaccaggattattattagggttttatgctggtaatggactatgcacccttttaatttgtgtcagatttcacacatgccacttatgagcttttcagactcccaggtgtgaaggagacttctgtttgcttgtggttggttgcgtctctctctgccatggccttggcaaggctgctggaaggcagctgtggaggccgttggttccgcccatcattccttctcgtgcaactggttttccttcaaagatatatgccattcagtgggatccagccggaaatgataaagttgcagggaaaaaaaaaaaaaagggggggcctaaataccctggaggcccactcctccattttgtcagggcctagagggaaaaaaagcnggcgggtacgcgagggacatctctgttggagacctctgtgtatgcacccacgaccggaattggtgcctggttgta

SEQ ID NO: 11549 - DNA, 3320 bp, Homo sapiens
  misc_feature 153: n = A,T,C or G
tccgcgatggtagtcgccgtgcctaccatggtgaccactgttgacggggaatcagggttcgattccggagagggagcctgagaaacggctaccacatccaaggaaggcagcaggcgcgcaaattacccactcccgacccggggaggtagtgancgaaaaataacaatacaggactctttcgaggccctgtaattggaatgattccagctccaatagcgtatattaaagttgctgcagttaaaaagctcgctcggtgcgcgtcgtcccgctccatggcgctcttcgtgcggctgctggctctcgccctggctctggccctgggccccgccgcgaccctggcgggtcccgccaagtcgccctaccagctggtgctgcagcacagcaggctccggggccgccagcacggccccaacgtgtgtgctgtgcagaaggttattggcactaataggaagtacttcaccaactgcaagcagtggtaccaaaggaaaatctgtggcaaatcaacagtcatcagctacgagtgctgtcctggatatgaaaaggtccctggggagaagggctgtccagcagccctaccactctcaaacctttacgagaccctgggagtcgttggatccaccaccactcagctgtacacggaccgcacggagaagctgaggcctgagatggaggggcccggcagcttcaccatcttcgcccctagcaacgaggcctgggcctccttgccagctgaagtgctggactccctggtcagcaatgtcaacattgagctgctcaatgccctccgctaccatatggtgggcaggcgagtcctgactgatgagctgaaacacggcatgaccctcacctctatgtaccagaattccaacatccagatccaccactatcctaatgggattgtaactgtgaactgtgcccggctgctgaaagccgaccaccatgcaaccaacgggggtggtgcacctcatcgataaggtcatctccaccatcaccaacaacatccagcagatcattgagatcgaggacacctttgagacccttcgggcctgctgtggctgcatcagggctcaacacgatgcttgaaaggctaacggccagtacacgcttttggccccgaccaatgaggccttcgagaaagatccctagtgagaactttgaaccgtatcctggggcgacccagaagccctgagagacctgctgaacaaccacatcttgaagtcagctatgtgtgctgaagccatcgttgcggggctgtctgtagagaccctggagggcacgacactggaggtgggctgcagcggggacatgctcactatcaacgggaaggcgatcatctccaataaagacatcctagccaccaacggggtgatccactacattgatgagctactcatcccagactcagccaagacactatttgaattggctgcagagtctgatgtgtccacagccattgaccttttcagacaagccggcctcggcaatcatctctctggaagtgagcggttgaccctcctggctcccctgaattctgtattcaaagatggaacccctccaattgatgcccatacaaggaatttgcttcggaaccacataattaaagaccagctggcctctaagtatctgtaccatggacagaccctggaaactctgggcggcaaaaaactgagagtttttgtttatcgtaatagcctctgcattgagaacagctgcatcgcggcccacgacaagagggggaggtacgggaccctgttcacgatggaccgggtgctgacccccccaatggggactgtcatggatgtcctgaagggagacaatcgctttagcatgctggtagctgccatccagtctgcaggactgacggagaccctcaaccgggaaggagtctacacagtctttgctcccacaaatgaagccttccgagccctgccaccaagagaacggagcagactcttgggagatgccaaggaacttgccaacatcctgaaataccacattggtgatgaaatcctggttagcggaggcatcggggccctggtgcggctaaagtctctccaaggtgacaagctggaagtcagcttgaaaaacaatgtggtgagtgtcaacaaggagcctgttgccgagcctgacatcatggccacaaatggcgtggtccatgtcatcaccaatgttctgcagcctccagccaacagacctcaggaaagaggggatgaacttgcagactctgcgcttgagatcttcaaacaagcatcagcgttttccagggcttcccagaggtctgtgcgactagcccctgtctatcaaaagttattagagaggatgaagcattagcttgaagcactacaggaggaatgcaccacggcagctctccgccaatttctctcagatttccacagagactgtttgaatgttttcaaaaccaagtatcacactttaatgtacatgggccgcaccataatgagatgtgagccttgtgcatgtgggggaggagggagagagatgtactttttaaatcatgttccccctaaacatggctgttaacccactgcatgcagaaacttggatgtcactgcctgacattcacttccagagaggacctatcccaaatgtggaattgactgcctatgccaagtccctggaaaaggagcttcagtattgtggggctcataaaacatgaatcaagcaatccagcctcatgggaagtcctggcacagtttttgtaaagcccttgcacagctggagaaatggcatcattataagctatgagttgaaatgttctgtcaaatgtgtctcacatctacacgtggcttggaggcttttatggggccctgtccaggtagaaaagaaatggtatgtagagcttagatttccctattgtgacagagccatggtgtgtttgtaataataaaaccaaagaaacataaaaaaaaccggacacgagaccaacacaaacctttgcgcgcggcgtgggcctcagagaagctttaacaaccatcccggttgggcgcgcgggccccagtaggatgtgacactcgggccaacagtgcgtcccacaggagacaccggccagcgcaatgggcggcgttccccccataaaaaaaggccggcgagcacccgcggggtcggacaacataccaagaggggtctcgggccatgcggtcatcacacggagccaggggccgtagtacaccccgcccggcatgagagaaccacacgagacgacgcgagcacaagcacaaccacccgaaaaacacagccacgcaccgccaacacgcacgaaccactacacgcagcacagagcgcatcacgagcacgacaga

SEQ ID NO: 11550 - DNA, 2244 bp, Homo sapiens
tatagggagtcgacccacgcgtccgaccggactggcctggggcgggacgtgggcgcgggggcgcggcgtgcggcacgctgcagggctgaagcggcggcggcggtggggactgcacgtagcccggcgctcggcatggctctcctggtgctcggtctggtgagctgtaccttctttctggcagtgaatggtctgtattcctctagtgatgatgtgatcgaattaactccatcaaatttcaaccgagaagttattcagagtgatagtttgtggcttgtagaattctatgctccatggtgtggtcactgtcaaagattaacaccagaatggaagaaagcagcaactgcattaaaagatgttgtcaaagttggtgcagttgatgcagataagcatcattccctaggaggtcagtatggtgttcagggatttcctaccattaagatttttggatccaacaaaaacagaccagaagattaccaaggtggcagaactggtgaagccattgtagatgctgcgctgagtgctctgcgccagctcgtgaaggatcgcctcgggggacgaagcggaggatacagttctggaaaacaaggcagaagtgatagttcaagtaagaaggatgtgattgagctgacagacgacagctttgataagaatattttggacagtgaagatgtttggatggttgagttctatgctccttggtgtggacactgcaaaaacctagagccagagtgggctgccgcagcttcagaagtaaaagagcagacgaaaggaagagtgaaactggcagctgtggatgctacagtcaatcaggttctggccccccgatacgggattagaggatttcctacaatcaagatatttcagaaaggcgagtctcctgtggattatgacggtgggcggacaagatccgacatcgtgtcccgggcccttgatttgttttctgataacgccccacctcctgagctgcttgagattatcaacgaggacattgccaagaggacgtgtgaggagcaccagctctgtgttgtggctgtgctgccccatatccttgatactggagctacaggcagaaattcttatctggaagttcttctgaagttggcagacaaatacaaaaagaaaatgtgggggtggctgtggacagaagctggagcccagtctgaacttgagaccgcgttggggattggagggtttgggtaccccgccatggccgccatcaatgcacgcaagatgaaatttgctctgctaaaaggctccttcagtgagcaaggcatcaacgagtttctcagggagctctcttttgggcgtggctccacggcacctgtaggaggcggggctttccctaccatcgttgagagagagccttgggacggcagggatggcgagcttcccgtggaggatgacattggcctcagtgatgtggagcttgatgacttagggaaagatgagttgtgagagccacaacagaggcttcagaccattttcttttcttgggagccagtggatttttccagcagtgaagggacattctctacactcagatgactctaccagtggccttttaaccaagaagtagtacttgattggtcatttgaaaacactgcaacagtgaacttttgcatctcaagaaaacattgaaaaattctatgaatggttgtagccggtgaatggagtcgtattctggtcacataatattttgaagaaaacttggctgtcgaaacatttttctctctgactgctgcttgaatgttctgtggaggctgttcttatgtatgggtttttttaatgtgatcccttcatttgaatattaatggctttttccattaacgaataaacatattttgcacaatgccgataaatgtatgaagttagtatccacatcataaattcagagtgatgtttagcagtaatcaatatcttgaagtgatacacagatgtctttcctccccacaaacttttttaaacaaaaagaagactctttcttagatgtgcactaatgccacacaagagattttcctggaacgggctcaggaaactgatcctggccataatggctgggcgctccagtgctaatattaggaccaccggaaccagcaggctcaagtggtagacccaaaagcgtagacgaaaacgcgggtcacgcgacggggtccttgttaaccacaagagtgtggcaccagcggacttgcgaaaaaaaaagggggggccagaagggggggagagtagacgtaaaggcacgtcata

SEQ ID NO: 11551 - DNA, 7730 bp, Homo sapiens
  misc_feature 1, 2, 3, 7729, 7730: n = A,T,C or G
nnnacgcgtccggctcgctatataagccagccaaagttggctgcaccggccacagcctgcctactgtcacccgcctctcccgcgcgcagatacacgcccccgcctccgtgggcacaaaggcagcgctgctggggaactcgggggaacgcgcacgtgggaaccgccgcagctccacactccaggtacttcttccaaggacctaggtctctcgcccatcggaaagaaaataattctttcaagaagatcagggacaactgatttgaagtctactctgtgcttctaaatccccaattctgctgaaagtgagataccctagagccctagagccccagcagcacccagccaaacccacctccaccatgggggccatgactcagctgttggcaggtgtctttcttgctttccttgccctcgctaccgaaggtggggtcctcaagaaagtcatccggcacaagcgacagagtggggtgaacgccaccctgccagaagagaaccagccagtggtgtttaaccacgtttacaacatcaagctgccagtgggatcccagtgttcggtggatctggagtcagccagtggggagaaagacctggcaccgccttcagagcccagcgaaagctttcaggagcacacagtagatggggaaaaccagattgtcttcacacatcgcatcaacatcccccgccgggcctgtggctgtgccgcagcccctgatgttaaggagctgctgagcagactggaggagctggagaacctggtgtcttccctgagggagcaatgtactgcaggagcaggctgctgtctccagcctgccacaggccgcttggacaccaggcccttctgtagcggtcggggcaacttcagcactgaaggatgtggctgtgtctgcgaacctggctggaaaggccccaactgctctgagcccgaatgtccaggcaactgtcaccttcgaggccggtgcattgatgggcagtgcatctgtgacgacggcttcacgggcgaggactgcagccagctggcttgccccagcgactgcaatgaccagggcaagtgcgtgaatggagtctgcatctgtttcgaaggctacgccggggctgactgcagccgtgaaatctgcccagtgccctgcagtgaggagcacggcacatgtgtagatggcttgtgtgtgtgccacgatggctttgcaggcgatgactgcaacaagcctctgtgtctcaacaattgctacaaccgtggacgatgcgtggagaatgagtgcgtgtgtgatgagggtttcacgggcgaagactgcagtgagctcatctgccccaatgactgcttcgaccggggccgctgcatcaatggcacctgctactgcgaagaaggcttcacaggtgaagactgcgggaaacccacctgcccacatgcctgccacacccagggccggtgtgaggaggggcagtgtgtatgtgatgagggctttgccggtgtggactgcagcgagaagaggtgtcctgctgactgtcacaatcgtggccgctgtgtagacgggcggtgtgagtgtgatgatggtttcactggagctgactgtggggagctcaagtgtcccaatggctgcagtggccatggccgctgtgtcaatgggcagtgtgtgtgtgatgagggctatactggggaggactgcagccagctacggtgccccaatgactgtcacagtcggggccgctgtgtcgagggcaaatgtgtatgtgagcaaggcttcaagggctatgactgcagtgacatgagctgccctaatgactgtcaccagcacggccgctgtgtgaatggcatgtgtgtttgtgatgacggctacacaggggaagactgccgggatcgccaatgccccagggactgcagcaacaggggcctctgtgtggacggacagtgcgtctgtgaggacggcttcaccggccctgactgtgcagaactctcctgtccaaatgactgccatggccggggtcgctgtgtgaatgggcagtgcgtgtgccatgaaggatttatgggcaaagactgcaaggagcaaagatgtcccagtgactgtcatggccagggccgctgcgtggacggccagtgcatctgccacgagggcttcacaggcctggactgtggccagcactcctgccccagtgactgcaacaacttaggacaatgcgtctcgggccgctgcatctgcaacgagggctacagcggagaagactgctcagaggtgtctcctcccaaagacctcgttgtgacagaagtgacggaagagacggtcaacctggcctgggacaatgagatgcgggtcacagagtaccttgtcgtgtacacgcccacccacgagggtggtctggaaatgcagttccgtgtgcctggggaccagacgtccaccatcatccaggagctggagcctggtgtggagtactttatccgtgtatttgccatcctggagaacaagaagagcattcctgtcagcgccagggtggccacgtacttacctgcacctgaaggcctgaaattcaagtccatcaaggagacatctgtggaagtggagtgggatcctctagacattgcttttgaaacctgggagatcatcttccggaatatgaataaagaagatgagggagagatcaccaaaagcctgaggaggccagagacctcttaccggcaaactggtctagctcctgggcaagagtatgagatatctctgcacatagtgaaaaacaatacccggggccctggcctgaagagggtgaccaccacacgcttggatgcccccagccagatcgaggtgaaagatgtcacagacaccactgccttgatcacctggttcaagcccctggctgagatcgatggcattgagctgacctacggcatcaaagacgtgccaggagaccgtaccaccatcgatctcacagaggacgagaaccagtactccatcgggaacctgaagcctgacactgagtacgaggtgtccctcatctcccgcagaggtgacatgtcaagcaacccagccaaagagaccttcacaacaggcctcgatgctcccaggaatcttcgacgtgtttcccagacagataacagcatcaccctggaatggaggaatggcaaggcagctattgacagttacagaattaagtatgcccccatctctggaggggaccacgctgaggttgatgttccaaagagccaacaagccacaaccaaaaccacactcacaggtctgaggccgggaactgaatatgggattggagtttctgctgtgaaggaagacaaggagagcaatccagcgaccatcaacgcagccacagagttggacacgcccaaggaccttcaggtttctgaaactgcagagaccagcctgaccctgctctggaagacaccgttggccaaatttgaccgctaccgcctcaattacagtctccccacaggccagtgggtgggagtgcagcttccaagaaacaccacttcctatgtcctgagaggcctggaaccaggacaggagtacaatgtcctcctgacagccgagaaaggcagacacaagagcaagcccgcacgtgtgaaggcatccactgaacaagcccctgagctggaaaacctcaccgtgactgaggttggctgggatggcctcagactcaactggaccgcagctgaccaggcctatgagcactttatcattcaggtgcaggaggccaacaaggtggaggcagctcggaacctcaccgtgcctggcagccttcgggctgtggacataccgggcctcaaggctgctacgccttatacagtctccatctatggggtgatccagggctatagaacaccagtgctctctgctgaggcctccacaggggaaactcccaatttgggagaggtcgtggtggccgaggtgggctgggatgccctcaaactcaactggactgctccagaaggggcctatgagtactttttcattcaggtgcaggaggctgacacagtagaggcagcccagaacctcaccgtcccaggaggactgaggtccacagacctgcctgggctcaaagcagccactcattataccatcaccatccgcggggtcactcaggacttcagcacaacccctctctctgttgaagtcttgacagaggaggttccagatatgggaaacctcacagtgaccgaggttagctgggatgctctcagactgaactggaccacgccagatggaacctatgaccagtttactattcaggtccaggaggctgaccaggtggaagaggctcacaatctcacggttcctggcagcctgcgttccatggaaatcccaggcctcagggctggcactccttacacagtcaccctgcacggcgaggtcaggggccacagcactcgaccccttgctgtagaggtcgtcacagaggatctcccacagctgggagatttagccgtgtctgaggttggctgggatggcctcagactcaactggaccgcagctgacaatgcctatgagcactttgtcattcaggtgcaggaggtcaacaaagtggaggcagcccagaacctcacgttgcctggcagcctcagggctgtggacatcccgggcctcgaggctgccacgccttatagagtctccatctatggggtgatccggggctatagaacaccagtactctctgctgaggcctccacagccaaagaacctgaaattggaaacttaaatgtttctgacataactcccgagagcttcaatctctcctggatggctaccgatgggatcttcgagacctttaccattgaaattattgattccaataggttgctggagactgtggaatataatatctctggtgctgaacgaactgcccatatctcagggctaccccctagtactgattttattgtctacctctctggacttgctcccagcatccggaccaaaaccatcagtgccacagccacgacagaggccctgccccttctggaaaacctaaccatttccgacattaatccctacgggttcacagtttcctggatggcatcggagaatgcctttgacagctttctagtaacggtggtggattctgggaagctgctggacccccaggaattcacactttcaggaacccagaggaagctggagcttagaggcctcataactggcattggctatgaggttatggtctctggcttcacccaagggcatcaaaccaagcccttgagggctgagattgttacagaagccgaaccggaagttgacaaccttctggtttcagatgccaccccagacggtttccgtctgtcctggacagctgatgaaggggtcttcgacaattttgttctcaaaatcagagataccaaaaagcagtctgagccactggaaataaccctacttgcccccgaacgtaccagggacataacaggtctcagagaggctactgaatacgaaattgaactctatggaataagcaaaggaaggcgatcccagacagtcagtgctatagcaacaacagccatgggctccccaaaggaagtcattttctcagacatcactgaaaattcggctactgtcagctggagggcacccacggcccaagtggagagcttccggattacctatgtgcccattacaggaggtacaccctccatggtaactgtggacggaaccaagactcagaccaggctggtgaaactcatacctggcgtggagtaccttgtcagcatcatcgccatgaagggctttgaggaaagtgaacctgtctcagggtcattcaccacagctctggatggcccatctggcctggtgacagccaacatcactgactcagaagccttggccaggtggcagccagccattgccactgtggacagttatgtcatctcctacacaggcgagaaagtgccagaaattacacgcacggtgtccgggaacacagtggagtatgctctgaccgacctcgagcctgccacggaatacacactgagaatctttgcagagaaagggccccagaagagctcaaccatcactgccaagttcacaacagacctcgattctccaagagacttgactgctactgaggttcagtcggaaactgccctccttacctggcgacccccccgggcatcagtcaccggttacctgctggtctatgaatcagtggatggcacagtcaaggaagtcattgtgggtccagataccacctcctacagcctggcagacctgagcccatccacccactacacagccaagatccaggcactcaatgggcccctgaggagcaatatgatccagaccatcttcaccacaattggactcctgtaccccttccccaaggactgctcccaagcaatgctgaatggagacacgacctctggcctctacaccatttatctgaatggtgataaggctcaggcgctggaagtcttctgtgacatgacctctgatgggggtggatggattgtgttcctgagacgcaaaaacggacgcgagaacttctaccaaaactggaaggcatatgctgctggatttggggaccgcagagaagaattctggcttgggctggacaacctgaacaaaatcacagcccaggggcagtacgagctccgggtggacctgcgggaccatggggagacagcctttgctgtctatgacaagttcagcgtgggagatgccaagactcgctacaagctgaaggtggaggggtacagtgggacagcaggtgactccatggcctaccacaatggcagatccttctccacctttgacaaggacacagattcagccatcaccaactgtgctctgtcctacaaaggggctttctggtacaggaactgtcaccgtgtcaacctgatggggagatatggggacaataaccacagtcagggcgttaactggttccactggaagggccacgaacactcaatccagtttgctgagatgaagctgagaccaagcaacttcagaaatcttgaaggcaggcgcaaacgggcataaattccagggaccactgggtgagagaggaataaggcccagagcgaggaaaggattttaccaaagcatcaatacaaccagcccaaccatcggtccacacctgggcatttggtgagagtcaaagctgaccatggatccctggggccaacggcaacagcatgggcctcacctcctctgtgatttctttctttgcaccaaagacatcagtctccaacatgtttctgttttgttgtttgattcagcaaaaatctcccagtgacaacatcgcaatagttttttacttctcttaggtggctctgggaatgggagaggggtaggatgtacaggggtagtttgttttagaaccagccgtattttacatgaagctgtataattaattgtcattatttttgttagcaaagattaaatgtgtcattggaagccatccctttttttacatttcatacaacagaaaccagaaaagcaatactgtttccattttaaggatatgattaatattattaatataataatgatgatgatgatgatgaaaactaaggatttttcaagagatctttctttccaaaacatttctggacagtacctgattgtatttttttttttaaataaaagcacaagtacttttgagaaaaaaaaagcaggagaaaagggggggccaaaaaccagggcagtgggacccttggaggccaggggtaaaagaggggaagggggaaagtggcggggcttcgggggaccaacgggaattgtgtggtggctgtgatggaccnn

SEQ ID NO: 11552 - DNA, 1194 bp, Homo sapiens
ccgcgggctggggcgggatgatccgcgggaccttccagaagagcggccggcgccgtgactcagcactggggcggagcggggcgggaccacccttataaggctcggaggccgcgaggccttcgctggagtttcgccgccgcagtcttcgccaccatgccgccctacaccgtggtctatttcccagttcgaggccgctgcgcggccctgcgcatgctgctggcagatcagggccagagctggaaggaggaggtggtgaccgtggagacgtggcaggagggctcactcaaagcctcctgcctatacgggcagctccccaagttccaggacggagacctcaccctgtaccagtccaataccatcctgcgtcacctgggccgcacccttgggctctatgggaaggaccagcaggaggcagccctggtggacatggtgaatgacggcgtggaggacctccgctgcaaatacatctccctcatctacaccaactatgaggcgggcaaggatgactatgtgaaggcactgcccgggcaactgaagccttttgagaccctgctgtcccagaaccagggaggcaagaccttcattgtgggagaccagatctccttcgctgactacaacctgctggacttgctgctgatccatgaggtcctagcccctggctgcctggatgcgttccccctgctctcagcatatgtggggcgcctcagtgcccggcccaagctcaaggccttcctggcctcccctgagtacgtgaacctccccatcaatggcaacgggaaacagtgagggttggggggactctgagcgggaggcagagtttgccttcctttctccaggaccaataaaatttctaagagagctaaaaaaaaaaaacaaaaaaactcgagggggggcccggtacccaattcgccctatagtgagtcgtattacaattcactggccgtcgttttacaacgtcgtgactgggaaaaccctggcgttacccaacttaatcgccttgcagcacatccccctttcgccagctggcgtaatagcgaagaggcccgcaccgatcgcccttcccaacagttgcgcagcctgaatggcgaatggcaaattgtaagcgttaatattttggtaaaattcgcgttaaaattttgttaaatcagctcattttttaaccaataggccgaaatcggcaaaatcccttataaa

SEQ ID NO: 11553 - DNA, 1975 bp, Homo sapiens
  misc_feature 1975: n = A,T,C or G
gcgtccgccccgcgtccgggccccagcaggaaggagggagggaaagaggcgagaggaggagttttccagcccggccttcgcccgcccgctagcacgcagtcccttggtctcttcggtctcctggcccccgggaagcgcgctgcgctgccgaggcgagctaagcgcccgctcgccatggggagccccgcacatcggcccgcgctgctgctgctgctgccgcctctgctgctgctgctgctgctgcgcgtcccgcccagccgcagcttcccaggatcgggagactcaccactagaagacgatgaagtcgggtattcacaccctagatataaagataccccgtggtgctcccccatcaaggtgaagtatggggatgtgtactgcagggcccctcaaggaggatactacaaaacagccctgggaaccaggtgcgacattcgctgccagaagggctacgagctgcatggctcttccctactgatctgccagtcaaacaaacgatggtctgacaaggtcatctgcaaacaaaagcgatgtcctacccttgccatgccagcaaatggagggtttaagtgtgtagatggtgcctactttaactcccggtgtgagtattattgttcaccaggatacacgttgaaaggggagcggaccgtcacatgtatggacaacaaggcctggagcggccggccagcctcctgtgtggatatggaacctcctagaatcaagtgcccaagtgtgaaggaacgcattgcagaacccaacaaactgacagtccgggtgtcctgggagacacccgaaggaagagacacagcagatggaattcttactgatgtcattctaaaaggcctccccccaggctccaactttccagaaggagaccacaagatccagtacacagtctatgacagagctgagaataagggcacttgcaaatttcgagttaaagtaagagtcaaacgctgtggcaaactcaatgccccagagaatggttacatgaagtgctccagcgacggtgataattatggagccacctgtgagttctcctgcatcggcggctatgagctccagggtagccctgcccgagtatgtcaatccaacctggcttggtctggcacggagcccacctgtgcagccatgaacgtcaatgtgggtgtcagaacggcagctgcacttctggatcagttttatgagaaaaggagactcctcattgtgtccacacccacagcccgaaacctcctttaccggctccagctaggaatgctgcagcaagcacagtgtggccttgatcttcgacacatcaccgtggtggagctggtgggtgtgttcccgactctcattggcaggataggagcaaagattatgcctccagccctagcgctgcagctcaggctgttgctgcgaatcccactctactccttcagtatggtgctagtggataagcatggcatggacaaagagcgctatgtctccctggtgatgcctgtggccctgttcaacctgattgacacttttcccttgagaaaagaagagatggtcctacaagccgaaatgagccagacctgtaacacctgacatgatggttcctctcttggcaattcctcttcattgtctacatagtgacatgcacacgggaaagccttaaaaatatccttgatgtacagattttatttgtaattttaaaagtctattttattatgagctttctttgcacttaaaaattagcatgctgctttttgtacttggaagtgtttcaaaaaattatatgaccatatttactctttctaactttctttactccatcatggctggttgattttgtagagaaattagaacccataaccatacacaggctatcaacatgttattcaatgtgacacctaactcttttctattttgttttttaagtaagacttttattaataaaacaaaatgatttggagcaaaaaaaaaaaaaaaaaaaaagggcggccgctagacn

SEQ ID NO: 11554 - DNA, 663 bp, Homo sapiens
cctgtcagagtggcactggttaaagttccaggaaccctgaactgtaagggttcttcatcagtgccaacaggatgacatgaaatgatgtactcagaagtgtcctggaatggggcccatgagatggttgtctgagagagagcttcttgtcctgtctttttccttccaatcaggggctcgctcttctgattattcttcagggcaatgacataaattgtatattcggttcccggttccaggccagtaatagtagcctctgtgacaccagggcggggccgagggaccacttctctgggaggagacccaggcttctcatacttgatgatgtagccggtaatcctggcacgtggcggctgccatgataccagcaaggaattgggtgtggtggccaggaaacgcaggttggatggtgcatcaatggcagtggaggcgtcgatgaccacaggggagctccgagcattgtcattcaaggtgtacaggtagatttttaatttaataaaaagataatatgtttgtattatagaaatgactcagtgggggtgggggagatgatgtaggagaatgggaaaacttcaaggagttatatcaaagaataggtaagagaggattgaatttaacatgcatattggtgagtagtttcagctagaaacacatacaatttattca

SEQ ID NO: 11555 - DNA, 3397 bp, Homo sapiens
ccggcgccttctccgcaccagggtaagccccacccaccagtaagccaatatgtccagcaagcgggccaaagccaagaccaccaagaagcggccacagcgggccacatccaatgtcttcgcaatgtttgaccagtcccagatccaggagtttaaggaggctttcaacatgattgaccagaaccgtgatggcttcattgacaaggaggacctgcacgacatgctggcctcgctgggtttcatccatgaggaccacctccgggagctgctcaccaccatgggtgaccgcttcacagatgaggaagtggacgagatgtaccgggaggcacccattgataagaaaggcaccaagggaaggccccattccggggctgttccccgaggaggaagggaaggggctctgtgtgccccccaggaggaagaggccctgagtcctgggatcagacaccccttcacgtgtatccccacacaaatgcaagctcaccaaggtcccctctcagtccccttccctacaccctgaccggccactgccgcacacccacccagcgagcccaagcgccttctccgcaccagggaagccccacccaccagaagccaagatgtccagcaagcgggccaaagccaagaccaccaagaagcggccacagcgggccacatccaatgtcttcgcaatgtttgaccagtcccagatccaggagtttaaggaggctttcaacatgattgaccagaaccgtgatggcttcattgacaaggaggacctgcacgacatgctggcctcgctggggaagaaccccacagacgaatacctggagggcatgatgagcgaggccccggggcccatcaacttcaccatgttcctcaccatgtttggggagaagctgaacggcacggaccccgaggatgtgattcgcaacgcctttgcctgcttcgacgaggaagcctcaggtttcatccatgaggaccacctccgggagctgctcaccaccatgggtgaccgcttcacagatgaggaagtggacgagatgtacctcggccgcccgggcaggtcacgactgttacagaggtctccagagccttctctctcctgtgcaaaatggcaactcttaaggaaaaactcattgcaccagttgcggaagaagaggcaacagttccaaacaataagatcactgtagtgggtgttggacaagttggtatggcgtgtgctatcagcattctgggaaagtctctggctgatgaacttgctcttgtggatgttttggaagataagcttaaaggagaaatgatggatctgcagcatgggagcttatttcttcagacacctaaaattgtggcagataaagattattctgtgaccgccaattctaagattgtagtggtaactgcaggagtccgtcagcaagaaggggagagtcggctcaatctggtgcagagaaatgttaatgtcttcaaattcattattcctcagatcgtcaagtacagtcctgattgcatcataattgtggtttccaacccagtggacattcttacgtatgttacctggaaactaagtggattacccaaacaccgcgtgattggaagtggatgtaatctggattctgctagatttcgctaccttatggctgaaaaacttggcattcatcccagcagctgccatggatggattttgggggaacatggcgactcaagtgtggctgtgtggagtggtgtgaatgtggcaggtgtttctctccaggaattgaatccagaaatgggaactgacaatgatagtgaaaattggaaggaagtgcataagatggtggttgaaagtgcctatgaagtcatcaagctaaaaggatataccaactgggctattggattaagtgtggctgatcttattgaatccatgttgaaaaatctatccaggattcatcccgtgtcaacaatagtaaaggcaggggatgtatggcattgagaatgaagtcttcctgagccttccatgtatcctcaatgcccggggattaaccagcgttatcaaccagaagctaaaggatgatgaggttgctcagctcaagaaaagtgcagataccctgtgggacatccagaaggacctaaaagacctgtgactagtgagctctaggctgtagaaatttaaaaactacaatgtgattaactcgagcctttagttttcatccatgtacatggatcacagtttgctttgatcttcttcaatatgtgaatttgggctcacagaatcaaagcctatgcttggtttaatgcttggcaatctgagctcttgaacaaataaaattaactatgttgctgggcaacaacaaacacaaaggggcggcgcaaaaaacaccaggggccccataccgccaattttgtcacagggcgcaagagagttaaaaacggggcgaacaccgaacacacggcataggcacaccggggtgggcaacacacccgccacatgtcgttccccccctaaaccatcagccagacatagatggaccagatagacgtaacactcacggaccacaccagcacgcagcaacgacgaaagcagcgaccacaccgagctctgctaggactgcccacaaccgcgccacacgaccgacagaaggcacgagctgtgacgcgccccacgacagcaggcaggcagcagcacgcccctcctacacacccggcagcgaacggagcaaaccacaaggcacgtccgagcggcggcggcgagccgcagcagagccagcagccggcacacggccgacggccagaagaaagaagagcagaccagccaacgagagaagagcgacgaggcggaggcacgccgcaaaaaggctagggcaggcgaggcggagcggagcagccgacgccgggcgggacgggcgtggcggcgggacggaggaggccgcgcaggcgccgcaggaacggccacgagaagggagcggaggcggaagggggcggcgaggacggcgcaggagcgggcgacgcgcgagcgagcggggcggcggccccaaccacggcggggcgacgaggaaggcgacaagcgacaggccgtccagcgggcgaggacgccgacgacggggacgaggaagcacagcagagagccagcgcacgcggggagcgacagagtcggagtggcagcgggagggcgaaccgaggagcggagaagggaggctgtggacacggcggagagcgtgtgcacggcaccaagcgacgaccggcggccgagggacaacaggcagcggccgacgacacgaccagacaggcgctggccgagcgaggacgacgcgcgtggacgaccgccacgccacccgacaccacaacgcagacaatgagccagcacaagagcacagaacgcagccacagacgtcgacccgccgagcagacagcaacacagacagcgcacagactcacgcgcaca

SEQ ID NO: 11556 - DNA, 1189 bp, Homo sapiens
  misc_feature 1, 2, 3, 1188, 1189: n = A,T,C or G
nnnaccacctgcgcttggctaggtctgtaaaggtaggcgatgccactcccctctgccacggccatagcagtagcacttgtatttgacaccacccacacttctcccatgaatctccaatttgataaaacgtcccagtctctgaatcctggcattggtcgacgggatcacacttccacctgccccgaccctgaccgaagcatgtacagttcagcatgtgcccctcttcatgacgcttgtggaatgtgtcgttcacattgtaagtgatgtcatcaacaatgcactgatctcgaagctgcgagtaggcaatgcatgtccattccccacgaccattcccaacacacgtgcacctcatcatgtgacccatgtcatgctgcttatcccactgatctccaatgcggtacatgaccccttcattggttgtgcagatttcctcgtgggcagccatggggcagaacccaaacttctggtcggcatcatagttctgtgtggtcccacaccacttcatgttgtctcttctgccctcagaagtgcaatcagtgtaattgtggttgttgtataggaaggggaagtggcacaaggcaccattggaatttcctcctcgagtctgaaccaaaacagtgtggtctgtgcagaaagagtatttctggtcctgctcataattcgaagttgtgctgcaccaaagatgtccgtcctgtcgcccttctgtggtgcaggagtagaacgtcctgccattgtaggtgaatggtaagacacatggctctccatttgagttgccaccgtaagtctgggttacagctgtctcttggcagctgactccgttgcccaggcacgtgcaaagcatttgcttatttccttgtgtcttcagccactgcatccccacagagtagaccacaccactgtctgtgacacagtggccatagggaggaggctgggggtgaggctgcggttggtaaacagctgcacgaacatcggtgaaggggccagatccgctcgatgtggtctgcacagaggtgtgcctctcacacttccactctcctcggccgttgcctgtgcagatgcactggagcaggtttcctcgattatccttcttgctccagggtctccagtctataggatgtccttgtgtcgtgctagctgcctacatctaccccagtgtgatcatcggtgcctccgccttgtccaacacann

SEQ ID NO: 11557 - DNA, 1588 bp, Homo sapiens
cgtccggctgcggcgcgcggctgcgcgggactcggccttctgggcgcgcgcgacgtcagtttgagttctgtgttctccccgcccgtgtcccgcccgacccgcgcccgcgatgctggcgctgcgctgcggctcccgctggctcggcgctgctctccgtcccgcgctccgtgccgctgcgcctccccgcggcccgcgcctgcagcaagggctccggcgacccgtcctcttcctcctcctccgggaacccgctcgtgtacctggacgtggacgccaacgggaagccgctcggccgcgtggtgctggagctgaaggcagatgtcgtcccaaagacagctgagaacttcagagccctgtgcactggtgagaagggcttcggctacaaaggctccaccttccacagggtgatcccttccttcatgtgccaggcgggcgacttcaccaaccacaatggcacaggcgggaagtccatctacggaagccgctttcctgacgagaactttacactgaagcacgtggggccaggtgtcctgtccatggctaatgctggtcctaacaccaacggctcccagttcttcatctgcaccataaagacagactggttggatggcaagcatgttgtgttcggtcacgtcaaagagggcatggacgtcgtgaagaaaatagaatctttcggctctaagagtgggaggacatccaagaagattgtcatcacagactgtggccagttgagctaatctgtgggccagggtgctggcatggtggcagctgcaaatgtccatgcacccaggtggccgcgttgggctgtcagccaaggtgcctgaaacgatacgtgtgcccactccactgtcacagtgtgcctgaggaaggctgctagggatgttagacctcgggccaggacccaccacattgcttcctaatacccacccttcctcacgacctcatttctgggcatctttgtggacatgatggtcacccaccccttgtcaagcattgcctgtgattgcccagcccagattcatctgtgccttggacatggtgatggtgatgggttgccatccaagtgaaagtcttttccttgaccaagggggacagtcagtttttggcaaaaggactctaatacctgtttaatattgtcttcctaattgggataattttaattaacaagattgactagaaggttgaactgcaacactaacttccccatgctgtggtgtgacctgagttggttgacaccaggcacagaccccagagcttggtttttggaaacacaactcagggcttttgtgaaggtcccccgctgagatcttcctcctggttactgtgaagctgtggtatgctgctgtcgttttgaaggaggccattgggggttgcaccagttaactgggacaaactcattatgtgcctgacagtgaatccgtgttctacacaagtgctgtaaccctgttccgaggacaatccggggctgattcgggtgtaaaccacccacctcgtgtgttcacattgacacggttggcccatgaaacccttttcacaaaaaagggggcataaatgggagagaatagtctgttcaacccatatcaaactcaga

SEQ ID NO: 11558 - DNA, 1822 bp, Homo sapiens
ggagtcgacccacgcgtccgcggacgcgtggggtccccgcgccagagacgcagccgcgctcccaccacccacacccaccgcgccctcgttcgcctcttctccgggagccagtccgcgccaccgccgccgcccaggccatcgccaccctccgcagccatgtccaccaggtccgtgtcctcgtcctcctaccgcaggatgttcggcggcccgggcaccgcgagccggccgagctccagccggagctacgtgactacgtccacccgcacctacagcctgggcagcgcgctgcgccccagcaccagccgcagcctctacgcctcgtccccgggcggcgtgtatgccacgcgctcctctgccgtgcgcctgcggagcagcgtgcccggggtgcggctcctgcaggactcggtggacttctcgctggccgacgccatcaacaccgagttcaagaacacccgcaccaacgagaaggtggagctgcaggagctgaatgaccgcttcgccaactacatcgacaaggtgcgcttcctggagcagcagaataagatcctgctggccgagctcgagcagctcaagggccaaggcaagtcgcgcctgggggaccagctaaccaacgacaaagcccgcgtcgaggtggagcgcgacaacctggccgaggacatcatgcgcctccgggagaaattgcaggaggagatgcttcagagagaggaagccgaaaacaccctgcaatctttcagacaggatgttgacaatgcgtctctggcacgtcttgaccttgaacgcaaagtggaatctttgcaagaagagattgcctttttgaagaaactccacgaagaggaaatccaggagctgcaggctcagattcaggaacagcatgtccaaatcgatgtggatgtttccaagcctgacctcacggctgccctgcgtgacgtacgtcagcaatatgaaagtgtggctgccaaccggaacaatgacgccctgcgccaggcaaagcaggagtccactgagtaccggagacaggtgcagtccctcacctgtgaagtggatgcccttaaaggaaccaatgagtccctggaacgccagatgcgtgaaatggaagagaactttgccgttgaagctgctaactaccaagacactattggccgcctgcaggatgagattcagaatatgaaggaggaaatggctcgtcaccttcgtgaataccaagacctgctcaatgttaagatggcccttgacattgagattgccacctacaggaagctgctggaaggcgaggagagcaggatttctctgcctcttccaaacttttcctccctgaacctgagggaaactaatctggattcactccctctggttgatacccactcaaaaaggacacttctgattaagacggttgaaactagagatggacaggttatcaacgaaacttctcagcatcacgatgaccttgaataaaaattgcacacactcagtgcagcaatatattaccagcaagaataaaaaagaaatccatatcttaaagaaacagctttcaagtgcctttctgcagtttttcaggagcgcaagatagatttggaataggaataagctctagttcttaacaaccgacactcctacaagatttagaaaaaagtttacaacataatctagtttacagaaaaatcttgtgctagaatactttttaaaaggtattttgaataccattaaaactgcttttttttttccagcaagtatccaaccaacttggttctgcttcaataaatctttggaaaaactcaaaaaaaaaaaaaaaaaaagggggggcctttaaattttttaaaaaaaa

SEQ ID NO: 11559 - DNA, 3113 bp, Homo sapiens
ccacgcgtccgcggacgcgtgtgcgccgggccgcgcggcaattggtccccgcgccgacctccgcccgcgagcgccgccgcttcccttccccgccccgcgtccctccccctcggccccgcgcgtcgcctgtcctccgagccagtcgctgacagccgcggcgccgcgagcttctcctctcctcacgaccgaggcagagcagtcattatggcgaaccttggctgctggatgctggttctctttgtggccacatggagtgacctgggcctctgcaagaagcgcccgaagcctggaggatggaacactgggggcagccgatacccggggcagggcagccctggaggcaaccgctacccacctcagggcggtggtggctgggggcagcctcatggatggtggtggctgggggcagcctcatggtggtggctgggggcagccccatggtggtggctgggggcagcctcatggtggtggctggggtcaaggaggtggcacccacagtcagtggaacaagccgagtaagccaaaaaccaacatgaagcacatggctggtgctgcagcagctggggcagtggtggggggccttggcggctacatgctgggaagtgccatgagcaggcccatcatacatttcggcagtgactatgaggaccgttactatcgtgaaaacatgcaccgttaccccaaccaagtgtactacaggcccatggatgagtacagcaaccagaacaactttgtgcacgactgcgtcaatatcacaatcaagcagcacacggtcaccccaaccaccaagggggagaacttcaccgagaccgacgttaagatgatggagcgcgtggttgagcagatgtgtatcacccagtacgagagggaatctcaggcctattaccagagaggatcgagcatggtcctcttctcctctccacctgtgatcctcctgatctctttcctcatcttcctgatagtgggatgaggaaggtcttcctgttttcaccatctttctaatctttttccagcttgagggaggcggtatccacctgcagccctttttagtggtggtgtctcactctttcttctctctttgtcccggataggctaatcaatacccttggcactgatgggcactggaaaacatagagtagacctgagatgctggtcaagccccctttgattgagttcatcatgagccgttgctaatgccaggccagtaaaagtataacagcaaataaccattggttaatctggacttatttttggacttagtgcaacaggttgaggctaaaacaaatctcagaacagtctgaaatacctttgcctggatacctctggctccttcagcagctagagctcagtatactaatgccctatcttagtagagatttcatagctatttagagatattttccattttaagaaaacccgacaacatttctgccaggtttgttaggaggccacatgatacttattcaaaaaaaatcctagagattcttagctcttgggatgcaggctcagcccgctggagcatgagctctgtgtgtaccgagaactggggtgatgttttacttttcacagtatgggctacacagcagctgttcaacaagagtaaatattgtcacaacactgaacctctggctagaggacatattcacagtgaacataactgtaacatatatgaaaggcttctgggacttgaaatcaaatgtttgggaatggtgcccttggaggcaacctcccattttagatgtttaaaggaccctatatgtggcattcctttctttaaactataggtaattaaggcagctgaaaagtaaattgccttctagacactgaaggcaaatctcctttgtccatttacctggaaaccagaatgattttgacatacaggagagctgcagttgtgaaagcaccatcatcatagaggatgatgtaattaaaaaatggtcagtgtgcaaagaaaagaactgcttgcatttctttatttctgtctcataattgtcaaaaaccagaattaggtcaagttcatagtttctgtaattggcttttgaatcaaagaatagggagacaatctaaaaaatatcttaggttggagatgacagaaatatgattgatttgaagtggaaaaagaaattctgttaatgttaattaaagtaaaattattccctgaattgtttgatattgtcacctagcagatatgtattacttttctgcaatgttattattggcttgcactttgtgagtattctatgtaaaaatatatatgtatataaaatatatattgcataggacagacttaggagttttgtttagagcagttaacatctgaagtgtctaatgcattaacttttgtaaggtactgaatacttaatatgtgggaaacccttttgcgtggtccttaggcttacaatgtgcactgaatcgtttcatgtaagaatccaaagtggacaccattaacaggtctttgaaatatgcatgtactttatattttctatatttgtaactttgcatgttcttgttttgttatataaaaaaattgtaaatgtttaatatctgactgaaattaaacgagcgaagatgagcaccacaaaaacagagcagaaagacgacacagttgacgcaacaaccaaacatagcaacgaggccactggagcactcacaaacaataatcaacgcgctacaggccgtcaacccggaacacaaatgaccaacctaaccacgcatcgacagggccgcgcccccttcaacatcgcatcatccctgagcggagcacaccgtggactctccggcgctcccccactacttccaccagcatcgtgaccgaactctataccgacgatgagtattacgtgatgggcccggcaccatagaaagccagaccaaggacagacagaaacaacaacgggtggcaggactggagagacaccgactgacccgggcggcgaaggagcgcgccggacaagcactgaggaacacagcggccacgatactacacaatggtgtgatcggcaaaaccccgcgagccgcgcgaaacggcgcggcgatgcatccagaattcgcggcccagagaaatggccgaaggcgccccgcgccacacgagcgcggcgcgagcggacgacaca

SEQ ID NO: 11560 - DNA, 927 bp, Homo sapiens
  misc_feature 1, 2, 3, 4, 5, 910, 913, 919, 926, 927: n = A,T,C or G
nnnnncctggtgagacggacttcacctggggcccagataacaggataccgactgaccgtgggccttacccgaagaggacagcccaggcagtacaatgtgggtccctctgtctccaagtacccactgaggaatctgcagcctgcatctgagtacaccgtatccctcgtggccataaagggcaaccaagagagccccaaagccactggagtctttaccacactgcagcctgggagctctattccaccttacaacaccgaggtgactgagaccaccattgtgatcacatggacgcctgctccaagaattggttttaagctgggtgtacgaccaagccagggaggagaggcaccacgagaagtgacttcagactcaggaagcatcgttgtgtccggcttgactccaggagtagaatacgtctacaccatccaagtcctgagagatggacaggaaagagatgcgccaattgtaaacaaagtggtgacaccattgtctccaccaacaaacttgcatctggaggcaaaccctgacactggagtgctcacagtctcctgggagaggagcaccaccccagacattactggttatagaattaccacaacccctacaaacggccagcagggaaattctttggaagaagtggtccatgctgatcagagctcctgcacttttgataacctgagtcccggcctggagtacaatgtcagtgtttacactgtcaaggatgacaaggaaagtgtccctatctctgataccatcatcccagctgttcctcctcccactgacctgcgattcaccaacattggtccagacaccatgcgtgtcacctgggctccacccccatccattgatttaaccatcttccttggtgggttacttcaactgtgaaaatggggaggttgtttcaagagtngtnaatttntccttann

SEQ ID NO: 11561 - DNA, 2749 bp, Homo sapiens
tcgacccacgcgtccgctggcccgtgcggaaagggcgcggagagccccggcgcggagcaggcgggggacggtattcagaattcgagcgcaggagctccgcttctccacctgctcccggggagctattgggcctcctcttccagcagcctctatctttattctacaggatccagagaatcacccgctgatggtttttgcccaggcctgaaacaaccagagagctacgggaaaggaagggcttggcttgccagaggaattttccaagtgctcaaacgccaggcttacggcgcctgtgatccgtccaggaggacaaagtgggatttgaagatccactccacttctgctcatggcgggccagggcctgcccctgcacgtggccacactgctgactgggctgctggaatgcctgggctttgctggcgtcctctttggctggccttcactagtgtttgtcttcaagaatgaagattactttaaggatctgtgtggaccagatgctgggccgattggcaatgccacagggcaggctggaaggctgggatgcatgggagaccttttttctactccagactgcaaagcccaggatgagaggttctcactcatcttcaccctggggtccttcatgaacaacttcatgacattccccactggctacatctttgaccggttcaagaccaccgtggcacgcctcatagccatatttttctacagcaacggcacactcaatcatagccttcacctctggaggctcagccgtgctgctcttcctggccatgccaatgctcaccattgggggaatcctgtttctcatcaccaacctgcagattgggaacctatttggccaacaccgttcgaccatcatcactctgtacaatggagcatttgactcttcctcggcagtcttccttattattaagcttctttatgaaaaaggcatcagcctcagggcctccttcatcttcatctctgtctgcagtacctggcatgtagcacgcactttcctcctgatgccccgggggcacatcccatacccactgccccccaactacagctatggcctgtgccctgggaatggcaccacaaaggaagagaaggaaacagctgagcatgaaaacagggagctacagtcaaaggagttcctttcagcgaaggaagagaccccaggggcagggcagaagcaggaactccgctccttctggagctacgctttctctcggcgctttgcctggcacctggtgtggctgtctgtgatacagttgtggcactacctcttcattggcactctcaactccttgctgaccaacatggccggtggggacatggcacgagtcagcacctacacaaatgcctttgccttcactcagttcggagtgctgtgtgccccctggaatggcctgctcatggaccggcttaaacagaagtaccagaaggaagcaagaaagacaggttcctccactttggcggtggccctctgctcgacggtgccttcgctggccctgacatccctgctgtgcctgggcttcgccctctgtgcctcagtccccatcctccctctccagtacctcaccttcatcctgcaagtgatcagccgctccttcctctatgggagcaacgcggccttcctcacccttgctttcccttcagagcactttggcaagctctttgggctggtgatggccttgtcggctgtggtgtctctgctccagttccccatcttcaccctcatcaaaggctcccttcagaatgacccattttacgtgaatgtgatgttcatgcttgccattcttctgacattcttccacccctttctggtatatcgggaatgccgtacttggaaagaaagtccctctgcaattgcatagttcagaagccctcacttttcagccccgaggatggttttgttcatcttccaccacctttgaggacctcgtgtcccaaaagactttgcctatcccagcaaaacacacacacacacacacacacacacacaaaataaagacacacaaggacgtctgcgcagcaagaaaagaatctcagttgccaagcagattgatatcacacagactcaaagcaaaggcatgtggaacttctttatttcaaaacagaagtgtctccttgcacttagccttggcagacccttgactccaggggagatgacctgggggaggaagtgtgtcaactatttctttaggcctgtttggctccgaagcctatatgtgcctggatcctctgccacgggttaaattttcaggtgaagagtgaggttgtcatggcctcagctatgcttcctggctctccctcaagagtgcagccttggctagagaactcacagctctgggaaaaagaggagcagacagggttccctgggcccagtctcagcccagccactgatgctggatgaccttggcctgaccctggtctggtctcagaatcacttttcccatctgtaaaattgagatgaattttggtgttgaaagttcttcctggagcagatgtcctagaaggttttaggaatagtgacagagtcaggccaccccaagggccatgggagccagctgacctgcttgaccgaaggatttctgacagactatctttggggatgttttcaagaagggatataagttatttactttgggcatttaaaagaaaatttctctcgggaataattttatagaaaaataaagcttctgtgtctaaggcaaaaaaaaaaaaaaaaaaaaaaaaaaaaaaaaaaaaaaaaaaaaaaaaa

SEQ ID NO: 11562 - DNA, 1724 bp, Homo sapiens
tttgaggaacatggttttaggcggaccacaccgcccacaacggccacccccataaggcataggccaagaccatacccgccgaatgtaggacaagaagctctctctcagacaaccatctcatgggccccattccaggacacttctctccaatcttgtagttcacaccattgtcatggcaccatctagatgaatcacatctgaaatgaccacttccaaagcctaagcactggcacaacagtttaaagcctgattcagacattcgttcccactcatctccaacggcataatgggaaactgtgtaggggtcaaagcacgagtcatccgtaggttggttcaagccttcgttgacagagttgcccacggtaacaacctcttcccgaaccttatgcctctgctggtctttcagtgcctccactatgatgttgtaggtggccacctactggtgaggcctgtcagagtggcactggtagaagttcccaggaaccctgaactgtaagggttcttcatcagtgccaacaggatgacatgaaatgatgtactcagaagtgtcctggaatggggcccatgagatggttgtctgagagagagcttcttgtcctgtagaggcatttggattgagtcccggaccgtgtgggtacaggtgatagtctacatcttccctggggatgtgaccaatttggatttcctcacctacattcggcgggtatggtcttggcctatgccttatgggggtggccgttgtgggcggtgtggtccgcctaaaaccatgttcctcaaagatcatttgttgcccaacactgggttgctgaccagaagtgccaggaagctgaataccatttccagtgtcatacccagggtgggtgacgaaaggggtcttttgaactgtggaaggaacatccaagatctctggtccatgaagattggggtgtggaagggttaccagttggggaagctcgtctgtctttttccttccaatcaggggctcgctcttctgattattcttcagggcaatgacataaattgtatattcggttcccggttccaggccagtaatagtagcctctgtgacaccagggcggggccgagcggaccacttctctgggaggagacccaggcttctcatacttgatgatgtagccggtaatcctggcacgtggcggctgccatgataccagcaaggaattgggtgtggtggccaggaaacgcaggttggatggtgcatcaatggcagtggaggcgtcgatgaccacaggggagctccgagcattgtcattcaaggtgtacaggtagatcttgtagtcagtgcctggttgtaaacctgtgatcatcgacgcctccactgccattgatgcaccatccaacctgcgtttcctggccaccacacccaattccttgctggtatcatggcagccgccacgtgccaggattaccggctacatcatcaagtatgagaagcctgggtctcctcccagagaagtggtccctcggccccgccctggtgtcacagaggctactattactggcctggaaccgggaaccgaatatacaatttatgtcattgccctgaagaataatcagaagagcgagcccctgattggaaggaaaaagacagacgagcttccccaactggtaacccttccacaccccaatcttcatggaccagagatcttggatgttccttccacagttcaaaagacccctttcgtcacccaccctgggtatga

SEQ ID NO: 11563 - DNA, 4081 bp, Homo sapiens
cacgcgtccgctcgccgccgggcgcctgggagcttcggacccggaagtggcgccctgggctcgcggcggtgccgcggggatggcgggagccggagctggagccggagctcgcggcggagcggcggcgggggtcgaggctcgagctcgcgatccaccgcccgcgcaccgcgcacatcctcgccaccctcggcctgcggctcagccctcggcccgcaggatggatggcgggtcagggggcctggggtctggggacaacgccccgaccactgaggctcttttcgtggcactgggcgcgggcgtgacggcgctcagccatcccctgctctacgtgaagctgctcatccaggtgggtcatgagccgatgccccccacccttgggaccaatgtgctggggaggaaggtcctctatctgccgagcttcttcacctacgccaagtacatcgtgcaagtggatggtaagatagggctgttccgaggcctgagtccccggctgatgtccaacgccctctctactgtgactcggggtagcatgaagaaggttttccctccagatgagattgagcaggtttccaacaaggatgatatgaagacttccctgaagaaagttgtgaaggagacctcctacgagatgatgatgcagtgtgtgtcccgcatgttggcccaccccctgcatgtcatctcaatgcgctgcatggtccagtttgtgggacgggaggccaagtacagtggtgtgctgagctccattgggaagattttcaaagaggaagggctgctgggattcttcgttggattaatccctcacctcctgggcgatgtggttttcttgtggggctgtaacctgctggcccacttcatcaatgcctacctggtggatgacagcttcagccaggccctggccatccggagctataccaagttcgtgatggggattgcagtgagcatgctgacctaccccttcctgctagttggcgacctcatggctgtgaacaactgcgggctgcaagctgggctccccccttactccccagtgttcaaatcctggattcactgctggaagtacctgagtgtgcagggccagctcttccgaggctccagcctgcttttccgccgggtgtcatcaggatcatgctttgccctggagtaacctgaatcatctaaaaaacacggtctcaacctggccaccgtgggtgaggcctgaccaccttgggacacctgcaagacgactccaacccaacaacaaccagatgtgctccagcccagccgggcttcagttccatatttgccatgtgtctgtccagatgtggggttgagcgggggtggggctgcacccagtggattgggtcacccggcagacctagggaaggtgaggcgaggtggggagttggcagaatccccatacctcgcagatttgctgagtctgtcttgtgcagagggccagagaatggcttatgggggcccaggttggatggggaaaggctaatggggtcagaccccaccccgtctacccctccagtcagcccagcgcccatcctgcagctcagctgggagcatcattctcctgctttgtacatagggtgtggtcccctggcacgtggccaccatcatgtctaggcctatgctaggaggcaaatggccaggctctgcctgtgtttttctcaacactacttttctgatatgagggcagcacctgcctctgaatgggaaatcatgcaactactcagaatgtgtcctcctcatctaatgctcatctgtttaatggtgatgcctcgcgtacaggatctggttacctgtgcagttgtgaatacccagaggttgggagatgaggtcaaatcttaccatgaactttaaaactgggtaggactagagacactgatctgcccaacctctgggtattcacaactgcacaggtaaccagatcctgtacgcgaggcatcaccattaaacagatgagcattagatgaggaggacacattctgagtagttgcatgatttcccattcagaggcaggtgctgccctcatatcagaaaagtagtgttgagaaaaacacaggcagagcctggccatttgcctcctagcataggcctagacatgatggtggccacgtgccaggggaccacaccctatgtacaaagcaggagaatgatgctcccagctgagctgcaggatgggcgctgggctgactggaggggtagacggggtggggtctgaccccattagcctttccccatccaacctgggcccccataagccattctctggccctctgcacaagacagactcagcaaatctgcgaggtatggggattctgccaactccccacctcgcctcaccttccctaggtctgccgggtgacccaatccactgggtgcagccccacccccgctcaaccccacatctggacagacacatggcaaatatggaactgaagcccggctgggctggagcacatctggttgttgttgggttggagtcgtcttgcaggtgtcccaaggtggtcaggcctcacccacggtggccaggttgagaccgtgttttttagatgattcaggttactccagggcaaagcatgatcctgatgacacccggcggaaaagcaggctggagcctcggaagagctggccctggaccagaaggaaaagtaaggtgagtgaaagggaggccacgcttccttgtccctccgagaggaaggccagtgtcaggcaaagaagggtccaggagctcaaagacccagctccggggtggacggcctcggcctacatccctggagggcagaatctgcctgtgttgaagcagaagggagcggttcatttcctgcccaggggtgtctttggggctactctgtaggagagccctagagaggaggctcattgcccctcttgcttcagagcccaagtggtctaggactctttcagtgctcatagggaggacgagacacactcacgctgaccagggccactgggaagaactgcggctctcctccctgcttccctcccatctgtcctcttctcagcctcgaggccactcagagttctggctccctccgggccactgccccatttcactgcgaggcaaatcaaggccaggaaaaggcaaggttctgccctcggccaaagcctggacccctgactgctgggcccaagagctccagctacggagaggtagcttcggtacagaacacgagaacccaaggttggtactgctgccagttccccacgtggcccagccccacccacaggctctcctgggcccaggaatgtcctgcaggagggaggagtcggtttccaatgccagccgccctaacaacccaggaactcagctcaactggttacagacctcgaattttcagcccatgttacttgaaggagaagcagttcttgggctttaccacctgccacctgggccagagttctcttatccttatcctaagagtctttaagactcaaagaagaaaaggtcttgtctgatgtataatcttaaaataaacccacacttagccacctcaaatcctttctgaaattatgtaagatgaaaacttaaatgccttatagataccaagtatctcctcacaatattgaattccatgaaaccacttatctttgcatgcaatgaagcatccacaaaaccatttcagctgaaggatgtagcaaagaacaggaaaggcctccgccgtccagtgcttgctcacctgcacactcaggtacttccagcagtgaatccaggatttgaacactggggagtaaggggggagcccagcttgcagcccgcagttgttcacagccatgaggtcgccaactagcaggaaggggtaggtcagcatgctcactgcaatccccatcacgaacttggtatagctccggatggccagggcctggctgaagctgtcatccaccaggtaggcattgatgaagtgggccagcaggttacagccccacaagaaaaccacatcgcccaggaggtgagggattaatccaacgaagaatcccagcagcccttcctctttgaaaatcttcccaatggagctcagcacaccactgtacttggcctcccgtcccacaaactggaccatgcagcgcacggacg

SEQ ID NO: 11564 - DNA, 1184 bp, Homo sapiens
  misc_feature 1, 2, 3, 4, 5, 6, 7, 19, 37, 57, 63, 145, 1180, 1181, 1182,1183, 1184: n = A,T,C or G
nnnnnnncctgcctgaagnctgaacccgtttgctccnagcctccggactaaaactcnattaangttggggagattttttttcaaattggacgggtgtttttaaaagtctcgtctttcccagcccccaaacaaggtgtaacaacgnactcttcccttcctaaggaatgagactgagagacaaggatcactccagacatctcctacctacggtttggcgttatttttcttaaaggcgaggcttgcattcctcagcagctatgtacaaagctccctgaaaccttgtctctctaaagttagtgtgcagggttttccaaggctgagagagcctaatacatggggaagcacttccttgaggtggaagatctctcccttcacctttcctctttttccctgcaggctagtgcctactttttatcagtttgcacaatcgcttagataaacaccgaggaggagattctctttaattatcaaagacacatcttttcagggggccaacaaagcatttatttcacccgccaaactaaaggagagttattccagtttaggaggaagatgcaagcggtttgggaccttgaacaaggcaaatatggttttgcggtgcagaggggcaggatgccgccgacccagccgacccacgggcagttcgcgctgaccaacggggatcccctcaactggacaatcgtaacctgtccggatattataacactgactgtagcggcgcggagccctatcaccacgtgcgagcttcggtcagacaatgcatgccagccaaaaacatactgggtatcagagaacaatttgcgaactggcgcgaagattgctctattacgccgacagaatgggcccggaacaatcagcctatcatcaccccgagctggagaataaggaccaaagagcccccggaatagcctacccatggaacagaggaggagagaggagaaagcaaagacagcacaaagcactcaacagtgggcccacactagaccgcgaggcagaaggaacgacacggacgcacgccgcggcaaatggagcaaaagaggataaaaagaggagaacaaacgcgtaggaagagcgcgaaaaacacagaaacgagaagagcgagacacgcaacaagaagagaaaaaagcgtaaaacgaagccacaagaaaacgcaagcaaacgaaacagaagcgaaaacgannnnn

SEQ ID NO: 11565 - DNA, 1290 bp, Homo sapiens
gtgtatgctgtcactggccgtggagacagccccgcaagcagcaagccaatttccattaattaccgaacagaaattgacaaaccatcccagatgcaagtgaccgatgttcaggacaacagcattagtgtcaagtggctgccttcaagttcccctgttactggttacagagtaaccaccactcccaaaaatggaccaggaccaacaaaaactaaaactgcaggtccagatcaaacagaaatgactattgaaggcttgcagcccacagtggagtatgtggttagtgtctatgctcagaatccaagcggagagagtcagcctctggttcagactgcagtaaccaacattgatcgccctaaaggactggcattcactgatgtggatgtcgattccatcaaaattgcttgggaaagcccacaggggcaagtttccaggtacagggtgacctactcgagccctgaggatggaatccatgagctattccctgcacctgatggtgaagaagacactgcagagctgcaaggcctcagaccgggttctgagtacacagtcagtgtggttgccttgcacgatgatatggagagccagcccctgattggaacccagtccacagctattcctgcaccaactgacctgaagttcactcaggtcacacccacaagcctgagcgcccagtggacaccacccaatgttcagctcactggatatcgagtgcgggtgacccccaaggagaagaccggaccaatgaaagaaatcaaccttgctcctgacagctcatccgtggttgtatcaggacttatggtggccaccaaatatgaagtgagtgtctatgctcttaaggacactttgacaagcagaccagctcagggagttgtcaccactctggagaatgtcagcccaccaagaagggctcgtgtgacagatgctactgagaccaccatcaccattagctggagaaccaagactgagacgatcactggcttccaagttgatgccgttccagccaatggccagactccaatccagagaaccatcaagccagatgtcagaagctacaccatcacaggtttacaaccaggcactgactacaagatctacctgtacacccttgatggacatgtccgagagtcccgggtgggatgagctccttgcattgtgggcatccactcggttctggccaaccaatctgctgtaaggggcatgcaggaaacggtatacagtaaagcgggtcccgaaagttcccccggtaaaggaatggcggcagcacaacatgtgcaatatacacgggaaaga

SEQ ID NO: 11566 - DNA, 1980 bp, Homo sapiens
  misc_feature 1976, 1977, 1978, 1979, 1980: n = A,T,C or G
tggctttacagatttttacccacttcaaatatggccgccaagctccgttctcttttaccgcctgatctacggctacaattctggcttcatgcccgcctccaaaagtgcttcctctcgaggggttgtggttcttactgcgcaggcgcaaaagcaagtcctcttccgggcaaaatggcgatgggactaatgtgcggacgccgggagcttctgcgcttgctacagtccgggcgtcgggtccacagcgtcgcagggccctcgcaatggcttgggaaaccgctgaccacacggctcctattcccagtagccccgtgctgctgtcgcccacactacctcttccttgcggcttccggcccccgcagcctcagtacctctgctatctcttttgcagaagtccaggttcaggcccctcctgttgttgctgcaactccctcacccacagcagtacctgaggtggcttctggagagactgcagatgtagtccaaactgctgcagagcagagcttcgctgaactggggctggggtcatacaccccagtgggactgatccagaatttactggaatttatgcatgttgatctgggcctaccttggtggggggccattgctgcatgtacagtctttgcccgctgcctgatttttcctctcatcgtgacgggccagcgagaggcagccaggatccacaatcacttgccagagatccagaagttttccagtcgaatcagagaggccaagttagcaggagaccatattgagtattacaaggcttcctcggagatggcactttaccagaaaaaacatggtattaaactctataaacctctcattctccctgtgactcaggccccaatcttcatctccttcttcattgctttgagagagatggccaaccttcctgtgcccagcctgcagacaggtggcctctggtggttccaggatctcacggtatccgatcccatctacatattaccactggcagtcactgctacaatgtgggctgttcttgagctaggtgctgagacaggtgtgcaaagttctgaccttcagtggatgagaaatgtcatcagaatgatgcccctgataaccttgcccataaccatgcatttccccacggcagtgtttatgtactggctctcctccaatttgttttccctggtccaagtatcctgtctccggattccagcagtacgcactgtacttaaaatcccccagcgtgttgtacatgacctggacaaattacctccacgggaaggcttcctagagagcttcaaaaaaggctggaaaaatgctgaaatgacgcgtcagctgcgagagcgtgaacaacgcatgcggaatcagttggagctagcagccaggggtcctttacgacagacctttacccacaaccctctcctacaacctggaaaggataaccctcccaatatccctagcagcagcagcaaaccaaagtcaaagtatccctggcacgacacacttggctgacttatgttctgtgcgcattctggcaggaattctgtctcttcagagactcatcctcaaaacaagacttgacactgtgtccttgccccagtcctaggaactgtggcacacagagatgttcattttaaaaacggatttcatgaaacactcttgtacttatgtttataagagagcactgggtagccaagtgatcttcccattcacagagttagtaaacctctgtactacaaaaaaaaacaaaaactagccctaacagaagccaaccggagcagcccctaacgccctcgcaacacgacgcgccaacggaacaaaacaaaaagacaaaaaagaccaagaagagggacagcgcacccacaagaaacaagacaaaatagcaagagcgaccccgctccaagagatgacacaactaaaagagccgccagaaagaggcagtaacaaaatgccgggagcagaagtgaagaaccaaaaaagcgagcacgcaaaggaacaagtatacgcannnnn

SEQ ID NO: 11567 - DNA, 418 bp, Homo sapiens
  misc_feature 416, 417, 418: n = A,T,C or G
acatttgccatctctggttagttgatttctgtcatgttcccttcactgataatcttggcatttcattcttgaagaacaagtggggctctttctctgccatggccatgctgccttgggctgtggtgactcatgtatgtgtctgtcctctgcacttgaatgtgagctctgtgtgggtttttctgttcctctcattagcaggttctgctccctgggcacagaggaggtcatgagttgagagtgggctgtgcgtgcatcctagaatctcagccttcttggagcagcgactattatatgctctggtgggctctcatctccatccgattaagtgtttctctttggctgccacgccagctggatgactgggggttctcttcttaccatcatgaagctgtcaacacccacggtgggccctctcnnn

SEQ ID NO: 11568 - DNA, 563 bp, Homo sapiens
agggcgaattggagctccccgcggtggcggccgaggtacagaatcatattctaagattatgtgcaaatatatgtgtagaaagaggcatttaaaaaaagaggcaggagattgagaagagacatattgaatgaggcactaatctttagaaaaatgatcttttactgaatcaagccatgctcattccttgctgaatccaacagccccaaatctcttttcttatatttggctgttaatttttttccttgcaccatcctagattgttaacaaccattgcacagttggctcatgtatccttacactctgagttataataagttgtatttttataaacaaatacctaaatattcaagttttaaggcgcatggaaactgaatctaggcaacgggtgatttgtgtagcttacaacctgaacagcaagatgttccaattcattctaacagatgtgtataagcacaagttatatcagctgtgtcagatatttaacagatcctacatttattagctatataacagactctacattttcctaagtgcctaagaccaatcctggtagtcacttaagt

SEQ ID NO: 11569 - DNA, 1212 bp, Homo sapiens
  misc_feature 1211, 1212: n = A,T,C or G
taccacaagagattgatgtgcagcgcacaataacttcagatcggtttcttccaacatgtggttgtttgtttcaacaaacatgcaagttaatttggcatgccaaacatctttctctctagctcgccttggaaaaatttttttcataacacaaacaagggtgcaaatattgtccaaacctatttacatttttaccctctagaattacatacattaatatttattgggaggaaagcaaaactgcaaaacatagtctttggcattcacatttgcttcagcagtataattaaaaccttatatttgttttaaagataaacagtttgaaggaaatttaataaatcttgttttggctctgcaaaggagccactatatcaaagcatttaactggagctgttgagttcctgctggtagaatattacttccagcctatttattagcttgtcttccggtggcccaatacatgcttttttccctctacactgaatgaaagtacaaaaagaaaaccatttcttttctctttttcccccagcatcatgcaaggcaaggcaacaccacaaatacaataactgaatttactttgattatactttagtttcttacacttaaaattattttgtattataatacttacttggttatctaaaatcaacattgttgattttaaacggttataaagccagactttaagaagcatttaaaacaattcatgaactctgtatgaaaggaaataattgcctccagcttattcttttgcatttgaagtaaaagaatttccagtatcatcagtttactagaaaataagacttagggggtccatataatttattcacatctttttatacatcgtaaacaaggataggatacttctgacagtagcctataaagattttttaaaatttatccttcagtatagaataagtgtcaagggagcactttaagcatgattctggtaggtctgttaggagtctattttccagaaaaattttgtaggaaattgttctgattttaaataaactaaattcatagatttgtgttgacagaatatgatttgtgaggtaaagtcactgtattatctccggtctaaagcacatgtagcatgtgcaaagaactaaagagacatgtatttcaaactccaggcagaaaggcagaatataagagtgcatagagaagagagtgcttttcaggtcagatagtgaaggaagacacatagttann

SEQ ID NO: 11570 - DNA, 4517 bp, Homo sapiens
  misc_feature 1, 2, 3, 4515, 4516, 4517: n = A,T,C or G
nnnaccccaaactttttactttcctactttgctaaactttccagtattgtatatcatttttcttagctttaaaattgaatagtatgtttcacatttttggaaagggactttggtggggaggggggaatcttgatttcctcaccattatctgtaaagtgaaagtacttaatctacttaacaaaataatattacatacttatgattttctacgttgtatggtgattagaagtgggctctgtaaaaacctgctttgatattgtgattcttacacttttgtgccccccatctttccccttagatttccttcatggatactttaccatagcattattatgtgatgtgagaagtttttccctctgaagtaacatggattttatactacagaatcaagagaattggcttataggaaaaattgatttataaaaagtggtacaggttttcatagataaccatgacaacatcccatatgaatgggcatgttacagaggaatcagacagcgaagtaaaaaatgttgatcttgcatcaccagaggaacatcagaagcaccgagagatggctgttgactgccctggagatttgggcaccaggatgatgccaatacgtcgaagtgcacagttggagcgtattcggcaacaacaggaggacatgaggcgtaggagagaggaagaagggaaaaagcaagaacttgaccttaattcttccatgagacttaagaaactagcccaaattcctccaaagaccggaatagataaccctatgtttgatacagaggaaggaattgtcttagaaagtcctcattatgctgtgaaaatattagaaatagaagacttgttttcttcacttaaacatatccaacatactttggtagattctcagagccaggaggatatttcactgcttttacaacttgttcaaaataaggatttccagaatgcatttaagatacacaatgccatcacagtacacatgaacaaggccagtcctccatttcctcttatctccaacgcacaagatcttgctcaagaggtacaaactgttttgaagccagttcatcataaggaaggacaagaactaactgctttgctgaatactccacatattcaggcacttttactggcccacgataaggttgctgagcaggaaatgcagctagagcccattacagatgagagagtttatgaaagtattggccagtatggaggagaaactgtaaaaatagttcgtatagaaaaggctcgtgatattccgttgggtgctacagttcgtaatgaaatggactctgtcatcattagccggatagtaaaagggggtgctgcagagaaaagtggtctgttgcatgaaggagatgaagttctagagattaatggcattgaaattcgggggaaagatgtcaatgaggtttttgacttgttgtctgatatgcatggtactttgacttttgtcctgattcccagtcaacagatcaagccgcctcctgccaaggaaacagtaatccatgtaaaagctcattttgactatgacccctcagatgacccttatgttccatgtcgagagttaggtctgtcttttcaaaaaggtgatatacttcatgtgatcagtcaagaagatccaaactggtggcaggcctacagggaaggggacgaagataatcaacctctagccgggcttgttccagggaaaagctttcagcagcaaagggaagccatgaaacaaaccatagaagaagataaggagccagaaaaatcaggaaaactgtggtgtgcaaagaagaataaaaagaagaggaaaaaggttttatataatgccaataaaaatgatgattatgacaacgaggagatcttaacctatgaggaaatgtcactttatcatcagccagcaaataggaagagacctatcatcttgattggtccacagaactgtggccagaacgaattgcgtcagaggctcatgaacaaagaaaaggaccgctttgcatctgcagttcctcatacaacccggagtaggcgagaccaagaagtagccggtagagattaccactttgtttcgcggcaagcattcgaggcagacatagcagctggaaagttcattgagcatggtgaatttgagaagaatttgtatggaactagcatagattctgtacggcaagtgatcaactctggcaaaatatgtcttttaagtcttcgtacacagtcattgaagactctccggaattcagatttgaaaccatatattatcttcattgcacccccttcacaagaaagacttcgggcattattggccaaagaaggcaagaatccaaagcctgaagagttgagagaaatcattgagaagacaagagagatggagcagaacaatggccactactttgatacggcaattgtgaattccgatcttgataaagcctatcaggaattgcttaggttaattaacaaacttgatactgaacctcagtgggtaccatccacttggctgaggtgaaagaaacatccattctgtggcatgttggacttgatctggcaaaaactgccaataggaggactgcccgacactgcagcaagattgaggataagatggaaggcagcagtataagctgtagatctgttcttagatctcttgaattagtgagacgacagttcccttaggcagtttgtgcatggcatcctttattctctatacatggctttagcggttcttgcctcattttgggattctaaatggaagctttcaacagagcattccattttgtcctgttaaaaccttttgttttcacctaaaccctttctgcttagttgtatctctgtgaaaaacttgtatacacaagcgtccatgtctcacacaaatattgatgtgattattcttaagtgttaaatcattaacacttaaatgacttcattgggaatattgagcagagggactgtgcttctatgcactgggcaaggcagtatttgcttaggaaactaatttagtcatcagagatactttcctaaaaaggaaaaataaaaaacaaaatggtgccactttgggttgaagctactttgttaggcttgaattcatttatatgtcttttgattcttaaaaaaacaaaaaacattccattagaagcaccagttttttttgctcagactttgtggatcagactctacactcaacacactctaatctacttaaaggtatacaaaatatgctgatcttttttaaattatgatttcctgaatttttttcttaagtcgtctcaactgatttactcacttagcttcccttccctcatcagcatagtataatagaatgtatgttacatttttatgaatggcaggtgttcattataatctgtattgacttaaaaagtttcttcctcatgatgctaatagttttttgtatacatgggaggatagcacatttgacagtttttgcatttttatgtatgagcacagtatcctatgactgtgctacgtatatataggtaataaactggaattctgttgatgaatatagctgctgtactgtatattaatatttaatagatcaacaaatggtcattgaaaacacttgtttagcattagaataaaattatatatgtccttgggaaatattatgacagttgactttaagatcaaaaggaaaggaagacctgaaagtcatttgaacattttaggaaaagaatattggagagaaaaaggtattaaatatatagaaataggtttttaacctaacaaggtctgcctcttatgacgagaatgcaacagcttggtaaatcataaaagaaacatttaagctaataggattttcgtactgtctctatagctgtagctttaaaatccaacgtatataattggcatggaaacttaatttgcagtcttttcaagcctttaggatagtgtgatgtgtaacaaacaacctcaaatgtgaatgccttgattttatttttatggtgactttagctacagcatttcctatacccagagctaaacactggaataatactgacatcatttaatttaacataagcaattatgtttaaggagtaatttgtgtcatgtacatatttgattgattttttttcttctacataattttatttgaacaaatgtagacagtttatatgtcgcctttttctgttcaaatttgcatggcctattaagttggctggagagtgttttatgtggaaatattttccagataatgttccttaggaagaaaataacattcttgggttgagggaaggaatgccatacactactgtctcttcagatctgaaatactccaggttagagccaggaaatttcacaggtcaaacgatttagattaaaattaagatatatagacgtactaactcagtacaggtagttaggatgagtgttctggctaaatgaggtagtgcagaggtgaagcaaaggtccactcgaaacaatgagactatcacaaggaagagacgcacgacgctgtatgaaagacagagataacaccaagattaatacaaggacaaagaaaagaaacaaggataaagggagactaannn

SEQ ID NO: 11571 - DNA, 170 bp, Homo sapiens
acgtttaacgtcggcccggcgcgcgcgtccgggaggttgcccgtaggccgctaactggtggttcccagtccccgccgactcggcctctttcttctgcggccaccagatcgcgggatatcggagacttcgaacaatccgctggagtcctttacagtttaaaaacagaggac

SEQ ID NO: 11572 - DNA, 3518 bp, Homo sapiens
  misc_feature 1, 2, 3, 4, 5, 3510, 3511, 3512, 3513, 3514, 3515, 3516,3517, 3518: n = A,T,C or G
nnnnncaaaaaggtaagggaaagtttccaagctttaggaagaattattttttttcaagacgctgtcttccgtactttcgttattaaacatacggctcatgtgatcaccggtttagacagtgacatcagacatctttcattagccctactcaaaaatggcggcaacgtaagtatcctgggccggaggtcggttgtaacccggaagtgcctttgtaaaggagggggtggttagacaatccggaagtggatggaatgaagagatgccacttggcggccatggcagctgtagtatcggcgactccgggtcaaggcccggtcgagtgcagtaccatgggcagcaccgggtatagggcagagacagctttgtgtcaactttgctgctgaacccctaggacccatcgttagagacctgcaggactcctttcctcatcccaggctcggaggagagtttgctgggactggtgggctggtttcctgctctggggggcggatcaccttcggggccgcctcttggagacaggggcgcctagggaacgaacaggttcgcttgagtcacttacccgccgccgcctaagacattgtgccaccctcaatccgacaatcgaagaaatcgatcattcgcacattttccccattgacttttcccatctctgttaacccacgagaatctaatgactggcatctgagaacccagagcctgggaccttagattgctgtaagctttctctggtgctaatatcagcaaaaagggtctgttgccgggtacgttcaagaggaaggtgcctcgtgaacacatctgctggtgggaaggcctaaagaactggaaagcccactctcttggaaccaccacacctgtttaaagaacctaagcaccatttaaagccactggaaatttgttgtctagtggttgtgggtgaataaaggagggcagaatggatgatttcatctccattagcctgctgtctctggctatgttggtgggatgttacgtggccggaatcattcccttggctgttaatttctcagaggaacgactgaagctggtgactgttttgggtgctggccttctctgtggaactgctctggcagtcatcgtgcctgaaggagtacatgccctttatgaagatattcttgagggaaaacaccaccaagcaagtgaaacacataatgtgattgcatcagacaaagcagcagaaaaatcagttgtccatgaacatgagcacagccacgaccacacacagctgcatgcctatattggtgtttccctcgttctgggcttcgttttcatgttgctggtggaccagattggtaactcccatgtgcattctactgacgatccagaagcagcaaggtctagcaattccaaaatcaccaccacgctgggtctggttgtccatgctgcagctgatggtgttgctttgggagcagcagcatctacttcacagaccagtgtccagttaattgtgtttgtggcaatcatgctacataaggcaccagctgcttttggactggtttccttcttgatgcatgctggcttagagcggaatcgaatcagaaagcacttgctggtctttgcattggcagcaccagttatgtccatggtgacatacttaggactgagtaagagcagtaaagaagccctttcagaggtgaacgccacgggagtggccatgcttttctctgccgggacatttctttatgttgccacagtacatgtcctccctgaggtgggcggaatagggcacagccacaagcccgatgccacgggagggagaggcctcagccgcctggaagtggcagccctggttctgggttgcctcatccctctcatcctgtcagtaggacaccagcattaaatgttcaaggtccagccttggtccagggccgtttgccatccagtgagaacagccggcacgtgacagctactcacttcctcagtctcttgtctcaccttgcgcatctctacatgtattcctagagtccagaggggaggtgaggttaaaacctgagtaatggaaaagcttttagagtagaaacacatttacgttgcagttagctatagacatcccattgtgttatcttttaaaaggcccttgacattttgcgttttaatatttctcttaaccctattctcagggaagatggaatttagttttaaggaaaagaggagaacttcatactcacaatgaaatagtgattatgaaaatacagtgttctgtaattaagctatgtctctttcttcttagtttagaggctctgctactttatccattgatttttaacatggttcccaccatgtaagactggtgctttagcatctatgccacatgcgttgatggaaggtcatagcacccactcacttagatgctaaaggtgattctagttaatctgggattagggtcaggaaaatgatagcaagacacattgaaagctctctttatactcaaaagagatatccattgaaaagggatgtctagagggatttaaacagctcctttggcacgtgcctctctgaatccagcctgccattccatcaaatggagcaggagaggtgggaggagcttctaaagaggtgactggtattttgtagcattccttgtcaagttctcctttgcagaatacctgtctccacattcctagagaggagccaagttctagtagtttcagttctaggctttccttcaagaacagtcagatcacaaagtgtctttggaaattaagggatattaaattttaagtgatttttggatggttattgatatctttgtagtagctttttttaaaagactaccaaaatgtatggttgtcctttttttttgttttttttttttttaattatttctcttagcagatcagcaatccctctagggacctaaatactaggtcagctttggcgacactgtgtcttctcacataaccacctgtagcaagatggatcataaatgagaagtgtttgcctattgatttaaagcttattggaatcatgtctcttgtctcttcgtcttttctttgcttttcttctaacttttccctctagcctctcctcgccacaatttgctgcttactgctggtgttaatatttgtgtgggatgaattcttatcaggacaaccacttctcgaactgtaataatgaagataataatatctttattctttatcccccttcaaagaaattacctttgtgtcaaatgccgctttgttgagcccttaaaataccacctcctcatgtgtaaattgacacaatcactaatctggtaatttaaacaattgagatagcaaaagtgtttaacggactgggataaatgtttcttccttttggccaaattttgtgaacccggtttgtcaataaggcgttcaatgggtctgcaccattttacttcttcccattcaagccattactaggggccccacatttttccacgaggagactcacgtaaacatttttacaaaacagcaagtataccatatagaccgcacgggcaaacattgctctgtcctgaagacaagagcnnnnnnnnn

SEQ ID NO: 11573 - DNA, 346 bp, Homo sapiens
  misc_feature 1, 2, 3, 159, 342, 343, 344, 345, 346: n = A,T,C or G
nnnagctccaccgcggtggccgcacgccctggcaggtactttccttagcatatgttttcctcatatgttctggggttttagactgtagactaatctggagttggagtctgtgcctctccactctccaccaaccaggcgggcccatcacatacgtgatanggaaaatacctgaaacccaggccagcaggcagctcggccatggctgagaggctgtgttttagaaacgaggctcttgggaatggggcagaacttttttcaggccttttcaagagcaatggagctccattgcaatcaataccccagtctgcttgtagacgcgctatttctttcttcagtgctccnnnnn

SEQ ID NO: 11574 - DNA, 536 bp, Homo sapiens
  misc_feature 1, 2, 536: n = A,T,C or G
nnccacgcgtccgaagctagtttcctaggtaccatagtgggaactgctgggcccctaatgacaagagagatggatgaatggaccccactcccatttctcttcttctctccccttctcttctctctccttcctcccttcccccaatggccaaggacaacactaaaatcagtatcacaagtctgctgtggcacatggccatggaatgtgaccgtcagaggcagctcagagaggacacaactggaagaacaggtggtgtggaattttagaaccactgccttaagcattctgctcaaagtcccagaatggttgctctgatgggagctttttgagagatgatctctccctgcaaagagaataagaaatgggtgaggatgatagtatcctggagaagctataactttgacagctttaagggtcttaagcaaccaagtcctcctttgacagagaggtcaagctattaacatctggtttgcccagaatactgtgcctgtgtttgctttaagacacaaggaaccggccgccaccgcggtggagcn

SEQ ID NO: 11575 - DNA, 475 bp, Homo sapiens
  misc_feature 1, 2, 3, 4, 5, 468, 469, 470, 471, 472, 473, 474, 475: n = A,T,C or G
nnnnnagtgtttagcaaaaaagggactatggaatgtcaaacaggaacatatatgttaaacataaacatgaagcagtgccagctgctgtctgccatatagtcatgctttgttaatgtggcacatcttgccatgatggtgccctcatgaaacgaaggatgctgaagcagatgccattctgtttgctttgatcagaagccactctctggtcaaggaagtattggtttcatgcttaattataacaagttctcatcacaaagattattttctttctccagatctggattgtctgcactcactttatattattagacaatcactcagattgtttatgtttttatgtttagaaataagacagtgattcagagagtccctgtatttagatgaaagaacattttttaaacatattgactgtaaacactgaaaatcattaattctcaacagttgaaggtttctgacaggaacggcccnnnnnnnn

SEQ ID NO: 11576 - DNA, 7183 bp, Homo sapiens
cgctgtgtgtgtgtgtgagtggagagtgagtgcgggacctgaggctgtgtgtgtgtgaactgtggccactggcggggtcgggggggggcagcggcggagccgcctcggacgataaggaaattgagatttggagaagttaaataaccaagacttcacaggcaaagccatgactacagtagtggtacatgtggactccaaagctgagctcactaccctgctggagcagtgggaaaaggaacatggcagtgggcaggacatggtacctatccttaccaggatgtctcaattgattgaaaaagaaactgaagagtatcgtaaaggggatccagacccatttgatgatcgacatcctggtcgagctgatccagagtgtatgctgggccacttgctgagaatactcttcaagaatgatgatttcatgaatgcactggtgaatgcatatgtgatgacaagccgagagccccctttaaacactgcagcttgcagactcctattagacatcatgccagggctggaaactgctgtcgtctttcaagaaaaggagggaattgtcgagaatcttttcaaatgggcccgagaggccgatcaaccattgaggacatattctactggactgttaggaggtgctatggaaaatcaagacattgctgccaactatagagatgaaaattcacagctggtggcaatagtgcttcgaagactgagggagctacagctacaggaagtggctttgcggcaggaaaacaagcgtcccagtccacggaagctctcttctgaaccccttttgcctctggatgaggaggctgtggatatggactatggtgacatggctgtagatgtagtggatggagaccaagaggaagcttctggagacatggagatctcctttcatcttgattcaggccacaagactagtagcagagtgaactcaacaaccaaacctgaggatggaggattaaagaaaaacaagtcagcaaaacagggtgacagagagaactttaggaaagccaagcaaaagttgggtttctcatcttctgatccagatcgcatgtttgttgagctgtctaatagcagttggtcagaaatgtctccctgggtgattggcaccaattataccctttatcctatgactcctgctatcgagcagcgactcattctccaatatttgacccctctaggagaatatcaggagctacttcccatattcatgcaacttggatcacgggagctgatgatgttctatattgacctgaagcaaactaatgatgtcctgcttacatttgaggcactaaagcacctagcatctctcctgctccataacaaatttgccacagaatttgttgcgcatggtggagtacagaaattactggaaatacctcgtccttctatggctgcaaccggtgtgtctatgtgtttgtattacctatcctacaatcaggatgccatggaaagagtttgcatgcatccccacaatgttctgtctgatgtggtgaactataccctgtggttaatggagtgttctcatgcttcaggatgctgccatgctaccatgtttttttcaatttgcttctcatttcgggccgtcttggagctctttgaccgctatgatggtcttcgtcgtctggtgaacttgatcagtactttggagattctaaatttggaagatcagggtgcacttctgagtgatgatgaaatatttgctagccgccaaactgggaaacatacctgcatggccttgcgcaaatactttgaggctcacctggccattaaattggaacaagtgaagcagtcacttcagaggactgagggtggcattcttgtccacccacaacccccgtacaaggcatgctcatatactcatgaacagattgtggaaatgatggaatttttgatagaatatggcccagcgcagctatattgggaaccagctgaagttttcctcaaactttcttgtgtgcaactcttgttgcagcttatttctattgcctgcaattggaagacctattatgcaaggaatgacactgtgcgctttgctttggatgtcctggctattcttactgtggtgccaaaaatccagctccagttggcagaatcagtggacgtgttggatgaggctggatctacagtctctactgtaggtatcagcattattttgggagtggctgagggtgagttcttcatccatgatgctgaaattcagaagtcagcacttcagattatcatcaattgtgtgtgtggcccagataaccgaatatccagtattggtaaatttatctctggtactcctcggagaaagctgcctcagaaccctaaaagcagtgagcacaccctggccaagatgtggaatgtggttcagtccaacaacggcatcaaggtgctcctgtccttactgtccattaagatgcccatcacagatgcagaccaaatccgggccctggcctgcaaagccctagtgggcctgtctcgcagtagcactgtccggcagatcatcagtaaactgccccttttcagcagctgccagatccagcagctgatgaaggagcctgtgctgcaggacaagcgcagtgaccatgtcaagttctgcaagtatgctgctgaactcatttgaacgggtgtaggcagacaccacattctcattgggcacgatggttccctagcacgactgcagaaagcagatgttggtgagccagtcaaggatctccttccctgagaaagagctgcttttgttgatacgaaaccatcttatttctaaagggcttggagaaacagcaaccgtgctgacaaaagaggctgacctgcccatgactgctgcctcccattcttctgcctttaccccagtcactgctgctgcttctcctgtctctctaccccgaacccctcgtatcgctaatggcattgcaactcgtctgggcagccatgctgctgtgggtgcctctgcgccttctgcccctactgctcatcctcagccacggcccccccagggtccgctagctctgcccggcccatcttatgcaggcaactcccctttgattggtagaatcagttttatcagagagaggccatcaccctgcaatggcaggaaaatcagagtgttgcggcagaagtcggaccatggtgcctacagccaaagcccagccataaaaaaacagctggacagacatcttccttccccacctacgctggacagtataatcacagagtatcttagagaacaacatgctcgctgcaagaatccagttgccacctgcccacctttctccctctttactcctcaccaatgtcctgagccaaaacagaggcggcaagcgccaataaactttacgtcaaggctaaaccgcagggcatcatttccaaagtatggaggggtggatggcggatgctttgataggcaccttatctttagcagattccgtcctatttcagtgttccgggaagccaatgaagatgagagtggcttcacctgctgtgcattctcagcacgggagcggttcctgatgcttggcacctgcacagggcagctgaagctctataatgtgtttagtggacaggaggaggccagctataactgtcacaactcagccatcacacatcttgaaccttccagggatgggtccttgctgctgacatctgctacttggagccagcctttgtctgcactttggggaatgaagtcagtatttgatatgaagcattccttcacagaagatcactatgttgagttcagtaagcactcccaggatcgggtcatcggcacaaaaggagacattgcccacatttatgatattcagactggcaacaagctgttgactctgtttaacccagatcttgccaacaactacaagaggaactgtgccacctttaatcctacagatgatcttgtcttaaatgatggcgtcctctgggatgtccgctctgcacaggccatccacaagtttgacaagttcaatatgaacatcagtggtgttttccatccaaatggactggaggtgatcattaatactgagatttgggaccttcgaacttttcatcttttgcatactgttcccgctctggatcagtgtcgcgtggtgttcaatcacacgggaacagtgatgtatggagctatgttgcaggcagatgatgaagatgacttaatggaagagaggatgaaaagcccctttgggtcatccttccgaacatttaatgcaactgactacaaacctatagcaaccattgatgtgaaacggaacatctttgacctgtgtacagacaccaaagactgctatcttgctgtcattgagaatcaaggcagcatggatgccctgaacatggacacagtatgcaggctgtatgaagtgggcaggcagcgtctggcagaggatgaggatgaagaggaggaccaggaagaggaagaacaggaggaagaagatgatgatgaagatgatgatgacaccgatgatttagatgagcttgacactgaccagttgcctggagggcggagttggaggaggacgacaataatgagaacgcaggggaagatggggacaatgacttctctccctctgatgaggagctagcaaaccttctagaggagggagaggacggggaggatgaagactctgatgcagatgaggaggtggaactgatcctgggggacactgacagctctgacaactctgatttggaagatgacatcatcttatctctgaatgagtgaggagccatcactgcttggaagagattcttggcagagagaagaggggacaaatttggttgtgaagtaaacaagaaacacaagacggctaaaactctccaggggcaggtaaagccctgctgggctcagaagcactatagaatttgctgtacacactgaagtgggtctgtgtcacacaggtatttcttggtcctctggagagcagaggactcactcagctctttgcttgatgcctcgctttaatggtagtaaacacttaaccagtggaatagtctgactgctggtactgatggcatcagaagaaaacaggttaacaatcaagtagtgaaagcactatattctagtcattaactcaacggagccagtctcaactctgctgggagcacccacaggtctctgtgggggagacagggactataacagggaggcagaattcaggttggcttgacaacacaccttaggaacatgtgctaaggggctaaggaggcatcagctgtcttccttattctaccagggctgaaaatcggagtcacttaggaggcagcatgagaacagtggcacaccaccagtgaggcacatgttgcctttttgtctttaagcaacaccttagacagggcctgaaccctgggtgggggcactggatgcctgaagtaagtaagttttctcagtggggcagtctcataaaatcaccaggacattgaccacctgacctcccctaactagtgctggccaaggcctgagagttcacagaacctgctaggtcttaagagccaaaggaaggaagtggttgagggccagtagagaagaaaggaatgtcatcccaggggtgttactcctcaccaaaacttggcagttctttttggggccatgggacacctttctctgaagaggggttggataaggcaaaggttgaagtgtcttctctaggcacgttttctagcatgtttccttgttacttggttctgtctcacaaagctgggaggtagatgattcttccgggtcctgagcacctggcattcatgaaggaagataggtagcccagagaagaagttttggacttaacaacataccaaggcagctctggcctgtgactcaggcgtttgttggagagctgcaggaaaaccactgcagtgtgcctgcaacaggacaagacccactcctgtttctggcggtaccagctaccctggaatggtggcgtgtcctgctgtacccaactgacttgcttaggtacctggcagctgtgaccacagctcaagtaaaaaaacaaaaacaggcaaataaataaacatgcttaacatgtctgttgtgttgctgttttgttatgaacgtgcttgctctcttggcgaggcacctgtccattccacatcaccgaggggtctacgagagcactgccaagtgttcctgtggaccagcatgacctctccacagcctgcagtgagccccagcctctaatctcaggtgtcactcatgctaccttatcctagctccggtaagggagcagacctggagagaggatgccacggccagcagaacctggagttcctggttatcatctaggggctcattcgcttaccagagcttctgttctcctcagccctgacagtgttccctgtttgaacatccaaggtaccagacacgctgaagaatggcatttggggtgttccatggtgacaaaactgtgtgctctggttttcctccctggcccacactgtccgcagtaccttccttacttacttgagacagggaagaagacggaatctcacccttcttcccagctagagggtacctccgcatccctttcctccccaactggcttgagtggcttcaagctctagcactgcctaacaaacaaacaaacacctcagtgacttgtgatttccccccagaaaaatatctattaattatttcccaatggtctccacctcggcatcagggcacaaggtgtaggcacatgctctgatcttgcacctaggaaaccgtcattatcaagggcatcccctagtccactgtgctccccggtaagtacttcagtctagaggttcagtatccccccacaaatctctaggtatgactggacacgggcctgctctattacccatcacccctgaacgaccagagaaagccaaaaatcacaaacaactaggcaaagttcatgagtaaatccaaggaaggctgcctccaaccctccattccagtatttggactcccgggcccctgggaacctgaggcaactctgtctcccaacactggctatccctgggctgagtgaggctagaaagtaggccgaaccaggagcctggacagatcaggggccccgagaccccctggcatcaacagtgcacagcttctccttgtacaagactacacagctgctgaaggctacctgctgccaaacatgctgagtgggcactctgtcccaaacaaacagccacagctcaaactgatgatgatggacacacacacggtttaaggcagaaaaaaccatcagta

SEQ ID NO: 11577 - DNA, 237 bp, Homo sapiens
  misc_feature 1, 2, 3, 4: n = A,T,C or G
nnnnaccaattcccagcctgggccttaagaggtcttgcttgcttctgttccctttggaactctgttactgctgtgagcacgtgaacaggctcacttggtggaaggggagcagctaaatggagcagagccaagtcattttacttgagtctggccctctcagaccagccgtcagccagctgaccaaaaatgtgttaagacagaacagccaacatcagcagagccacctacctaacttgt

SEQ ID NO: 11578 - DNA, 364 bp, Homo sapiens
acacatctgctcctgggcagaccttacaagtatctcaaactcatatctccatgagaggtagataagctacgtaaacaagggaagccaagataacagggaagacaggagactatctgcctatctaaaaacactcaaattcttttctataagcactgctgatttaatccattacaccaccagcagctgccagtttacaatctctgctacacaagccctccattgagtttaaagacaaccgtcaaaatatctctccagtttctccattcacctgactgttaccatagagaatacaggtattcccactctggcctgctgtgtgcagtgttttctcctatcagaatccaaaccacctaccagtccccgt

SEQ ID NO: 11579 - DNA, 1164 bp, Homo sapiens
acccagtgattactatatcggatggtgcaggtctcagttctttccaccattttttccccaccatattttatatgtttacataggtgagacaaatggacttaggccaaaaggtttacaactggagaaccaagttggaagcaaagaggtttttttgcaaagaggaatctcttgcaaacaaacctggaacttggcttagtgagtcagtttttctgacatgtaagtatggctctttcagagcactaacactggggctgtgctcccctggagaggaagagccttaaggaaggaaggaaggaactcttgagtctgttaagtgaactgagtgtgttgacagtttgaacacactccttctggcagcaaaacaaactgcttggcttatttcgtatgttgaatcagagtaattcctttaaactggcttttaattttcaaaggtggaagcctgctccatatactctgctggcgctgtgcacctttttagtttcagaaaagcatgctgggcaccgatctctttggaagccttacctggagattttacccaaggcgtatacctgccctgtttgtttggagccggaagtggtgaaccttcttcccaaatcttaaaagcaaaggctaagagcagagagcccacgtgcaggagttctttgcttcctccagagactttttctcttctctgcagcctctgtttgcggaggctgttgacagcatcttcagctacagtgccctgctgtgggcttggtgcaccgtcaacaccagagccgtgtacctgaggcccaggcagcgggaatgcctttctgcagagccggacacctgtgcactcgctccgtacctggacctgctgaatcatagcccacatgtccaggtaaaagcagcgtttaatgaagaaactcattcttacgaaattagaacgacttcacgttggagaaagcatgaagaggtattcatctgttacggccctcacgataatcaacggctgttcctggaatacggatttgtttctgtccataatcctcatgcttgtgtttatgtctcaagaggttggaatcaactttgttcttaacattaacactatataatttttttccccatttggagatgtgtattttcagttttaataaaaatatcaaaaccttaaaaaaaaaaacggacgcgtgggtcgactcccta

SEQ ID NO: 11580 - DNA, 555 bp, Homo sapiens
agacccggtgagagcccccattccaatgcacccccatctcagcttctggccagaagacctgagcaagtccctccttcttcctggccttggccttcccatgggtggaaccaggagggctggctttaatctccaccagactcttgccccgggactgtgatgggcgatcggccacttctcaataatcttcctgttttccttccgccttctgtttggctgtagacaggaccagtgcatctataacaccacctacctaaatgtccagcgggaaaatgggaccatctccagatacgtgggaggccaagagcatttcgctcacttgctgatcctcagggacaccaagacctacatgcttgcttttgacgtgaacgatgagaagaactgggggctgtctgtctatgctgacaagccagagacgaccaaggagcaactgggagagttctacgaagctctcgactgcttgcgcattcccaagtcagatgtcgtgtacggggaggcgaagaaaagaatagagaagatagggaaattagaagataaaaacatacttttagaagaaaa

SEQ ID NO: 11581 - DNA, 951 bp, Homo sapiens
actatcctagacagctctgggagtgttacataacgtatggtaagtgtgctacatggcctttctgaagcccaaaccattttgcattatgaaaatacctggccccaggaatttcagataagggattgtggacttatattttaaatctgtaactcctatagacagtaatttcatagagccagcttcatggagttgtaaatattactgggctagggtcagtttcctcattttaggcttcctttaatccagtccagacaccaaattaaatgtctttgtgtagtccccttcaaagcctcttgcaatcccagtcatgcttcagggtagggatgatcccattaatccaaggacctgtccctagtgatagaaggaaatgggtgggagccacgggatctgggattgcagtgagaagtagacaagaaaacaaccataacaagtgcctcttctcaggtgttttcggattgcaaatatgaaccactggccaccctcagcaccgatgtccccatcctgtcctgtggagggctggccaagcgctggctggttcctggctggaggttgggctggatcctcattcatgaccgaagagacatttttggcaatgagatccgagatgggctggtgaagctgagtcagcgcattttgggaccctgtacctcggccgaggtactgaactggccttttcagtttaggtatagtccccaggaaaccagcataaatagcacctcttattaatagccttcctgagctacacgtgtggattacctccatacgttatgtcagtcacacacttggcactggcagtcagctccgctggcactgcagccttctttgcagaataaaggcccacaataagagctggaagacaagaaattggttctaatttcagcctgaaatcggaaaagatttctgaatcttctcagcagatgaaagcttaccaatcaaccagcccgggaatgt

SEQ ID NO: 11582 - DNA, 549 bp, Homo sapiens
aacaccaaatttgtattcctttcagttttgttttatgtttctcataagttttttacatttgtttatttttttcttctcattctcttttgttttccttttgttcatttgcttctataccatgtaacactgtgtgttaggctagtagcattaccagagagctccaggggagagagctaaagcttactaaccttcaggaaaatttgagtgaagtcagtcaagtgaaagagactttggaaaaagaacttccagattgttggtaagtacctgttgggaatctgaatctcagggtttctggccatttcctgttttaaaaaatcctccagtaagaaatattgtagctgtttcctttctctttctaagtgttgattcaacttgagtgtatgagttattgcgctgataaatgattgtcctttgaggggaatcggatcaaacccaaacaacaaaggtaggtatgacttgtgtttagttaaacttagaaaccaaccccatcccttaggaaacccccccctttggaaatggtttggattcttaattttaccaaaaaaaaaa

SEQ ID NO: 11583 - DNA, 518 bp, Homo sapiens
  misc_feature 518: n = A,T,C or G
acaatcctgccctcaagaaggttaaggtccagttggaggagacttaggagttcaactgacccagttctgcaaccttaggtggctgtcctcatcctgacaggagacaggggacacacacaaaacagtgatttaggcgttaacaaagtggctttacaaaggtgtagacagaatataggaaatccaacaaggcctggtggagcaccatgaagctggtgacagcagggaacagtggcctccttagacttaaggggcaagagcaggaagaggttctgtggcccaaaaggggtgaggcacacagagagggtctggacaggagctctggtcaccagcctccaaggacaaggagggaggccgcctggggaatatgtatcttgacctcatcttcttcctccttccagtctcctattagaatctcccaccggtcaaccccaaccagaaaccagagggcagtgggggtccattaatgtgatccacattaggggcacagggcaagatggaaaatgatggagagtggatcn

SEQ ID NO: 11584 - DNA, 724 bp, Homo sapiens
  misc_feature 1: n = A,T,C or G
nctggagctccaccgcggtggcgcgcgcgctagagaacaggtgaatcccccgggctgcagaaattcgattcccttcccccacaagtgagagtgtccattggccattcttgagttcttgtgtgttccatagaaaacagccaccaattccagccagaataagtttggcagtttgctccttagcctccattcctcgaggagccactggttattttaattattgtctctagaggccttttagtgagttgaggctaagacccacagtactcatggagagatttgtcctcactgctgccccttgccctggcttcatgcacttgctctgtgggtcttgagcatgtccccagctattgttggtcgtctgttggatttgtgaggttgttgggtcttgtggaacccctcgctgtgcactggttgcctcacctcatttgtattagtggagcttgcattttcccctgctctggaatcaccttcccagctgtgatacactcctcatactgggtagatgttgaggtctctcctgccctctgcacttttgcagttcacccccttctcagaagcctcgtgagggtgagcctctcctcctttctctcctctttataagtgccgcatcactcctctcggccctccaaatcagcacctgtggcattgttaggccagcctgtgtagccccaaacttttgtcctggcagacagactgcagggcacttcagcaagagcaggaaggt

SEQ ID NO: 11585 - DNA, 371 bp, Homo sapiens
  misc_feature 369, 370, 371: n = A,T,C or G
aggtactcaagccacctgcctgtcatggccccccaaaatgctgggattgcaggccaccataaccggtcatcggggcaactatccttcagggcttcctccagtagggctccccaggttggccttgagggccacaataaaaaatctgacttagctatactccttccctgtccccaaccacagttattcttgtggatgaggcaaatggcagcaggacagctggagtataccagagttgactcatttattttatgcatgcttagtgtggcatccctggggacatgaaattccagtgaaatccagtctttgtgctggagaagctcatagatctgtggaggaggcagatgcccacccactcactgtacctgcccnnn

SEQ ID NO: 11586 - DNA, 296 bp, Homo sapiens
  misc_feature 296: n = A,T,C or G
acagacaacggattgagctacttcctaacacagtgactgggattcaggacatatccagtaaacgtctgttaaggaactaaacaaaataaataaataaaacaggatagtggctggctgctctctctgtgtagactggattaaagtagagcaggaaaacatgtgggaggttactgaagtggtggtattgggagtgaggacaggcgagtgatgtcacttggaccattggaaggaaggaggttcatgcagtcaggagcttagcgataactcacatggaaagaaggcaagagtctcgagan

SEQ ID NO: 11587 - DNA, 472 bp, Homo sapiens
  misc_feature 1, 2, 3, 471, 472: n = A,T,C or G
nnnacaaaatgcatattattattcttttcatatacatataatgaatgcaaaataaaatattaacatataataaatgctctgcacagaacatgctgcagaataaataataaatggacaataaattatcctggtcctgtattgatagaaaaggaaaataaagactagaggttaaggcttgccaaatgtcatgtatttagtttgagaacttgttggtagagcaaagggaatttcttccataaacttgaaagtgcattacacaaatatttttctacttagttcctatagcatttctttgagaaaagtagatattaccccttaatagtgagggaacaaaggaaggacagagagggaagtgggttgtataagcatatgagacaaatttcaacagacagtggaaacaaacaaaattagattaatccactctcccctaccttaactttccacactagtctaaatttttgttccctggann

SEQ ID NO: 11588 - DNA, 272 bp, Homo sapiens
  misc_feature 1: n = A,T,C or G
nggcgaattggagctccacgcggtggcggccgcccgggcaggtacctgttatcatcattcctcaagagcagcatgtggcacagcaggaagccaggcaagctcctgccattagcacacaacggcaaaagtggatgtctgtgtcaacatttctgaagacccagaatgggccgtagataggcatgattttcctaatgactttcgcacacaggcaaaaaaatagtaatgataactactaatattataggtgcttcctatggccaggggatgtacct

SEQ ID NO: 11589 - DNA, 330 bp, Homo sapiens
  misc_feature 1, 2, 3: n = A,T,C or G
nnnacacagtacatcatctatggtctatgcttgagagtcaatatggtgtcacctacctggaaccctacgcacagtatttttgagaaacccactcacatgtgtcaggcagtatgtttgccaaggtgccaacatgcaagaatttcaaagctggatgatacaaagtataaaacctataattttggccaggcgcaatggctcacgcctgtaatcccagcactttgggaggccgaggcgggcagatcacctgaggtcaagaggtcgatatcagtctgccaacatggcaaaaccccgtctctactaaaaatataaaaattagccaggcatggtggt

SEQ ID NO: 11590 - DNA, 267 bp, Homo sapiens
acatcattaccagtgaccagtcattgtgtcatttctttcgaagtctgtcagtgattggtcaatgaagatctgttactcagtttacccttaaataccaaggcatgtagttgtgtccctccttatttcccagtgatggaagttggtgacagcttacaacaaaagtatgagcaaaaaaaaatgagttggtcagcaaaggtaaatgtgcaagaaaaaaaaaaaaaaattccttgccgggggggcccttttaaaattagggatcccccgggg

SEQ ID NO: 11591 - DNA, 509 bp, Homo sapiens
  misc_feature 1, 2, 3, 4, 5, 506, 507, 508, 509: n = A,T,C or G
nnnnnatccactagttttaagagcggccgaggtaccagaacttaaacaccactatttgttgagatgaaaaaaagcatatataggaagccttcaaaatgaaatggtcaagggtgagtttacacagatagatagatttaggtctcttccttttgctttgtgaaagcatctagtgttttaggtgtcagagagggagatatccttacaaagcagagattatcattacaggtttacatttcttacaaagagtttcaaaataaacaggtaaatgccaaaaacatatattttggtgacggattaattcactagttggtctattcaacttaacttgtttcctaatgagattaaattcatgcacaaataaccaaaccaaaaattaaaccaaaagaatactcaccagaaaggatgtcctttacaagagcagatcccccaaaatgtaagagttcactgaaaaggtgggagctcaaaccaagagaggacttatctcgcagcataaagacaacttgtannnn

SEQ ID NO: 11592 - DNA, 1407 bp, Homo sapiens
  misc_feature 1: n = A,T,C or G
naggctagtcgagctgggtgtgaatcggccgaggctcgggggctgtgggaagcttgggctgtcccaggacgtcagtctcctcctctgaccctccctttccccttgtgtgtagggccgccgtcccacccccacctcgccggagtccggggcggcccggtgtcccctccgagcctgctgcactccacgtccccctaccagggctccagcccccagggaaatctccgaccaggcccgcccaggagccagatccaggctcctggaagaaccatgtccggcagctactggtcatgccaggcacacactgctgcccaagaggagctgctgtttgaattatctgtgaatgttgggaagaggaatgccagagctgccggctgaaaattacccaaccaagagaaatctgcaggatggactttctggtcctcttcttgttctacctggcttcggtgctgatgggtcttgttcttatctgcgtctgctcgaaaacccatagcttgaaaggcctggccaggggaggagcacagatattttcctgtataattccagaatgtcttcagagagccgtgcatggattgcttcattaccttttccatacgagaaaccacaccttcattgtcctgcacctggtcttgcaagggatggtttatactgagtacacctgggaagtatttggctactgtcaggagctggagttgtccttgcattaccttcttctgcctatctgctgctagtgtaaacctgttttttttcaccctgacttgtggaaccaatcctggcattataacaaaagcaaatgaattatatttcttctgtttatgatttgatgagtgatgttccaaagacgtgggtgcctacgtgattaggaacagctcgatcaagcctgggtgtgtatggggtgccggtgccccgcgttggtgaccacgccgccggaccggtcccaagttgccagcccggcgcgctggcaccgccgggggcataccgctataacatgagatctgtctctccaggctctggcttcctcaaggacagctgccaccaggtcctatccatcttgtaagtccagttcttaacgtggtggcactcggctgttacacatatgtttgttgagctgcactccaggctgtgccctctgagatgactctttcccttgctctgctatgtcttgcagggatgacgaggccctcttgccagctggactctgccaatgtttctgccaatggtgcactggtggcagctgtttctcttgtggttctcaaaccttagtatgtaagtgtctaagtatctgctgtcctgttgtgtttgttgaaaaggcagattcctagtttccttctcttggagattccattccttaggtccaaggtgattgagatgcaggtggtttacagaccacactttagaatcccggacgcg

SEQ ID NO: 11593 - DNA, 473 bp, Homo sapiens
acatactttcctgtgtcttgctgttttcacttactatatcttggagctatttctatattgccacattcaaagctttttaaagcattttcaggatagctatttatagtcaagatgtatcacagttttgtcttatttacctgtccccccactgatgaacagtctggttgcttctgtttgtttttttctgttattgtaataaacatccttatagttgcacttttttattgttaaatcttgatgtattcttaatcttttgttttaatagacacaaggtctcactgtgtggcccaggctggtcttgaactcctgagctcaagtgatcctcctgcctcagcctcccaaagtgctaggattacggacgtgagcaaccaccactggtcaatagttgcactttctaatgtgtgtttgtaggacagtttttcagtagtgtagggcatgaaggtttatagttaggtaaaatgttgctagattgt

SEQ ID NO: 11594 - DNA, 647 bp, Homo sapiens
  misc_feature 637, 638, 639, 640, 641, 642, 643, 644, 645, 646, 647: n = A,T,C or G
gcgtccgatgtgactgttttgaagacattgttccattagcttccagtgtcactattgagaagtccaatgtcattttaatcctcattccctttttcttcccactctgaaagattttaggatcttcagtttatccctggtgttcctgacatttcatgatgtaccttggaatagatattactctttacttttgctagtggggtacattgtatttaccaaacagagctgcatatgtatgtgtgtgcatactccccccatctcacccaatatgctatttttgagcctccatcaagcagtggggtctttgtttcctcctcttgaacccgtacagacaggaattctgccccgaacgttttggatcttgagcattgtgttttaagagcacagctgcaagatcaagaacatgcacctggcactgctaggtgcccagcgccatcacgccagcatctcccttcccattttccttgtgaccactgtttaggcattgagattaagcactgtatatgtatatgtgttcattgagagaggggattaagtttttttacttttaaatgaaatcaacaatgaaaatatcaattgacatcagagagagtttcttttaagcagtgaaatgaaccaacatgacggctgtcgggtgcannnnnnnnnnn

SEQ ID NO: 11595 - DNA, 3796 bp, Homo sapiens
  misc_feature 3795, 3796: n = A,T,C or G
cgacccacgcgtccgctgtgtgtactcttatctcactgttctattttttctcctcatttatattaactctttcttacctttttttctgaacttctaggccttctctttccagaactggtggaagacaaatgaaacggccaagatggtaagaaacaagccgcatttctccttggggagactgataatttaaaaggtttgttgtgtcagaaacattcccagcttcatcaccaaccctttccttccacctctgcccactggagaccacttacatcccgaagcggacgcggcagctgaagtcaggaaaccatgcatcacattagcaggagccaactgcagactttaaactccgttcaacatgtggatgcggcagagaaatgacctgtccagacaagccggggcagctcataaactggttcatctgctccctgtgcgtcccgcgggtgcgtaagctctggagcagccggcgtccaaggacccggagaaaccttctgctgggcactgcgtgtgccatctacttgggcttcctggtgagccaggtggggagggcctctctccagcatggacaggcggctgagaaggggccacatcgcagccgcgacaccgccgagccatccttccctgagatacccctggatggtaccctggcccctccagagtcccagggcaatgggtccactctgcagcccaatgtggtgtacattaccctacgctccaagcgcagcaagccggccaatatccgtggcaccgtgaagcccaagcgcaggaaaaagcatgcagtggcatcggctgccccagggcaggaggctttggtcggaccatcccttcagccgcaggaagcggcaagggaagctgatgctgtagcacctgggtacgctcagggagcaaacctggttaagattggagagcgaccctggaggttggtgcggggtccgggagtgcgagccgggggcccagacttcctgcagcccagctccagggagagcaacattaggatctacagcgagagcgccccctcctggctgagcaaagatgacatccgaagaatgcgactcttggcggacagcgcagtggcagggctccggcctgtgtcctctaggagcggagcccgtttgctggtgctggaggggggcgcacctggcgctgtgctccgctgtggccctagcccctgtgggcttctcaagcagcccttggacatgagtgaggtgtttgccttccacctagacaggatcctggggctcaacaggaccctgccgtctgtgagcaggaaagcagagttcatccaagatggccgcccatgccccatcattctttgggatgcatctttatcttcagcaagtaatgacacccattcttctgttaagctcacctggggaacttatcagcagttgctgaaacagaaatgctggcagaatggccgagtacccaagcctgaatcaggttgtactgaaatacatcatcatgagtggtccaagatggcactctttgattttttgttacagatttataatcgcttagatacaaattgctgtggattcagacctcgcaaggaagatgcctgtgtacagaatggattgaggccaaaatgtgatgaccaaggttctgcggctctagcacacattatccagcgaaagcatgacccaaggcatttggtttttatagacaacaagggtttctttgacaggagtgaagataacttaaacttcaaattgttagaaggcatcaaagagtttccagcttctgcagtttctgttttgaagagccagcacttacggcagaaacttcttcagtctctgtttcttgataaagtgtattgggaaagtcaaggaggtagacaaggaattgaaaagcttatcgatgtaatagaacacagagccaaaattcttatcacctatatcaatgcacacggggtcaaagtattacctatgaatgaatgacaaaagaatcttctggctagggtgttagatatatttatgcatttttggttttgtttttaaatcaagcacatcaacctcaagcccgtttagcaatgaggcagtgtagatgaatacgtaaaataaatgactttaaccaagtagctataatgggacttagcactgtatgcatacttaaaaaggttttgaaaaacaaactacttgagaaatatttgtttatatttttctctaacatcatgctatgtgtcagtctgaacatctgacaacagaaatttcagttattattctagctaagttttgaaaacatttgtcatgctgtttaatagaaaactgcaaaccagagatactgactccattaataaaccatattttgtgccgttttgactgttctgaccaaatactaatgggaacaattcttgacgtttttctgttgctgattgttaacatagagcagtctctacactaccctgaggcaactctacattggaacactgaggcttacagcctgcaagagcatcagagctgaccatacatttaaacagaaatgctggtttatttgcaaaatcaccagtatattttctattgtgtctataaaaaatcagtcatttaagtacaagaatcatattttccattcctttttagaaatttattttgttgtccctatggaaatcattcacatctgacaatttatatgttaaagagttttactctctctattttggtccaatttgtatctagtggctgagaaattaaataattctaaagtatgaagttacctatctgaaaatgtacttacagagtatcattttaaaatggatgtctctttaaaaattttgttacttttaccaacaatgtaatataatttatgtatattttattaataatagtgaattccttaaaatttgttctatgtacttatatttaatttgatttaatggttactgcccagatattgagaaatggttcaaatattgagtgtgtttcaatatattatctggcttatttcaacatgagtaatatgagcaaaataagttaaaacctgcgtctgatcaattttcctcatgactagaactaaaacagtaaatttggacaatattaagcctcaaataatcatctccaaactccttctaacactttttaaatcagattggaagacatggacaaatcaggttcatgtgttgcatctttatgtcctttgccaatatccaagatcatcacatatggtagatattcacatggagtttcaaattcagaatagattaccattaccttcctgcccttacacatcctactccttatttaaaagttctatttgtgacttttcatttcctgaaagtttaaaaatacaatttgagaatgtttataatacattctctcctgtcttttcacggttacgtctgttattgctgaaatacaccacattttctttgttctggtcaaggttaactcaatatctgtgtgaaagagaactactaacaacgttacaatagaggctagatttgaaaaaaaaaatctatagatctaattgatacaattgtagaacaaaatgtcaaaataatgttttaagtataagagaagatggaccaaggagagagagatcatttgaaaatctaattgtagcttttctaggctcacattcatgtactacttttagcacccttatgggctgtgctcgccccctggacagttgagctttggattatcttcctcttcaattttccctctattgacccgagtgtctccctctgcttctacagagcctggggctggatcccttccacggtctggattgaaccttttcctaaacacgcctctggtgtcacagtgggcgcggcctttggaccgaaaactcgtgcgctctccnn

SEQ ID NO: 11596 - DNA, 312 bp, Homo sapiens
  misc_feature 1: n = A,T,C or G
nccaccgcggaggttgcctaagtacaaagaaaccctttgcagacagctcatttatagagagaagctaagtatttatttacttgctactcaatttaaaatacgaccatggcaggcaaccaaccaggagaagagctaaaagtttgaaagcactgcccttttctctactatagaagttacagggtcaagccttggaaaatttccacaaaataaggctttgctaaacatatttaccttatcagaaagattgtatctcaaaaaagttacgtttttcttcaggcaagacaagaaaaactgcctgtcctaatcgacagt

SEQ ID NO: 11597 - DNA, 280 bp, Homo sapiens
aggtacattttacttgcttgatctctgattcccctcactgggtcacccgcacctctgagtgccctcctcaccctgcatgagccttgacaccaggccctgagcctttcctctgtgtggttgtcctcacagtcctctgtgtgggatccagaactaggcaccaagctccccacgtaggagggtgccctccccattccctctgctgaggctcgaaccagcatgtcaggctgctcccccatgtggacacctgactctctttgggctcttactctacactggctgt

SEQ ID NO: 11598 - DNA, 541 bp, Homo sapiens
  misc_feature 541: n = A,T,C or G
actttttttttttttttttttttttttttttaaaagggcctgcttattgttttgtgctacctagcatccagccgcccctttaattttcaggttagcgtgtgttgtgtgggtcccagtggactggccttgtcgtttctgctcacctcaggatagttatggaatgttcatgacatagacttagccaattcaatgtccttgtcctagattttgaatactgaaggaggaacaaagtgtagggacagttgaagtgtttacagtggtaagggcaatgatgtggagagtccagaggtgagggctgcagcaagactacagtagtggcaagtgtctaataatagcaatgcacaatgtgacacacgaactagaccttgatcatctttcctgatgtctgatctggactctgttgcatctggcctggttctccagcctatagttgattctgcaagctccctgctatccttccaatacacttctctactgcttaaaagagtcatagtaagttctgttgcttgcaatcaagaagtttttattcgggatttataan

SEQ ID NO: 11599 - DNA, 543 bp, Homo sapiens
  misc_feature 1, 2, 503, 508, 510, 513, 543: n = A,T,C or G
nnacagaaaagcagaacatgacaaagccattagaaataccaagcatgtctcctggagggtaagaggacagtgagcccttgaagcaagttggggggattgggaatgattttacaggatggtcagagttcgaaagatgggtaggaattcaacaggagtgagaggtagaacacaagcttagctgaaagaacagcatagagaaaagacaagttattggttacttgaagaagagttagtgaagagcctcaatgcctagctaggcagctttatacctaatttcagtgggtgatgaggactactaaaggtaactgagtagggaagtgacatcatgatagctataatgactaggctggggcagtgggatatcagtccagttagcagatcaataatctggaccactttgaggaaaagcaaaggcatcgtagagaaaagaaccttaatttcaggccttatttttagttgaaaatggtctgagtttggtggtgtgtgtgtgtgtgtgtgtgtgngtatntntangagagaaaaatgagagagagtgagtgagan

SEQ ID NO: 11600 - DNA, 1001 bp, Homo sapiens
actcatttttaatacccgtgcagtggggaattgatactgtggttttcaatgtcacccacactgcagcacggccacagtcaccatcccgatttttgctacaaatgaaaattactgtataatgagctccttaacacttttctttaaacctgtgtttggaagacttgcgttggtgtggccctgtgccctaatacctgtgaaatcacagcaccgatgagctggttccaatttttaaaatatatacatgcagtacttccatgactattcaaagaaaaacaattccttccatttgccacctgagatgaccaccagtggtgtgaactacctcctgcccccatccgcagtcccaggatcctgggacagggcttatgaacacaaccactgtagtcagctcacctgatccacagcctggcacccccactgtctggctagggagcctcgaatgggtcccaaggccaccctgctcctcagttacatcatctgcatagtagtggtggttgtgaggaattcaggagctgcagcataagggctcggcaggtcctaagtgcacagtaaatgccagtgattcttaagagtctgagctcccattgtagaggcaagtaagctgaggttcagagacagaaaatgacttgcccaagatcaccccagctgggaagtgacagtgcccagggttggagccctggttgagcctggttccacaggccagagctcattctgccctctccccggaagacctcccaccctgtccccatgcctctgcttctccctcaccccaattaattccccgctgccttctaggataagtgtgagccactggagaagcagcacgagaaggagaggaaacaggaggagggggaatcctagcaggacacagccttggatcaggacagagacttgggggccatcctgcccctccaacccgacatgtgtacctcagctttttccctcacttgcatcaataaagcttctgtgtttggaacagctaaaaaaaaaaaaaaaaaaaa

SEQ ID NO: 11601 - DNA, 485 bp, Homo sapiens
  misc_feature 468, 483, 484, 485: n = A,T,C or G
actacaaagcatatctgaaaggaaagattgagcgcaccaactatttgcagaaacgagctgcagccattcaattacaagctgcttttaggagactgaaagctcataatttatgtagacaaattagagctgcttgtgttattcagtcatactggagaatgagacaagacagagttcgatttttaaaccttaagaagactattatcaaatttcaggcacatgtaagaaaacatcaacaacgacagaaatataagaagatgaagaaagcagctgttataattcagactcatttccgagcttatatttttgccatgaaagttctagcatcttaccagaaaacacgctctgctgtcattgtgctgcagtctgcatatagagggatgcaagccaggaaaatgtatattcacatcctcacatctgttataaagattcaatcatattatcgtgcttatgtttctaaaaagggaattnttgagcctaaaaaannn

SEQ ID NO: 11602 - DNA, 534 bp, Homo sapiens
  misc_feature 1, 534: n = A,T,C or G
ngtgtgccaccacgcccagctaatttttgtatttttagaagagacagggtttcaccatggtggccaggctggtctcgatgtcttgacctcgtgatctgcctgcctcggcctcccaaagtgctgggattacaggtgtgagccaccacacccggcctgaattgcacttttgatggctgagccaaatgctcattctatttaatattgcacagcctgaaccaaaacccgtaacattataaaggaagagatgagagccatttcaaactgtgagagaagagaagacatcaagcaaaatctgggggttttagccaacagacttcagtcctggggcctcgcagcaaaaaaacaccttcagttgccccagggctttacagggtgtggctcgcctgttctgttgctacacgctcaaacccctgaggggaggggagcatgcagatggacaggtgcaggagcctaagtgggggtgtgttacagtgtgcccttttagccctgctgtccatggatggcttgaatgttaatcaactcaatggacactcn

SEQ ID NO: 11603 - DNA, 1137 bp, Homo sapiens
  misc_feature 1, 2, 1137: n = A,T,C or G
nnaatagcaaagtaaatcactgaagggatttaagcatggagtaagtttgtttaatttatgtgtttaaagcacttatttggctactacttagagactagattgtcaggcaagaggtaatggtggtttgattgcaactgattaaagagaagttgatggatttgagatacctaataagaatttattgattattttgtgattgatgtgattaaggacatgcatttaagtactatgtggcatacaccttgaccaaatcagtgtgtctgcctgcatgttttgctaacaagtatgcttgcttatcatttcttggtattctaagccacacacaccacacgttcctccagggtgtaacctcccacagaacctggctctctgttgaactcgcgattggcaatagtgataatgacaatgaaaaaggtgtaacaatcttgcttttgcttcccaggctctcccctggacaagttggtgtccaacacatcagacctgccaaaacgcctagcctcccgaaagtgtgtgtctcctgaggagttcacagaaataatgaaccaaagagagcaattgtaccataaggtgaatttctccccacctggtgacacaaacagccttttcccaggtacctcggctgaggtacacacagttaaccacaaaacaggcctctctgaaaaagccattgccatggactgccagacagacaatgacaagacacaaataccttctggtgtgtgagccacgggacatgtgagcttccccgctgatgctcctcttatatcaaagatcactttcacaagatgagcgactcaatatcttttatcaaaccaatgatcacctgcaagctatggtatatttttgcagctgtgtagagctatgtggcatgagaatgtgggacttataaattgctgatccaataaatagacattatgggcaacagtgtcttatcagctagtgtgtactaaggtttcaggaacagttgttctgaccttactatccaacgaggagtaactgattcacttctcagaggtatattaacctaatttggacatcacagaatgcctgaaaaataattcttcagtgcattaaacagtcccctggatctattaaagtaagcttattcgaaaaaaaaaaaaaaaaaaaaaaaaagtn

SEQ ID NO: 11604 - DNA, 429 bp, Homo sapiens
  misc_feature 429: n = A,T,C or G
actttttttttttttttttttttgtgacaatgccaatattccaagagcctgtaataaaggctctcagcataaatggtctactatctaacaccaccagaacccttttggcatcttttgcatctggatacttttgctctatgcatgagtgggatgtatggtcattccttttatgcaatcatgtagtaggcaaaacaatggctccctcaaagatgtccacatcttaatcccaagaatctgtgattatgttagtttatattgcaaaggagaattaaggctgcagattgaattaaggttgctaatcagcttgcttttaaatatggagagcatcctggattatctgtgggagcccagtgtaatcatgaggctacttaaaagtgaaagcggaagacagaagaagagtcaagagtgaaatgtgaccccggaagaacn

SEQ ID NO: 11605 - DNA, 1010 bp, Homo sapiens
cctttgtttatctttgcagtttggtggttttctgtaatgataacatgtggttccattctctttcttatttgtgtgtctgctttaccaatgagttttatacttttgggttttcatgatggtgaatatagcccttttgcttccagatgtaggactctcttaagcatttattgtagggtcagtctagtgataataaattccatcagtttttgcttatctaggaaagactttatttctcctgcatttctcaaggagatctgtgctgggtacagtattgttgactggctaacagaggaccaattaataagccaaagaaatggctctttaacaatgaacatttctgccatcaactgacagatcccaggaataaatgttttccagtgaggagacttctctggttttcagaacacctctggctgcccctgcccaccccatagaagggctatccctccaggtcaggttagcatcatcacctagagccaacaagtcaaggaggtgatggtttgcctttgacatctctacccagaccagactccactgagaagactctccctttttcatcactgccctacctagttagttggtcctgccctggggccagagtttcactaggggctgaatagtatactgttagctcaggcaacagatgaactctgcctccatgcgcaaatacaaaaagctatctctgcttctttttcactcacttaagattttggaagaatggctcctaaagcgggtgatcatctgccctcacgacttacagtgcctcagcatcacatgctattcattttgcacagcaaaaccaggaagtgaatatgactgttatccctacttcacaagtagagaactctgaggccctgagaggttaagaggtgcaggtaagatttgaacctacgggctgtgtgcggtggcttatgcctgtaatccctgcactctgggattacaggcgtgggccaccacacccggcctactgcctaccattttgcccaagcttcccagtactagaagaaccc

SEQ ID NO: 11606 - DNA, 322 bp, Homo sapiens
acctctgtgtggcaggcgatcaatggtgtttctatctcagccagggactcaggtgcgagactgagaagcccaggaggcaagaggcacctgcagctctagagcccactgcagattttcttgagggccgtatatccagaaccatcccagggcttggcttttgagagaaaatgtagtcttaaagaatgaacaagtgggccgggcgccgtggctcacgcctgtaatcccagcactttgggaggtcacgaggtcagaagatggagaccatcctggccaacacagtgaagccccgtctctactaaaaaaaaaaaaaaaaaaaaaaagt

SEQ ID NO: 11607 - DNA, 176 bp, Homo sapiens
  misc_feature 1, 2, 3, 4: n = A,T,C or G
nnnnactcactgagattctagtgagcatatctacattaagctggggtgcacattctttagatatatcctggtatgccatatacctgtatacaagctgccagcagacaccgatggcgaagagcctcatagcagatgtggcagtggccgtcacttcccatgacccgcgtacctgcccg

SEQ ID NO: 11608 - DNA, 2228 bp, Homo sapiens
  misc_feature 1, 2222, 2223, 2224, 2225, 2226, 2227, 2228: n = A,T,C or G
nccgccattttcccagagcgagaggcagtgacactgagcgggcgcagggggccgagtcggagaccgtgccggagttcgggagcggcaacagagtgggcatagacactccgagcagcctcgccgtcgtctctgcgttcctgttgactgcctggctgccccctcccctactcctcggttcctggtgaagaggctgcgcgctgctgtttggggagggggtgtgtggagccgggtcctgtgtccgcagtggctgctgtcggggggtcgcctgttcgcggaggtgcggagagactccttgggggtcgagcactgtggctggcatgccccagtgttttggataccaatgcataggactccatagtaatcgaatttaccagaggcgaacgtcatgagcatagtgatcccattgggggttgatacagcagagacgtcatacttggaaatggctgcaggttcagaaccagaatccgtagaagctagccctgtggtagttgagaaatccaacagttatccccaccagttatataccagcagctcacatcattcacacagttacattggtttgccctatgcggaccataattatggtgctcgtcctcctccgacacctccggcttcccctcctccatcagtccttattagcaaaaatgaagtaggcatatttaccactcctaattttgatgaaacttccagtgctactacaatcagcacatctgaggatggaagttatggtactgatgtaaccaggtgcatatgtggttttacacatgatgatggatacatgatctgttgtgacaaatgcagcgtttggcaacatattgactgcatggggattgataggcagcatattcctgatacatatctatgtgaacgttgtcagcctaggaatttggataaagagagggcagtgctactacaacgccggaaaagggaaaatatgtcagatggtgataccagtgcaactgagagtggtgatgaggttcctgtggaattatatactgcatttcagcatactccaacatcaattactttaactgcttcaagagtttccaaagttaatgataaaagaaggaaaaaaagcggggagaaagaacaacacatttcaaaatgtaaaaaggcatttcgtgaaggatctaggaagtcatcaagagttaagggttcagctccagagattgatccttcatctgatggttcaaattttggatgggagacaaagatcaaagcatggatggatcgatatgaagaagcaaataacaaccagtacagtgagggtgttcagagggaggcacaaagaatagctctgagattaggcaatggaaatgacaaaaaagagatgaataaatccgatttgaataccaacaatttgctcttcaaacctcctgtagagagccatatacaaaagaataagaaaattcttaaatctgcaaaagatttgcctcctgatgcacttatcattgaatacagagggaagtttatgctgagagaacagtttgaagcaaatgggtatttctttaaaagaccatacccttttgtgttattctactctaaatttcatgggctagaaatgtgtgttgatgcaaggacttttgggaatgaggctcgattcatcaggcggtcttgtacacccaatgcagaggtgaggcatgaaattcaagatggaaccatacatctttatatttattctatacacagtattccaaagggaactgaaattactattgcctttgattttgactatggaaattgtaagtacaaggtggactgtgcatgcctcaaagaaaacccagagtgccctgttctaaaacgtagttctgaatccatggaaaatatcaatagtggttatgagaccagacggaaaaaaggaaaaaaagacaaagatatttcaaaagaaaaagatacacaaaatcagaatattactttggattgtgaaggaacgaccaacaaaatgaagagcccagaaactaaacaaagaaagctttctccactgagactatcagtatcaaataatcaggaaccagattttattgatgatatagaagaaaaaactcctattagtaatgaagtagaaatggaatcagaggagcagattgcagaaaggaaaaggaagatgacaagagaagaaagaaaaatggaagcaatttggcaagcttttgccagacttgacacacacaccacagggggcgccaaaattccctcgcgggccaactagctccagttcttgacannnnnnn

SEQ ID NO: 11609 - DNA, 382 bp, Homo sapiens
acaactgaccttctgggctggataattcttggttggggggactactctgcacatgatagggtgttcatctctggtcttcacctatcaggtgctgacagcaccacagcaccccaacaccgcattgtcaacagacactaccaaatgttatcaggggaggagagtgattcacccctcttaaggaaccactgaaaatgattttaaaaatacctattattttcatctttaaggaataattattggccaggctcaatggcacatgcctgtaatcccagcactttgggaggctgaggcaagcaaatagcttaaggccaggagctcaaaaccagccaggacaacataatgaaacctcgtatgtacctcggccgccaccgcgtggagctcc

SEQ ID NO: 11610 - DNA, 565 bp, Homo sapiens
  misc_feature 490, 496, 564, 565: n = A,T,C or G
acatgggtaagtaaaactcgtgtaagtttccgcatagttcacactcatgggaaacaaaaactgcgccttgtatatcatcatcccccgactgtctgtcactcacagaattcaaggcacatatgaagtgctcaataaacaagagcttagaggaaatcaatgaggcttagtgcatagccttattgcaaactgtggtctccaatgcaaaaacaaaataaaacaaaaaccccacaactaaaaacaaagtaggggatgttaacaagagaacaaggatatgaaacctatctcatgaaagaataaacatttcacacagaaatcatgaatgttggtattaattttaaatgacatttgtcagccatagaaagtgatctctaataactcacgatagagcagtttaatgcccaaataattgaaaaaagaattggagaggtaacctaacggcagataagattaagtaaggaaaatttcaatctgtgtgaagaagagaaggctntaattnttcaaccctttgggacaatttggaacatcagggctctacaccaaaactcgactttatttatcctatann

SEQ ID NO: 11611 - DNA, 1047 bp, Homo sapiens
  misc_feature 1014, 1015, 1016, 1017, 1018, 1019, 1020, 1021, 1022, 1023,1024, 1025, 1026, 1027, 1028, 1029, 1030, 1031, 1032, 1033,1034, 1035, 1036, 1037, 1038, 1039, 1040, 1041, 1042, 1043,1044, 1045, 1046, 1047: n = A,T,C or G
accccaaaaccaggggctgcagctccagcaattgggaaggccaagttttcttgcacgctccccagaaaaggggccaagtccatggggctgagcagtgatagactgcagacctcaccaccactgaaccttgtaggataaggcccactagcctgggatgctagtgaggccaccctagtcctcctgagttctccagctgggagcagctctacacttctccggcatgcagctcccaaagagagaggcagtccacctttttgctgtctcgcaaccctccctcctgctgctctcaggcttgggagggtgcacagcaattagggactatcacagaaccccagcacagtgcatctggtgaacttaaaaaaatcaacaagtgaaaaacaaacaatcccatttaaacgtacctgcagaggttcagctttccaggaatctcatcatgatccatactgctgacacaggcctttgtcacctgaagcattcttaaaataaggagactgacattaaacaggacaattgtgaactccactttgtaagcatcatacatatcttacaactcattctgaagactcctttattcttgctcttcccagagagctactgtgtttagtcatgctcactgcactcacaagagaaaaagagtaagtggcatatttgcaggtgttgatggttacaagagcatttttactttttcctccatgtttgttctgcagcatttccattgatgcatgctattgtagacttcttaggttgaccttggccttgacctccaccactagctcatgacccaaaactgaagatgtgcatcagaaagggacagatttggtctttctgctgtaaaagatattctgccttagtgcctgctaatttgttgtgcatagtcctgtgctgccaatcttccccaccaattgttaaggttaatgtgtgttttatatgtgtattcacaaacattaaaatgtaatcagtggaaaaaaaaaaaaaaaaaaaaaaaaaaaaaaaaaaaaaaaaaaaaaaaaaaannnnnnnnnnnnnnnnnnnnnnnnnnnnnnnnnn

SEQ ID NO: 11612 - DNA, 375 bp, Homo sapiens
  misc_feature 131, 374, 375: n = A,T,C or G
acgcctgtagtcccagctactctggaggctaaggcaggagaatcgcttgaatccgggaggtggaggtcgcagtgagccgagatcgggccactgcactccagcctgggagacagagcgagactctgtctcangaaaaaaaaaaggaaaaagaaaaaaaattgggggggaatttttttttaccaaaacaattaagggcatatccaactttaaagtttttatagggtatcacttttatagaaatttttttgaaaagccccacatgttaaacctaatgatctaaaatcttattctgatcaaaccactttttaataagtgaggaaacttaaacccccattggattagactaaaaaattaccaaattaattgaggaaccnn

SEQ ID NO: 11613 - DNA, 428 bp, Homo sapiens
  misc_feature 428: n = A,T,C or G
acttttttttttttttttttcccagaaaaggtttccaatagagattggaatggttttccaatagagatcttcttgggtccaatgatgatgtaatactaatgcttgttaatatactttacaaaattgctctctaaagctcttgtttctatctgaaatacccaattaatgacagtttgaactgtaaataacctctacaaggtatacaaactattgactgttaatatactttataaaattgctctctaaaactcgtttctatctgaaacatccaccaattaatgatagtttgatctacaataacctctataacatatacaaactattggtttttttgttgttgttttttgtttgttttggagatggagtcttgctctgttgtccaggctagagtgcagtggcatgatcatggctcactgcaacctctgcan

SEQ ID NO: 11614 - DNA, 496 bp, Homo sapiens
  misc_feature 496: n = A,T,C or G
acctgaagtcccagctactcaggaggttgaggcagggggatcccttgggaccaggagtttgaggttacagtgagctacaatagcaccactgcactccagcctgggcaacacacaagatcctgtctccttttaatgaaaaaaaaagaggggaggggggcagaggagacaataggtatttgccagaagaattactaaaccaccagtaaatatgaaattatgcacaacctcagtggcaattaaaatgcaaaattagaaagacaactttaggcctataagattcataatgatgtttttaaaaaaacttattgaaaaaggtataggaaaacatgttctgtattttcatctcttactatgttttcttacatattaataataatcccccacttcctatccttaggaaatatcaactcttccacctttattgggaactctagcatctctactgtagtcttttctactccccaactcataccataatcaggggcatcctcgacgn

SEQ ID NO: 11615 - DNA, 485 bp, Homo sapiens
  misc_feature 430, 477, 478, 479, 480, 481, 482, 483, 484, 485: n = A,T,C or G
actgtaactgaagaattaaaggcaaaaatttaagactggaatcaatggagaatagaaaaagttttagctggcaagtgaatatgcttcagataaatcaactaagatagactgaaataagccaggggtaagagtagttcttactagaatagaaatgccagccgggcgccgcggctcacgcctgtaatcccagcactttgggaagccaaggcgggtggatcacgaggtcaggagattgagaccacggtgaaaccccgtctctactaaaaatacaaaaaattagccgggcattggtggtgggcgcctgtagtcccagctactcgggaggcggaggcaggagaatggtgtgaacctgggaggcggagcttgcagtgagccgagattgtgccactgcactccagcctgggtaacagagcgagactccgtctcaaanaaaaaaaaaaaaaaattttaaaaaaaatttttttgccggggggggcnnnnnnnnn

SEQ ID NO: 11616 - DNA, 416 bp, Homo sapiens
  misc_feature 412, 413, 414, 415, 416: n = A,T,C or G
acctcaatggtttggaatgcaaaaagtgtaattaaatttgaagctgaaaaggaaggcaccttggagagtcctggctcttattagctttcaagctagggacaaacagatgccacagaccattgagggctgtttgttggatgatgctaattgtttactgtgcttattattctgtgacatccttagaatcacccaggtggggagatgtcagactaaagttaccaatatctgtgctaagaaaaactcaacacttctatagtttaagtccattttggtcaaagcagaaggattcaaagccattctgaggtttatgaacaagattaagaaagcacctggcactgattttagcttgtaaaagtggaaccctcagaaattatttcagattatttcatacacctagaaaaaatatatagannnnn

SEQ ID NO: 11617 - DNA, 616 bp, Homo sapiens
  misc_feature 616: n = A,T,C or G
gcgtccgctgagatgggcaggtctatacctggtcctcctaatggccagtacaagtgccagccctgatgggggttggaggacagttctcaggccactggagcaatagttcagggagaagtggagcaactctttctgttccaactaaccagcatggggaaagtggggtggctcgggttccatagcctagcaggtggtagtgagacctgccttgctctcatgctctcaacctagcgggataccatcctacggcctgccactggcatcgagctgaggcagccagccaaatcacaagcagtttgtctttggactgcaatataaccccaggccataaaactgtggctcccaggtgaaacccctcccagcccaattccaggatggggaggttcccgaatcccataaccttggctggagccaatgccacacttgcttatcagttctggcctcgttcctgggactgtgcatagtctgctaaaaggtaggataaagagtggtgtcttatggttgccacttgtgtttcagaaagggcatgggatgttctttccctggagtagttccttctcatagtctcctggctactccctaagttagattcaggacttgagagggacatagtacn

SEQ ID NO: 11618 - DNA, 453 bp, Homo sapiens
  misc_feature 1, 2, 3, 4, 429, 430, 431, 432, 433, 434, 435, 436, 437,438, 439, 440, 441, 442, 443, 444, 445, 446, 447, 448, 449,450, 451, 452, 453: n = A,T,C or G
nnnnctaacttggtaactcttctcttaccaaaattaatctcaagccaagaaaaatggtttcatgaatagaatctactagtcttttatatcttataatggtagatcactgatgaggtagaactccataagagcttcgctctcacagtaaaaggttttggttgtgcatggattacacctggtgaaagttggttagtattgtctaagtggcttaagacaaatttattttgatttgtattgtgatgactttgcgaagcaccagaatttttcccgcttcgtgtgtgtgtgtgtgtgtgtgtgtgtgtgtgtgtgcttttgagtccaggtctcacaccgttgcccagcctggagtgcagtgagccgagatcgcaccactgcactccagtctgggtgacagaacgagactctgtctcaaaaaaacaaactacctannnnnnnnnnnnnnnnnnnnnnnnn

SEQ ID NO: 11619 - DNA, 469 bp, Homo sapiens
  misc_feature 1, 2, 3, 4: n = A,T,C or G
nnnnaaatccggaaaggacttcgtgaccgaggcgctgcagagcagacttggagctgatgtctgtgctgtcctccggctctctggtccactcaaggaacagtatgctcaggtaggtggtgctttgtggcatccggtgtgttgggcggggccggctccaggactttggagctgtggctgctgcatgagtcactggcatgattcccgtcaccactgctggcagggtggcggccagctcttggttttctgtgagtggacctttcgggggcattttcagcttatatttctttcctaatagcctccctcccttcagagtgagttcaggaaggtgtgcccaggaaaggctgtcgacactcgagttggcagctctgatgctgtgtgattagtaaggacctgcctgtgcctcctcacaccaccctctcactcagctggcctgacacagcccctagaactttgctcctagaaatttagt

SEQ ID NO: 11620 - DNA, 455 bp, Homo sapiens
  misc_feature 455: n = A,T,C or G
acacgcctgtagtcctagctactcaggaggctgaggcaggaggatggcttgagctgaggaggcagaggctgcagtgagccaacattgcaacactgcaccccagcctgagcattagagccagacctagtctcaaaaaataaataaaataaaataaaataaaataaaatgtttaataatgcctactcagacaaagaaaggctcaggcaaaagactgagtctgatcttctacattgaggagaccatgttgattagtgttatattcaaaaaaaccaattcccaagtaatgcatacacagctgaaagaaggaagtattccagctacaccctccaagttttctacatctcagtaaacggcatcgccacccacctagaaactgggcatcatttggttcctcgttctcctttttttttttttgagatggagtctctgttgactccgggttcaagccccgcgtn

SEQ ID NO: 11621 - DNA, 353 bp, Homo sapiens
  misc_feature 352, 353: n = A,T,C or G
ccgggcaggtaccaccacctatccacactctcacacaatcaccccttttgaagtaaagcctatattttaaaaataaccattacagattgtgagtgcagtctaggatcacatagcagaactaaaagctaactggcccacccacaaagtaaatgtgagacagagggctcggggtagccatactctagccaagtagtacgcgggaatgccccaactaaatactaccgtatggcccaccataattacccccatactccttacactattcctcatcacccaactaaaaatattaaacacaaactaccacctacctccctcaccaaagcccaaaaaaaaaaaaaaaaaaaaaaaaagnn

SEQ ID NO: 11622 - DNA, 935 bp, Homo sapiens
  misc_feature 1, 2, 3, 4, 5, 6, 934, 935: n = A,T,C or G
nnnnnnctgaagctcagcagcagctatgcaacaccagacaggaagtgaatgaattaaggaagctgctggaagaagaacgagaccaaagagtggctgctgagaatgctctctctgtggccgaggagcagatcagacggtaaaggctgaaggagatagcctctgttcccttccgatcctttctgatcaaactcatgtacatttcctgccagacttaggatttcttaagatctttttctcatcttgaggtagttgctgcaatgagtttaccaacattgtggtcacccaagagaacactgtacttttggagtataagagagtcagtgttttctaaaacagttgttcttagagaataataatgatatctaccattactgaaagatattttatttcaccctaaccataactatatgaggtaggtgttgggttctctagaggaccaaataagtgacaacctcattttctacctgagatctgaatccatggaaatcttttttaaaagattaaaagattgagagattaaaagactgctttataaatgatgttaaaagaatgtagctttttatttgttggcaaatgcacttcctaaccctgaacttcccctcccagtcacagacaatgttgggccaaggtagacctccttcacagaaaatcctgctcttgccaaacaagagtattggaataacagagtgaactgtgcttcctatgagcagtttgctccaagtgtaatttggaagggcagagctacacatccctagttccttattctcatcaaaagaatcactatgcatgagaggatagagagttgctacaagtattttgctgctggaagtccctttccacggaaaatatcggtaaaagcaagcacttttattatattttgggagaaagccacctatgtatatgatcactttcctcagagaatgacatttctgann

SEQ ID NO: 11623 - DNA, 1645 bp, Homo sapiens
agggagtcgacccacgcgtccggcagcaggaggtttcggctaagttggaggtactggccacgactgcatgcccgcgcccgccaggtgatacctccgccggtgacccaggggctctgcgacacaaggagtctgcatgtctaagtgctagacatgctcagctttgtggatacgcggactttgttgctgcttgcagtaaccttatgcctagcaacatgccaatctttacaagagggcccagccggagatagaggaccacgtggagaaaggggtccaccaggccccccaggcagagatggtgaagatggtcccacaggccctcctggtccacctggtcctcctggcccccctggtctcggtgggaactttgctgctcagtatgatggaaaaggagtctgcatgtctaagtgctagacatgctcagctttgtggatacgcggactttgttgctgcttgcagtaaccttatgcctagcaacatgccaatctttacaagaggaaactgtaagaaagggcccagccggagatagaggaccacgtggagaaaggggtcccattgggtctgctggccctccaggcttcccaggtgcccctggccccaagggtgaaattggagctgttggtaacgctggtcctgctggtcccgccggtccccgtggtgaagtgggtcttccaggcctctccggccccgttggacctcctggtaatcctggagcaaacggccttactggtgccaagggtgctgctggccttcccggcgttgctggggctcccggcctccctggaccccgcggtattcctggccctgttggagctgacggcgctactggtgccagaggacttgttggtgagcctggtccggctggctccaaaggagagagcggtaacaagggtgagcccggctctgctgggccccaaggtcctcctggtcccagtggtgaagaaggaaagagaggccctaatggggaagctggatctgccggccctccaggacctcctgggctgagaggtagtcctggttctcgtggtcttcctggagctgatggcagagctggcgtcatgggccctcctggtagtcgtggtgcaagtggccctgctggagtccgaggacctaatggagatgctggtcgccctggggagcctggtctcatgggacccagaggtcttcctggttcccctggaaatatcggccccgctggaaaagaaggtcctgtcggcctccctggcatcgacggcaggcctggcccaattggccccgctggagcaagaggagagcctggcaacattggattccctggacccaaaggccccactggtgatcctggcaaaaacggtgataaaggtcatgctggtcttgctggtgctcggggtgctccaggtcctgatggaaacaatggtgctcagggacctcctggaccacagggtgttcaaggtggaaaaggtgaacagggtccccctggtcctccaggctttcagggtctgcctggcccctcaggtcccgctggtgaagttggcaaaccaggagaaaggggtctccatggtgagtttggtctccctggtcctgctggtccaagaggggaacgcggtcccccaggtgagagtggtgctgccggtcctactggtcctattggaaccgaggtccttctgga

SEQ ID NO: 11624 - DNA, 597 bp, Homo sapiens
  misc_feature 1, 592, 593, 594, 595, 596, 597: n = A,T,C or G
ngtaccaggctagccttcctgatgactgcagcagcaaggctgcccatgggccaccccagacagcctgcttagaatctctagaagagctgcttgatgtaagacattaagacattcttaaacgaagccagtcttcaaggactagaataaatccttaattcttccaatacatagacattaacgtaaagcaacaagaaacaaggaaagtcaaatagacatagcactccccaaagcatataataatctctaagttgatccaaagatacaaactgcctgacaaataattcaaaataactcattaaaaaatgctcactaaacttccataggatacagggaaacaattcaatggaatcaggaaaacaataaattaccaaaaagagatatttaccaaattaccaaaattaccaaattacaaaattaccaaaagagatatttaacagacagattggaattttaaaacaaacaaacaacaacaacaacaacaaaaatcaaacagaatttctggggcagaaaattagagtgaacgaaataaaaaccaccagagaaaatatcagtaacagaattgatcaagtagaaaaaagatttatacatgaannnnnn

SEQ ID NO: 11625 - DNA, 3327 bp, Homo sapiens
  misc_feature 1, 2, 3327: n = A,T,C or G
nnactggaactctcaaaggatccaatccttcctgccagacatcaggtctcttgtcacaatggatgcactccacttccagtcatgaaggccataagcagcacagatcacatactttacctataattcgaggcaaaaatgcactttctaaccccaaactcttacagatgttagacaataccatgaccagcaactccaatgaaatagacatcgtgcatcatgtagacactgaggccaatatagctacggaggtttgcctcactattctggacctgttatccctcttcacacagactcatcagagacaactccaacaatgtgactgtcaaaattcattgatgaaaagggtctttgatacctacatgctctttttccaagtcaatcagtcagccacagcgctgaagcatgtgtttgcctccttgagactgtttgtatgcaagtttccttcagcgttctttcaagggcctgctgacctctgtggatcattctgttacgaagtcctaaaatgctgtaaccacaggtcacggtcaactcagacagaagcctcagcccttctgtactttttcatgaggaagaattttgaatttaacaagcagaagtcaattgtccggtcccacttacaactcatcaaagctgtgagccagttaatagccgatgctgggattggaggctctcggtttcaacattcgcttgcaattaccaataatttcgccaatggagataagcaaatgaaaaacagcaatttcccagcagaggtgaaggacctgactaagcgtataaggactgttttgatggccacagctcagatgaaggagcacgagaaggaccccgagatgctggtggatctccagtacagcctggcaaactcctacgcaagcactcctgaactacgcaggacctggctggaaagtatggccaagattcatgccagaaacggagatttatctgaggctgccatgtgttacatccatattgctgctctcattgcagagtatctgaaaagaaagggttactggaaagtggaaaagatttgcacagcatccctgctctcggaggatacccacccctgtgatagcaactcattactaacaactcccagtggaggaagcatgttctctatgggatggccagcttttttgagcattacaccaaacattaaggaagaaggagcgatgaaagaggattctggaatgcaagatacaccatacaatgagaatatcctggtggagcagctatacatgtgtgtggagtttctctggaagtctgagcgatatgaactcattgctgatgtcaacaagcccatcattgctgtctttgagaaacaacgagacttcaaaaaattgtcagatctctactacgacattcatcggtcatatctgaaagtggcagaggtggtgaattcggagaagcggctgtttggtcgctactatcgtgtggcattttatgggcagggcttttttgaagaagaagaaggtaaagagtatatttataaagagcctaagctgacaggtctgtccgagatttcccaaagattactcaagctctatgcagataaatttggagcagacaatgtgaagataatccaggattccaacaaggtaaaccccaaggatttggaccccaaatatgcctacatccaggtgacctatgtgacgccgttctttgaggaaaaggaaatcgaagaccggaagacagatttcgaaatgcaccacaacatcaaccgctttgtcttcgagacacccttcacgctgtcgggcaagaagcacggtggggtggcggagcagtgcaagcggcggacgatcctgacaacgagtcacctgttcccctacgtgaagaagagaatacaagtaattagccaatcgagcacagaactgaatccaattgaagtggcaattgacgagatgtccaagaaggtttctgagcttaatcagctttgcacaatggaagaagtggacatgatcagactgcagctcaaactgcaaggaagtgtcagcgtgaaggttaatgctgggccaatggcctatgcacgagcttttcttgaagaaaccaatgcaaagaagtaccctgacaaccaagtaaagcttttgaaggagatcttcaggcaatttgcagatgcatgtgggcaggcccttgacgtgaatgagcgcctcatcaaagaggaccagctggagtaccaggaagaactgaggtcccactacaaggacatgctcagcgaactctccacagtcatgaatgagcagattacgggcagggacgacctgtcaaagcgcggagtggaccaaacctgcactcgagtaattagcaaagcaactccggccctacccacggtctccatctcatctagtgctgaagtctgagggctctgcagcatcagacccacctctaagagaactttctgaatttgcagctaatctcggggaagagaaagataggtttaatttatttgaagttttcatggtgttaatatttttgtttacctcgctagcttcagaattttgccaacctctgaatttgcacattttgtataatttttttttctttgagcagtgttgatcaagccaggttgaatatttgccatgaaattccagtgaatgtgtagctcaaatgcaaaccctaagtttgctgtcagttattgtatggtcagtaccccagtcctagtacacatattttaaaggttaaagtgaatgtttttgtaacatttaagcatatttcagatgtaaataaaagattgtaaaatatacggtttttaccaaatttaaaagatcctttttagttaatactatgacagtactaaaaatatatgaataacatttcagataccattatattaaaatatttgtgtatgtgtacaaaagcgttgataaatactaatctttaaagtttgtggagttcctttatttgtaatatatgtgctcttaaaagcaatgggatgtgaaattatgaaagtattttattgttcatagaaataaaaaacacagttactttcgtgccgaattcggcacgaggagttttgttctttgtaaccctctcatcatcgaggctatatattaatagacatggtattaagcccacacgaaacattcagaattagaattggattaagaagacgcgttttggcatcacgctgactactcctcatctccgtcctcggggagggcgatgccagcgtgggactctttggaaggcctatcaatcacaggtgcgctaaaatcaaaaggtgggtcagtaggttagtgagggaggcgcgaaaggagatgccagcgggtgttaggaaggatatggtcagaagagctctttgtctccatccacggggccgtctgctcagcccgn

SEQ ID NO: 11626 - DNA, 572 bp, Homo sapiens
  misc_feature 1, 26, 457, 458, 459, 571, 572: n = A,T,C or G
naggagcaagatgtgtaaggcaaaanaatgagacatgagcacatgcctggggctgcccccaggggaggtcgctgaagctccaggactgcagttggttgtgcttcctcctgtacacctgtaatggctaccccgctggctcagagctctgcctcaccgccctgccccggcacctgcaagccagtgtgccacttttttgatgttgtatgtttttaatattccctgagacagactccagagttctgagttttcttacttggggtgtcaaattatattccaggaaccaatttgggttttcctggcttctggttaaaaagctggacagattttgagttgtttgctcttagttctctcataaactgcactatttttagggcactattttgtagaacacaagatttttcaggaagtatattgaaaggcctgtacctgcccgggcggccgcccgggcaggtacttnnnattttttttttttttttttttaaatggggtggtgctgtttatttttaaaatcacacattgaatacacacaacaatcagatttcttcaccaaacccccaattttttagtaacnn

SEQ ID NO: 11627 - DNA, 5049 bp, Homo sapiens
  misc_feature 1, 2, 3, 5049: n = A,T,C or G
nnnacgcctgcaggtgccggtatgaaaaattggtacgcttgcaggttccggtcttgtaagctggtacgcctgcgggggggggggaggaattcccgggtcgacccacgcgtccgggtgtttttcccgaggaaagatcaaaagccagtagaaaagatgatggagctcttcataagactaaaagagattctcaatcagatggcttctggcacacatccgctgctagacaaaatgagatccctgaagcaaatgcatctgcccagaagtgttccattaacacaggcaatgtacagaagcaaccgaatgaacacatcacaaggatcatttagcaccatctcccaagcattatgttctcaaggaattaccactgaatatttaactgccatgctgccctcttcccagaggccaaaaggcaaccacaccaaggattttttgacttataaattaactaaagagcaaattgcttcaaaatatggaattcccataaataccacaccattttgcttctccctttataaagacatcattaacatgcccgctggacctgtgatttgggctttcttgaaacctatgttgttgggaagaattttgtatgcaccatataacccagtcacaaaggcaataatggaaaagtccaatgtaactctgagacagctggcggaattaagagaaaaatctcaagagtggatggataagtcgccacttttcatgaattccttccatctgttaaaccaggcaattccaatgctccagaatactctaaggaacccttttgtgcaagtttttgtaaagttctccgtgggactcgatgctgttgaactattgaaacagatagatgaactcgatattctaagactgaaattagagaacaacattgacatcatcgatcagcttaacacactatcttccctgacagtaaatatttcctcttgtgtattatatgaccgtattcaggcagcaaaaaccatagatgaaatggagagagaggctaaaaggctctacaaaagcaacgaactctttggaagtgttatttttaagcttccttctaacagaagctggcacagaggctatgactctggaaatgtctttcttcctcctgtcataaaatataccatccggatgagtctcaagaccgcacagaccacaagaagcctaagaaccaagatttgggctccagggccacacaattctccgtcacacaaccagatctatggcagggcttttatttatttacaggatagtattgaaagagcaatcattgaattgcaaactggaaggaactcccaggaaatagcagtccaggttcaagcaattccttatccctgcttcatgaaagacaacttcctaaccagtgtctcttattctcttccaattgtgcttatggttgcctgggttgtatttatagctgcctttgtaaaaaagcttgtctatgagaaagacctccggcttcattagtacatgaagatgatgggtgtgaactcctgcagccatttctttgcctggcttatagagagtgttggatttttactggttaccatcgtgatcctcatcattatactcaagtttggcaatattcttcctaaaacaaatgggttcattttgttcctgtatttttcggactacagcttctcggttattgccatgagctatcttatcagtgtcttcttcaacaacaccaacattgcagctctgatcggaagcctcatctacatcattgccttctttccatttattgttctggttacagtggagaatgagttgagctatgtattgaaagtgttcatgagcctgctgtccccaacagcattcagctatgcaaaccaatacattgcacgatacgaagaacagggcattggtcttcagtgggaaaatatgtacacctccccggttcaggatgacaccacctcatttggctggctgtgctgtctaatcctagctgactctttcatttatttccttattgcttggtatgtcaggaatgtcttcccagggacatacggtatggcagctccctggtattttccaattcttccttcctattggaaggagcgatttgggtgtgcagaggtgaagcctgagaagagcaatggcctcatgtttactaacatcatgatgcagaataccaacccatctgccagtcctgaatacatgttttcctctaacatcgagcctgaacctaaagatctcacagtcggggttgccctgcatggggtcacaaagatctatggctcaaaagttgctgttgataacctcaatctgaacttttatgaagggcatattacttcattgctggggcccaatggagctgggaaaactactaccatttccatgttaactgggctgtttggggcctcagcaggcaccatttttgtatatggaaaagatatcaaaacagacctacacacggtacagaagaacatgggagtctgtatgcagcacgacgtcttgttcagttacctcactactaaggagcaccttctcctatatggttccatcaaagttcctcactggactaaaaagcagctccacgaggaagtaaaaaggactttaaaagatactggactatatagccatcgtcataagagagttggaacactgtcaggaggcatgaagaggaagttatctatatccatagctctcattggtggatcaagggtagtaattttggatgaaccatctactggagttgacccatgttctcgccgaagtatatgggatgttatatccaagaacaaaactgccagaacaatcattctgtcaacgcaccacttggacgaggctgaagtgctgagtgaccgcatcgccttcctggagcagggtgggcttaggtgctgtgggtccccattttacctcaaggaagcctttggcgatgggtatcccctcacgcttaccaagaagaagggtgcaaatttaaatgcaaatgcagtatgtgacaccatggccgtgacagcaatgatccaatcacatctccccgaagcctacctcaaggaggatattgggggagagcttgtttatgtacttcctccattcagcaccaaagtctcaggggcctacctgtcactcctacgggcactcgacaatggcatgggtgacctcaacatcgggtgctacggcatttcagataccaccgtggaggaggtctttctgaacttgaccaaagagtcacaaaaaaatagtgctatgagtcttgagcacttaacacaaaagaaaattgggaattccaatgccaatggcatctcaactcctgacgatttatctgtgagcagcagcaatttcacagacagagatgacaaaatcctgacaagaggagagaggctggatggctttggactgttgctgaagaagatcatggctatactcatcaagaggttccaccacacccgcaggaactggaaaggtctcattgctcaggttatcctccccatcgtctttgttaccactgccatgggccttggcacactgagaaattccagcaacagttatccagagattcagatctccccctctctttatggtacctccgaacagacagccttctatgctaattatcacccgagcacggaagcacttgtctcagcaatgtgggacttccctggaattgacaacatgtgtctgaacaccagtgatctacagtgtttaaacaaagacagtctggaaaaatggaacaccagtggagaacccatcactaattttggtgtttgctcctgctcagaaaatgtccaggaatgtcctaaatttaactattccccaccgcacagaagaacttactcatcccaggtaatttataacctcactgggcaacgagtggaaaattatcttatatcaactgcaaatgagtttgtccaaaaaagatatggaggttggagttttgggctgcctttgacaaaagaccttcgttttgatataacaggagtccctgccaatagaacacttgccaaggtatggtatgatccagaaggctatcactcccttccagcttacctcaacagcctgaataatttccttctgcgagttaacatgtcaaaatacgatgctgcccgacatggtaaagttactaacacaaaagtgtcctgtattgcaacttctgttactctttgtataaaaatgcactttatatcctgtttcttcacaggtggcagaatcagcagtttaatcgatattttagtggcactgtctatcttgatgggctactctgtcaccaccgccagctttgtcacctatgttgtaagggaacatcaaaccaaagccaaacagttgcagcacatttcaggcattggcgtgacatgctactgggtaacaaacttcatttatgacatggttttctacttggtgcctgtagcgttttcaattggtatcattgcgattttcaaattacctgcattctacagtgaaaacaacctaggcgctgtatctctcctacttctcctgtttgggtatgcaacattttcctggatgtacttgctggctgggctcttccatgaaacaggaatggccttcatcacttacgtctgtgtcaacttgttttttggcattaattccattgtttccctgtcagtggtatactttctttccaaggaaaagcctaatgatccgactttagaacttatttctgaaaccctcaagcgcattttcctgattttcccacaattctgttttggctacggtttgattgaactttctcaacaacagtcggtcctagacttcttaaaagcatatggagtggaatacccaaatgaaacctttgagatgaataaactaggtgcaatgtttgtggctttggtttctcagggcaccatgtttttttccttgcgactcttaatcaacgaatccctgataaagaaactcaggcttttcttcagaaaatttaattcttcacatgtaagggagacaatagatgaggatgaagatgtgcgggctgagagattaagagttgagagtggtgcagctgaatttgacttggtccaactttattgtctcacaaagacctaccaacttatccacaaaaagattatagctgtaaacaacatcagcattgggatacctgctggagan

SEQ ID NO: 11628 - DNA, 482 bp, Homo sapiens
  misc_feature 481, 482: n = A,T,C or G
acatttggctgatactgcaaaaatgacggtccctgggttaacgggaggcatgtctggctgctaggtcatccgagaggcagattggggcaggtttctaggaagtataggctcgccttgcggaggaccaggttggcacagtttgactgctgtgcactaaggcagggcacagagctgatgccctcaaggtcaattccagccacatttctctgtgattctatgactcaaaagcttggaaacaacctcaaaggattaaataaatgggggaacaaagtatttgctctcctctattaagccttggctgggagtctttcttccacactcctcacatgcaaaatgctgtttgtgggagcagattaacatttcaaaccacttcctgcaattagacgggaacacctggttttgcaataactctcattttctgtgtgtgctgaaaggtttttgaaattcccatgctcagtggattacccttatggcttgtcann

SEQ ID NO: 11629 - DNA, 985 bp, Homo sapiens
  misc_feature 978, 979, 980, 981, 982, 983, 984, 985: n = A,T,C or G
acgcgggtatgtctcgagaaaaaagccaatacagtctcttttgaggaccttgaaaactaacctgctagggatatcatactaggcctctgggtgccgctgtccgccaatccgtggctggagggaaacaaagcaatccactgacgcagcagtccccgcaggctttgagacacacattaggagaggactctgcccgctgtctgtctcacaatctgctcgaaatatcttggtcaggaatctcaggatgtctagtgaccccgagtgaggtgctgccttttattcctgagcatctttggaagcaggaagcagggagcaacggtagcgagaggtattcggatctgagtatcagcaggaagaagaaacagaggaagaagtcccccataaggaaggcgtgaggagcgcaggaagcgctgtttccctgcctgagatctttattctactaggtctttattctacgtagccgatacgctgtaaaattctggaagagaaggctaggggtttaaggttggtaatctctcagaagatctgcgtctcggtgacggaaagaactaagggtaagtgctgagaagcctctctttacagccagagaacgagccagagccgagcttgagaatgacgggatagatctagcagttatgcccaaggaagaccctcggcctttgaatttgaaggactgaaaatcgtataaatgtgttcatataaacggtatgcatcttttgatattaataacaaaatggttttagcacaaaatttgtggttgtggaaattttcggaacaccgtcttataagaggatgttactcttaagtctggagtaatgtaagaaaaactcagtcattgatctacaatgtatggtccggcgtttaaaccattctctattatcactaaatctcggtgacactttttgggatctgtgccacggtgtgtaaagggcacatgggtgggggacattatgccatggggccagggtttacggggggggnnnnnnnn

SEQ ID NO: 11630 - DNA, 461 bp, Homo sapiens
  misc_feature 299, 455, 456, 457, 458, 459, 460, 461: n = A,T,C or G
actcttaaaatacccccttaaaaaagctaaaacaccactttggcaaaaattaaggcatttaacaattcatgtcttagtgtatttcctgttatcatttgctcagatatcataagctgtgggcattcatcaatttcctacagctttgaatctaaggctacaaaagtcccactgctgttaaatcctggagcagctttttacacaattctacaatcctcttgtcttcaggttaccgagagcctatgaaagcctggaaaagcccccaagggagtgccactgaacaactcttcgccagagtggantttgctgaatatatacagccaatcgatagcatccacagagcagtcaaggaagtctttgaaacttgtctgaatttacacacaagatcagacacacaggctgtttgggcttaatgagaccttagagatcacctagtctggggttttcattcttcatannnnnnn

SEQ ID NO: 11631 - DNA, 487 bp, Homo sapiens
actttcttggcatcacatggtttggttctggcacagccaagcctagaacccaaccttcctactgcctgctgtgtttcttcaccacccagttgctccttggcaagtgaaccaattacaaaggctgtcttacttgtccaaggacagagagaaaggtgcatcctgggtgactggaaatgggagtgggagggagaggatggaggcagcagacattgaaagtaagtattgactagacttggtgacagaatggctcagctcggctcagtgaagaaaggagtccagaggccaaactttcaaccctggtgggatggctatacagttaagtaaagtaaaatcagtagaatggtgttggtttttttgcttcatgatgaatttaaagggactgccttatccagatagaaatatgttaaagatataggtaggagaggtagctaccattaaagatacagatttgagattaatgccacagaaggagagctgaaaccactgt

SEQ ID NO: 11632 - DNA, 708 bp, Homo sapiens
  misc_feature 704, 705, 706, 707, 708: n = A,T,C or G
agctccaccgcggtggcggccgaggtacgcggtgacattgtagtgggtgtgatggaacaggctctcagctgtgcattggggtgctttaaattctcatcaaggaactcatcttttggagtaagatactgtgtctccgggaggcctttgctggaaagaaaatacattcgctgtgaaagtgcataaagacaatgaatccctaactaacgttaataacagagtgggagcacgttctggccatgtgccaggcgatcataagcagcaattctgaacggcttcccgatatcaacatctaccagctgaaggtgctcgactgcgccatggatgcctgcatcaacctcggcctgttggaggaagccttgttctatggtactcggaccatggagccatacaggcttttgatattatgagagtgacacatggcagagaacacagcctgattgaagatttgattctacttgtagaagaatgcgacgccaacatcagagcatcctaagggaacgcagtcagagggaaatacggcgtgtgtctttgttgaatgccttattgaggtcacacactctatgctttgttagctgtgtgaacctctcctattggaaattctgttccgtgtttgtgtaggtaaataaaggcagacatggtttgcaaaccgacaagaatcattagttgtagagaagcacgattataataaattcaaaacatttggnnnnn

SEQ ID NO: 11633 - DNA, 1074 bp, Homo sapiens
  misc_feature 1072, 1073, 1074: n = A,T,C or G
acttactttgattcctctagtgcaagattatagtggggttatacctgagacttcaataaatgtttgactaactaaactaaaatagcttagggtaaggactacttccccaaacgcccttttaaacatgtgagaaagggaatctgcctgacatactggtatggccatttgtagcaatatactgagagtgacttgggtgattttctggggcgatcaaccacattccatgagcaggttaactgtggaagacacctgcccttgagcatcgcgtttgggccacatgcgtcaatggggaaatttgtgtttccattctgcttcttgttttgccttcacaacttcagggatagaagcgtattccatttttagttaataatcagctctctggggcttccatgtaatgagtcagaaactgatgactgactccactctgctcattatcatgtctcccaaaaacaacccgagaacccactgtgtcaagtgaagctttaatttttcaggggaggttttctccattgagaccaatacatcttttcttgtgacagatccagttaccatatttccttatttttaactgtcgaaaagacagttaagctgcaacagagtatggtgagtttaccaattttaatacttgaagcaccaaacaaaggatcagtgttgcaggctgtctcttcttgactttttccagctctccttagcagataaccaggatgatattttttctgctttacaacatgatgaatgctatatctctatattaactctggaaattggattgcagcaaatatctctcagctgcttagaattttctaaagaacctgagaccttctagtctccttagtcatgctatatttcagattttcggttccggtttcccttagatggttactttgttcaacttttctccggttaatttggtttctctggaaaaggggccctaggggcgcgggtcctggggaattcggggccgcaaccttgtgctcgcggtttaacccggaccggggggttttattcgggagggccctggtgagagagtcgggggacccggggggtgtttgtcgttcctgtgctgctcccnnn

SEQ ID NO: 11634 - DNA, 767 bp, Homo sapiens
  misc_feature 765, 766, 767: n = A,T,C or G
gcgtccggatgactgtggataggataaaggctatatgaattctgaatttagagtgtgagtgaaagttcaataacagctcagagctgctctggtttggacatggaccagcaaaaacaaactggggactacgtatccactacccgtcagctacctagacttgtttataaattcaggtactgagcacagcacagtatggctatcatagagggaaaattaaactgagtcacaaaatgcattttataataacacagtaatgcatttcatccctgggtataaattgaaaatgtacctattacagagtgttttaaaaattcactggaattattgttctagcataggtaagtttgaataaaaagagtaaaatgaaatcagtctagtcttaaaattgaacttttaaaacaagaaaaatcattacaactactaagattatttttaaaggtatcacttaatgacttaattacatcttgctatcattatctctattttgtatacaatccatttctgtattttaccataactgggaaaattaagaatatacgtgatctttaaccagatcaaaaaccttcatatcccatgctgattattcagctgcctctgaatcctgtatcttcacgctgctctcacgtgtgctgcctgataagtatatgtgaggttgtaagttattccttactcgcggttccgggtgctcttgtggattttgacctggagagtcttttcttagggcagggtctttcacatggtctacttctactttattagacccannn

SEQ ID NO: 11635 - DNA, 293 bp, Homo sapiens
  misc_feature 195, 205, 236, 245, 246, 247, 292, 293: n = A,T,C or G
acatgacagataaatacagttatttccggcaatcattagtctcaataagaaaatgattctcttttctaagatagtctaagaagtgggaggcttccaaactaagtgtcaggaccttaccaggtggtagggtgggccccatgatattatcaatcccctcagctccctctgcacatacgactgagggcatccagagtnccctggatgnagtcttggcccatgcctgccttgtaatatanttccaaatnnnttatcatttttaaaatcaaatttttccaaagacccaggggtctcnn

SEQ ID NO: 11636 - DNA, 351 bp, Homo sapiens
actcatctgtgagaagtggaataattcaaagattcacaatggctttcctcccccaaggtcatcagtgttaactgccaactagatccctagcccaccctctctgctcatccgagcagcagatgccaggtgggagttgcttttatgcacatgggatgtcactgtgactctgttcctgtcactctgtaacataagctcatttcatttttctctaggtatataggtatggatttaattattttagtcattacataatagtccacagtttagattggccacagctaaccattctgtatatcatggacattcaggctcttatagttttaagctgcttaattattcagactatgatgc

SEQ ID NO: 11637 - DNA, 344 bp, Homo sapiens
acaaaccattgcaggagctgaaacatcaacagctacccatactactgctaataattcaggctctcttggctctgagaacttcagcaaaaaagctgaaaaggctaacctataacatgtaaataggttctcatttatcatcttgataactccacttggctgattcaaatacatatggctacacaccataagctaaagaaacacctcctaagagcctgctagatgtcaggaaagcaataaagggcaagcagggaacccaaagttggccccagggtgtcacgagtcaggaaagtaatataaagaatatggcatgtagctgggtgcggtggctcacgcctataatccca

SEQ ID NO: 11638 - DNA, 352 bp, Homo sapiens
  misc_feature 352: n = A,T,C or G
acatgaaaatgcacaagactcttcccaccactgacctcagtgtctgccccaggaagaagaagaaaagttttggctcgaaaatgctcttcaaggacacaaggcggtcaccaaattacagcatgcagctttcaggggatgactaaaaggatgaggatgatgactcatagctggggacagaagcgaatccctcttgctgacctgtgccctcctttgcaccggtgttctttctcagccctcctggggtgaggatgtgactgtcccctgggaaagcttggcaagataagagtaggagcacaaagaaggaggtagatagagagtggtttgcagtcgatactcagtggtttgggtaggn

SEQ ID NO: 11639 - DNA, 346 bp, Homo sapiens
acgcgggggggtccccagtggaacatgcagttcttaggacagagcaggggatggggccagctgacctagtgaggaaatttaggctcctgcatcagtctttctgcataagtaaagaaaggacagttgtgctaattgacattggctatgaggtcatagccacagacaggattatgaaagatgcaaatatgcgaaacatggcacatgacctccctccctcaagctaggcccttgctttgtgtggttgggaaatgttgggagtagcagagagaggacctaggcaaatagatgggcatttccttgaagaaatcggttttccagtaacatctgggttgtgttgcagctggtt

SEQ ID NO: 11640 - DNA, 325 bp, Homo sapiens
acgcggggtgtgtgtgtgtgtgtgtgtgtgtgtgtgtgtatgtatgtgtatgtaaaacagagaaagatagtggtccagaggccaacacacctggaatctatttgtgagggtccctgcttcagtccacgaattgggccattcatttatttctcagtaagtgaacatctgggattcagtttgaaacgccaataagtttggatgggatcgcaaagctgtggttgggatgtggaactgctcgcctgaggtgggagtgagcgaggtgagcgggggctcttaaactatttctgcagacttcagttcaaatgcaatagccagagggttgaga

SEQ ID NO: 11641 - DNA, 343 bp, Homo sapiens
acgcgggatatggtttgagatattattgcttgtgtttacatttccacatttgaggcaaagttagactccaagttgaattcattaaattttgattccaacattctgttcttcctttgggcacagaattcctatgaaatgaaacactgggttttgttccagaacaagaacagactaacccaaaatttctcctgggggaaaaaaaaagagtaaaattacatttctcattgaaaattgtatttctcattgaggaagggtgtgttactttattatataaaatgccttatcttcattataagaaaaaaatgcccttgcatttgtcactgttgccatacattaggcctgt

SEQ ID NO: 11642 - DNA, 267 bp, Homo sapiens
ccgggcaggtacaagttacctaccctttccttgcctcagtttcctcctttgtgacaatggggacaataacagaaactgccacacaagagggatgttagagaactgaccaagcgaatgtaagtaatgacttggagcaacgtatggctaagagtaagttaggggttgttacgatgactttcctgagataaacagggagatcttttagctgtgggtcaagtgcaggaggacagtggagctcaaggcctaatggaaactaacactaattgt

SEQ ID NO: 11643 - DNA, 334 bp, Homo sapiens
acaatggaaactcaacggattacactattttctaaagggccactcataaaaatgaagttgggttatggttttttttttcccccttccattctaatttaggaagtggaaagtcacagcaagggcaggggcttacccacggtgacacagcttagcacagcgtcatcatttcatcctgtgcttcccatggattctatcctctcaaagattaactaagcattttgctatttgatctgggtagagggaaaaggtgcccaagacatgagaagataaaattcttgacaggaggaaccaaggttaaaacatgtaacaaggttcactcacttaaaaatatata

SEQ ID NO: 11644 - DNA, 259 bp, Homo sapiens
  misc_feature 1, 2, 3, 4, 5, 6, 7, 8, 9, 10, 11, 12: n = A,T,C or G
nnnnnnnnnnnnccgaggtacacagcctggcacgtagcaagtgttgaaatatctcttggagagagagaaaaaaaatgaatctattaaaatgtctctatgatgcactgcggaagctagacttggtagatcgagtttaagggaatgaagagggggtgaatgtttgctacttccgtatatttggagtatttgataaaacagaagaccagtttctcttcaaacttcatgtcggtttgtaggccaggctgccagggtttagggt

SEQ ID NO: 11645 - DNA, 304 bp, Homo sapiens
acacgagctaaaggaatccaattcactatcccagggttgcatcgcagtggatttcatacaggccaagaaaaaacaaaaacgtttttaagcctccatcctcagatcaaaacaataaacaaaaaattatgatatccttaacaatgtcctgggttaatattttattccataaatcaagttttcagaactctttaccctctaagagatacagattgaacatgcctttataggctctgaatttcataacttctaatctatgctcataacctggaaaatgtcatcatactgaatgcccacatgaaaaggt

SEQ ID NO: 11646 - DNA, 299 bp, Homo sapiens
acttggactgtgagacccctgaaggcacagacaatgcggccctggcacttggcactgctgtctagcacatcacagaccctcaatgaatactataggttgaattaaatgtaggacctaagggagtaaaaagaacagcgtcctccagcatttatgcagctggaggccaggaatcttccctctggctttgcactacagtaaagatatttacttatttttttaacaaagttttattttaggctcaggagaatacatgtgcatgtttcttctataggtaaactcgtgtcatggcggtttgttgt

SEQ ID NO: 11647 - DNA, 584 bp, Homo sapiens
  misc_feature 583, 584: n = A,T,C or G
acgcggggaggttgtggcggcggcgccctgctcttccccgctcgtctggggcttctgctggctagtggggagaagtgctcttctaggggggcttttctggcccttggcaggggtttggagttggagtcacacgggccaataactcatcaccccaacacttctgaggtggctccttgtgccacggactccgaggagtccttcagctactgaacactcaaagctgaggagggcaatttggttctgatgctgtgccagaaatcttctgacaatgagttactggaacttggaaaaaaggaactgtgtgcagtaccgcaggcattttctggtggacaacagtgtgtttcatgttgaaagatgcatgagtgtgatgcagtccgggacacagatgatcaagctgaaacgtggaaccaaagggcttgtccgcctcttttacctggatgagcaccggacacgcctccgatggcgaccctctaggaagagcgagaaggcaaaaatacttattgattccatttacaaagtgactgatggccggcagtctgaaatatccacagacaagctgaggggaacctcgaccccagctgcnn

SEQ ID NO: 11648 - DNA, 391 bp, Homo sapiens
actttagctactcgaacagcatgcagacagggtaagaatcacagaacctggccgaatacacagctcattcagcatcaaccacaaggtggcgctgcttcaatgctgattcagatgcacagccctgctagagacgtttctccaccatcaaggctacatttgcttgtgtcctttccaggccggccaaaaatgctttctccttaaggtttcaggtaatacacatatggctaacagtctatattgagaaagtaaaccactgaggcacagcaactccctacccccatcttaggacagactctgactgcacctgagaggacttatctcagcctcccttagttaacaaggcaacaaagtggggcagaaaggcttgcatactcctgaatcacacccaagt

SEQ ID NO: 11649 - DNA, 1330 bp, Homo sapiens
  misc_feature 1319, 1320, 1321, 1322, 1323, 1324, 1325, 1326, 1327, 1328,1329, 1330: n = A,T,C or G
tcggctcccagctactcacagagaacgtttctgtttctgacagcagagtaagagaagaggtgagaagagagacagcccattctcttttggcctaattcctaaggaatcatgcctctgccttcgggccattctcaagtcttgttcaaggataaaatgatttattgatggccgtaattaaaaagcaatgccaacggaagcagcgtcagcatttttcatttatacctcggccgcccggaagcgagaccttagaaggcagggcttcccgcgaaggaccggaaaggagcgcctactaaggacgccgtcgaggtccggggcgcctcaactctatagctctaactggctagaagtgcccaacgtggaatgtttcttttttaaaggcggctcttgaagcgacccggaagcggaagtggaagaaagttctagtggcttgagattaagcctgatcaagatgacaacctcccaaaagcaccgagacttcgtggcagagcccatgggggagaagccagtggggagcctggctgggattggtgaagtcctgggcaagaagctggaggaaaggggttttgacaaggcctatgttgtccttggccagtttctggtgctaaagaaagatgaagacctcttccgggaatggctgaaagacacttgtggcgccaacgccaagcagtcccgggactgcttcggatgccttcgagagtggtgcgacgccttcttgtgatgctctctgggaagctctcaatccccagccctcatccagagtttgcagccgagtagggactcctcccctgtcctctacgaaggaacaagatagctatggtcgtactcacctccgacgtactccggggatctaaagggagttttctcccctaaccatttcaactttttttggattctcgctcttgcatgcctcccccgtcctttttcccttgccagttccctggtgacagttaccagctttcctgaatggattcccggcccatccctcaccccaccctcatttcaatccgttgaaccatttggtcctttttggagaaagtaatgcctagaagttagacatcaacacccagggacttcacaaaacaagagaaacaacacacaacaagggagacagcaaaacaacccaagagcccaaaaacacccaaaatatgcaagaagaggcaaaagaagcaataacaccacaggcccggaaaaaccaggaagaaaagaaaagaaagaacaaaacacggcgggaaaggacgaacacaataacgccgaacacaagatgtacacgtggagagtacgaacaagcaaaagagagagaggaggaatacacgaaacannnnnnnnnnnn

SEQ ID NO: 11650 - DNA, 1156 bp, Homo sapiens
  misc_feature 1, 2, 3, 1156: n = A,T,C or G
nnngatgtcctgcatgagattctcactggtattcccagcgtgacagcgaatatgtactatgttcaccctggaaacagccacttaggacactggtgagctactccttagggggttgtggaaatagagcccaatctggccttgactccatcgtagagcacaatttactgagcaaattctaataaatgtaaattgaaatttacatatgatgctgttcttttcagaaccaagattcgttcgcttactgcttatcaactcttcctcctgtttaggtctagttctctcctgtgcaagattgcgacagaagctgagaggagccttctggtgtttgatcgatacactcccttgaccacaatttattcactgtagtcacaatggatagtcttatgaaatcttaaatagctgctttgaaagtccacaggggtgtagacagggctcttcactctacctcacatgatagaagtttataagataagtaattaaaatccagagttcaaattattcttgctcctcttaggaagttcagcttgctaatttaatacttaatgatgttttaagggctatgggaagataatgagtgaaattcatatcaagccattagcgggtttttttgtcttttatttattttattttatttttttaaagaaagcactgaacgcccctgcaggaactagtgctaacctaccgagtctggtgcctgtgcagggggcaggcagaaagggtccatacttgcgattttgctcatttttctcctgtagctctgaacagtgcaggacaccagggcagggatcagtgcctcccatctctcttgcaatgtagaggcggtgactccactgtgagtgcatgaatcccttcctgcagtgctccatcacaagtggtctcattgtctcccttctttccactctagctagacaaggacaggtttgtggggccaaatggggtatgctgtgctagccaggggtccctgcattgacagatgcaaacatctgtaaaacaagtcctgttcttacgtggatgggcagagttccatgggggaaaattcttgcctcaaaatggccagacacccattcctggaggctttccaaacttgtttttatttttattttttttttttttgaggtagagtctcactatgttgcccagactagccttgaactcn

SEQ ID NO: 11651 - DNA, 345 bp, Homo sapiens
  misc_feature 345: n = A,T,C or G
acgtgacggaagggaggctcacagggatggtgtctgcgacccactcagctctgccatttaccatcacctgactttaagccagtgtctattttgtagggctgctgtggggaccaatatgagctgagagctctgccaggcaccctacatgatatacctgtaagggagcgtccttctgcggcctgaacctgaagctcttcagagggacccatgctgggctctgaagaaagtgactcaccttggaggagcaagggcaggtcacattccatgatgagaaattctcacaccaccctccttcatatttgactcacatcatgcagcatggacttccactccagtaaatgagtn

SEQ ID NO: 11652 - DNA, 251 bp, Homo sapiens
  misc_feature 248, 249, 250, 251: n = A,T,C or G
acagacattcaggttaaatgctggccagtggtggggggcgggggttgtcattatttcccattactaaggaacaacaaataccacatctatttatttatatatttagtgcattgagtaaagataagagagacctgcaaaagaaaaaatatctagtgtgtatcaatgactgaatttgtgtctacatttgggataggaaaagtgataagacatttttaatattcccagcacaaatttccttcctgtgtggnnnn

SEQ ID NO: 11653 - DNA, 344 bp, Homo sapiens
actaggattgcaggcatgagccactacactcgcccagaaatttgtttttagagtaactaccatgccattaacaaacctgacaaaattaacaatttcttatcttcaagaactcaattcatattcaaatttttatcatctcaaagctggtttgttcaaacaggagtccaaagtccccatactgcatgtcattactgagaccatactgggactaaggcagggaggaatgagccctaagtgagtctgtaacaagcgagaaagaagctcattcaactaaaagaattaaattggaggtctggcccaagaaagtggaaaaataaacaaagaaaactaaaactattcaggaa

SEQ ID NO: 11654 - DNA, 514 bp, Homo sapiens
acgcgggcgtttttgttttttttttaacttagtttctttgcttattcaagggaagaaaatcaggtttagttggtgtctatatgaatgatagaccaattaaatgcttttactttccagttgctggaagacctgggtcaaattggtatataaggacatggatttcttatgtaacaataaatagaaaattaggacagacctcaggctgaacagcagtatcattcaggacttaagtatttttctcctgttatcattcatagcattaacttcatcccaaggatggtgccccctctagttgttataagatgcctgctgacacagttatggcatattcttcctggttcaggttcagtggaagaacacttctcctgagacagaggataatttatctttccttcagatgattggctgacacaggctgcatgattagtgcaggtccagtagcaattgccaagggcgtcctttgggcagatgagattaagcgaggtcactaaattaatcatcaagaaggggtggt

SEQ ID NO: 11655 - DNA, 348 bp, Homo sapiens
acagttccatctttggccataaggagacaatggtgtcaagaggctaaggccatatgatctgtaggtgaaaaacctgggatgagaatcaaggcctcaaactttttccactacatcacagatttaggagcagttagagggaaggcttcaatctggagaacactaacaggctctagagattattgggtcatggtggctgggacagaaataaggattcacagaaagatgtttgttgtcaatgttcttttacagtaaatgttcttttgagattttgcttgataaaaaggttgagcagaagtgaaaaaaatttttttctttttttctttctttttcttttctttttgctttttt

SEQ ID NO: 11656 - DNA, 558 bp, Homo sapiens
  misc_feature 557, 558: n = A,T,C or G
accattctccaggcacatacaacatgaaatatcatacagctgtgaaagatctggtggaaagctggaatattgaggaagaaacattttttgaaaattatttctctctctaagtccagtaaatgtttgatactaattctgagtgcatggctgtagtctgaaagtttatccgtgcccctaaaattaatatgtcaaaatcctaacacccatggtgatgatatcaggaggtagggcctttgggaaagtaattaggtcattaaattaataaggaaatcgtatccttttttttttttgagacgtagtctcgctctgttgtccaggctggagtgcagtggcacaatcttggctcactgcaacctccgcctcctaggttcaagcgattctgctgtctcaggctcctgagtagttgggattacaggagcctgccaccacgcccagctaagttttgtatttttagtagagactgggtttcaccatgttggccagcctggtcttgaactccagacttcaagtgatccacccgcctcaggcttccaaagtgctggcattacaggcgtgann

SEQ ID NO: 11657 - DNA, 369 bp, Homo sapiens
  misc_feature 1, 2, 3, 4: n = A,T,C or G
nnnnccgcctactactactaaattcgcggccgcgtcgactttttttttttttaactacaacaggcagttttcctctgttgtacgctgggaagatgctgccaagcagcaggatcaccagcttagctgtgtgtggtgaagttatgcaaatacctccccctgtcaactgtggcagcaaagtccccggaaggacttggactgtcctggtttgatatatgctcattcccccatcaagcactgtggccgggaatcaggaactgtgactggtctgacctgggtcatgtgcccacctctggctggtaggaatggttttgattttgtgatcaatcctgaagaggaagacaggtgcatggcaaaggaaaatgggatagt

SEQ ID NO: 11658 - DNA, 533 bp, Homo sapiens
  misc_feature 533: n = A,T,C or G
gtccggcaaacaataatatattgtttcaactagctagaaggcggatagtgtatgttcccaacacaaataaatgataaatgtttgaaatgatggatgtgctaattatcttgatcagagcactatgattatatgtattgaaacatcactatgtacctcatgaatatgtacatttttttcaatttaaaaaataaaattttaagaataaaaaatttttaaattttaaacatttttttaaataaaaaagaaaagcagataatttgtctaccaagcctagatggatgtatactcataaacaggtaatactgtagtgtgccatagggtgataagcgccatggaggggattaatttcatgcagagcgggcctgcaggaagtaaaggagcgagccgtgaaactgctctggataacgagttctcaggtagagggaatagcaagtgcaaagtctctgagcgaattgcagggaggctctagcaggaccagagtaaactaggtgggagtgatgggagatgagttctgagaggtagcaggaacaccn

SEQ ID NO: 11659 - DNA, 338 bp, Homo sapiens
actccctatgtctcttgtccttcttggacaggggagtcatttttatcataagatgacagaggtgcaagaagctaagaagaaaatgaaggacatttttaggttaggctctgtatggccacactgttacctccaccctcatgtgcttgaccagcgcagttcctgtggctgagcccaaagccaaagggtggcgattacactggcttccagggaaagacttcaaagccatataacataagggtgcagtattgggccaataattcagcctgccatacttctcaacccatatagtttggtatgatctgaatctcccacgatctccatatacttcacattaatga

SEQ ID NO: 11660 - DNA, 1135 bp, Homo sapiens
  misc_feature 1, 1126, 1127, 1128, 1129, 1130, 1131, 1132, 1133, 1134,1135: n = A,T,C or G
ncgtccgggagttctggtctcagggggggtggggactgggcacatcatcaatacgatagagaacgtcacttttcaccatgaagggttcttctggaggtgtgggtttaatgggattgtggaagagaatgactccaatatttggaagttctggtacaccaatcagccaccgtccaagaactgcacacatgcttacctgtctccgtaccccttcatgagaggcgagcacaactcgacctcctatgactctgcagttatttaccgtggtttctgggcagtcctgatgctcctgggggtagttgctgtagtcatcgcaagctttttgatcatctgtgcagcccccttcgccagccattttctctacaaagctgggggaggctcatatattgctgcaggcatcctattttcattggtggtgatgctgtatgtcatctgggtccaggcagtggctgacatggaaagctaccgaaacatgaaaatgaaggactgcctggatttcaccccttctgttctgtatggctggtcatttttcctggccccagctgggatatttttttctttgctagctggattacctatttctggttgttggacggcatatcagatacatccactaaatcaactgttgccacaagtatttcttgagagattttaaaacaaggaatactttttttccattttggtttcattgatcccagcataaaagttagtagatataactttctagttgctattcaaattactcattttactaaaattttcttcagtcaagaaggtcctagaaatctctccagacaccagcaaagctctatctgtctaagtgctgtcaggacctaatccttaagggaataggttaaccaggtctcctttcattgaacatgttggcagtcatgcaggtcgaaaggcctgataataggttattacatgacatgggaaatctcgaatagtggttaagtcctggatcaattctgtattaagaaatcttgagatataactggcagtgcgcaattttggtttgcccggtaatccttcactcgctgtgagttaaaacagttccaggggcggctccgatggcacacgagcgcttgtgcacggcgccctgggtcccaccaacactgcgatcgatgcnnnnnnnnnn

SEQ ID NO: 11661 - DNA, 745 bp, Homo sapiens
  misc_feature 745: n = A,T,C or G
tttcagtagagacggggtttctccatgttggtcaggctggtctcgaactccccacctcaggtaatccacccgcctcggcctcccaaagtgctgggaatacaggcatgagccaccaggcccggcagcatcccctttcttattgataaagcagatcttggagaatgggagatcctgagcggggttcctaatgctagccttcaacatcaggctgaggctcaccttgtcttcaagtaatgggcagtgctggcctgaaggggagcctcctctgtccagggctcagcttatccttggaaggcttagcacattgaggagctgctccaggctaagagggagggactggggtactctgtagaggttgttcttccagtttcttcaatcagatgagccacactgtcactctagtgttgaaaggagggaagggacagaggtggccaggagtgtgaccctaaaagaggcagaggagacctcagagaaagagaagaagcattctcctaaccagagggagaaggagagaggcctcagttctccctctctgggaattaatttgagatttacatttagtgtctataaacatgtcagcagatatataaacttatttgcttttgctttgtttccatttttagattcttgagtatccagaacaccaccttctttggtggaacctgtatatccatgattgattacctcctctggccctggtttgagcggctggatgagtatgggatactggagtaagacatttgan

SEQ ID NO: 11662 - DNA, 327 bp, Homo sapiens
actgtccatccctgagccggcccacaagtgtcttctgttttctttaccctctccttagcaccagctgcctaacaaagtcagcgggcagccagggcaaagaacagtttgggcgacttcaatatgactctctcttctgagcccccgatccaaaagaaggctcacccttagtgaatgtgcctttgccagagggtcttccctagggtgaaggggaaaatcatgtttcacaatttcagggaagtctgaatggtaggagccaggttttcacattctggtctttaatgcatagtggccattcattccattaggcttcttatgtcatgacataat

SEQ ID NO: 11663 - DNA, 322 bp, Homo sapiens
acttcctgcaatggtggaaatgttctctgtctacactgtcctatatcgtagccactcgccacatgtggctatggagctcttgaagtgcggacagatggactgagaaactgaaatttaaatcttacataattttaatcatgagatagtggctacttgacaagatgctggagaacaggctttggaaccaacatgattcactgacatgaagctcccacatcttggcctatggacacaatgaacaatgcatctactagctgtttagggcagcctgtgaacagagcacacagctattgcaaacaaacagacccgggttcagagtcag

SEQ ID NO: 11664 - DNA, 366 bp, Homo sapiens
  misc_feature 366: n = A,T,C or G
acttgattcaaagcctgggtctcccagaagtgagctgtgtggcttgggccactttatctcctgaggtctcagagttttcatgtataaaattgtagaacttgtcttgatggttttgaacattctttctaattctgcacaacagtccatttgtgggttagatgagcctttaccaaactgtatttcatggaacaatggtcccaagagctgttctgtgaaaagtaagtttcatcatcaaataattttgagaaattctgaatcctatatgcgtgttgattcctatttctttccttccattctttcttgagtccactctgattggtccttaaagttggagtttatttttatcattattgttattgtcatggn

SEQ ID NO: 11665 - DNA, 346 bp, Homo sapiens
actcaaactatagccccaggggaagacaaacggtcacagatgaggcaggaagagtgcctgggagaatttccccattcaccatggagccaagtgaaagacctcaccatcagctgctgcacagaaatgacacagccacccacacaagtgggagatcgaggaggaggcacggccagtttgtttggaatggacaggtgtgttaggtaggagtccagccttcacaccctgtgtttcctttcttttgctttggaccttctttcctaactaaaaagagagccagtgaaggttcttgagaaggggatggcaaagagccatgagattttatctttgtaaacctcgaagtgtgggt

SEQ ID NO: 11666 - DNA, 505 bp, Homo sapiens
acttccatcaagtcgagggagtaacgcaaactagaatagtagccatctattaaggatagttctgaggtttggaatttgtaactgatttttaggagctacgacatgaatatcatatcaggtagaaatactcagagtgatcaccttttatgaaagttagttctatctttcatgtctaggaaaatataacagtgaatgtttgctttttgtatgttttgtctccaagcagaggaaactgacagttttatgttttaagtgccgaaagttgtttttggctaggcagttccagagttaatcactgggatgttaacttgaatttttgtctttaaaatgttttagatttttaaaacgaaatatgcttccgttatttccaaactgacaccttgtgttctggattagtttttagagaaatgttttccaaattctcttggattacttgaagtccattgattttgaaatatttagtttagtttttttcttttaaagcttatcagaaagtagaggaagt

SEQ ID NO: 11667 - DNA, 859 bp, Homo sapiens
  misc_feature 1, 2: n = A,T,C or G
nnagctcggtaccctaaccctatcgcattgatatttgttaaatattaatgacatgttaaaatgatattttggatatattgacgtgaaataaatgattagaatttattccacctgcctctttttgctttcgaaggtggctgctagaacattttagattgtaagtgcggcctgcatgatatctccctctatgggacagcactggtctcaattgtagggtcactgaggacatggtgcttccctcctggtggctttcggatagttggtgttcattgaatgtcttttgagtggacaaatgagtgaatgaggttgacgcataacacgtggtttccacttacctactatgggacctagacaggctgtttcacttctcttatatctgtaatataagcagagtaactggagcccttttgttcacctgcagttggatctcagtgatttggggaaggatcttgggcctccacttgcagtgactatagtcactatagcttcatcagcaggggcgggaaatgatgctgcctccagcttgagagtgatgaggccagcacctcctgggagccctcgataattttatcttcttttgcaatccttccccaaatctcttggttccactcaaaactaggaacagtcctgcccactgtggcaagctgtggtgcccacctctcttacagctgtccccacaggactactataattattcacttttatcccattgcctgtaatgcatgactcaactctagaaataccagattaaacattttcttttacatttaaaacactggctgtattcaaatactacccatctggttttttttaaatcagattagaagtaaatgtcttattcttccaactaaattctagt

SEQ ID NO: 11668 - DNA, 402 bp, Homo sapiens
  misc_feature 394, 395, 396, 397, 398, 399, 400, 401, 402: n = A,T,C or G
gcggccgcccgggcaggtacgcgggtgtccttgagttttgagctcatggttaaagctgagaattaagcactgcccttacaactgctaggtaagctcagtaaggtgttgcaaggtggtgcaaagggccctgggaggagggtcccagttgcccaccctttgtccactgctttgtgatgaattctagatcaccttgtggttacctgcctattaggaggtgctgttgaaaagcgactttaaaaaaataggactttgggagagtggggcagatcaaatgaagggaccagcagtgttcataatggtgctgaaatttaatttcagtgctgaccttttatttgacattttagataatgctatggatgtgctcagctatttgttcttaacatattttccatcnnnnnnnnn

SEQ ID NO: 11669 - DNA, 566 bp, Homo sapiens
  misc_feature 1, 566: n = A,T,C or G
ngtaaaatgtagataataacagttcctactacatacacaggacctttggaaaaggtgctgcagatggtacttaaccatgggttgccatgcttttatagcacatgacttcactactctgagcacagctaagagaattaaaaatcagcaactgatgcaaaggtaaggtagacattttcaaaatagccagaagctgatgatgtgacctggcagctctgcccaaaggggcatactacatgaagttgtcactaggcaaaaccaatcaggtcctctcttaggaaggctgaatacagagtcaacagacacgtaagttttgcataagacaggaaaaacacaaaataaaagcagtaagctaagaggctgagaagagatgagataggcaggtcctccgcagtggaagaggggggctgagccattggcgcgtgaccaggctccttgagccactctgcatttccactgttgttccacctgtcacgagtgatgcctgccggtgcactgtgacccaagtttccagctttgtacagccttggctgggcagttgctgtgacaatgtcatgttcttcctcacn

SEQ ID NO: 11670 - DNA, 559 bp, Homo sapiens
  misc_feature 1, 559: n = A,T,C or G
ncatatagagtcatggtaggtccaccatggttgtattagtgaaaagaaccatttacttagcacttattgggagtttatggacagacaggtgcctctcataaactttgttcattcagccacttgaaataagccacgtgggttatgtgccacgcaaaatttcagtaatgggttttgggagtgtttagatagcaacaacttcatagactgaaccttttggttttttttctttctctccaactcagaggttaaaaattaacctgaaaaatcaatgctgcaatatgaatgcgctgtatgtttcttgcatggacttgcagacactctgtaacggtgtttccagtctccagcagttcatattggaaggtgagctttcacatggacaagccctttgcgttgccaagtagtagtgatattacaagtttgaaagacatttagatgataattccaaaggccctcttatctccaaatccatcagaagctacctataatttcagtgcaatgagtgctgggcataggtggccattcagtgagtgagtatccccgcgttaattaattctagaan

SEQ ID NO: 11671 - DNA, 700 bp, Homo sapiens
  misc_feature 698, 699, 700: n = A,T,C or G
acacaagtagaactgttaaaaccgtgtggcttccaactgctctaataactttaagattcacagtcttcaactttcttacagtggaagccatgggggcattgtcctgttgccttctctctcattcctcattaatgagaaagatgttaagctcactgacgtaagtcccagtgaagtcttctccagaactcagaagggccataaatagagagacaaagggcaggaggtgggagttattcaccagcgtggaggaagcaggataagcccagaggaatggcctctggaattatacaaagaatttggaggcgactgggggtggccctgggaacaaagtgaaactgtcagaactcagataacagtccacgttcctgagattggattgtagcagcccttctggaaaaggagcacttctcgggactttatacaaatccagccccgtccaaaatagctgcaaaaaaaaaaaaaccacaaacattatttggtcctttttaatggctaagtcatattccagggtgtagagataccacattttatttatccactcacgggtggaggggtgggttccacatcttggcaatggtgactggtacggccatcaagtgtctttcgggtataacgacttcttttccttggggtagatacccaggagtgggattgctagatcaaatggttcttaacattttctctctggatctattgcnnn

SEQ ID NO: 11672 - DNA, 662 bp, Homo sapiens
  misc_feature 1, 2, 3, 4, 5, 6, 7, 8, 9, 10, 11, 12, 27, 661, 662: n = A,T,C or G
nnnnnnnnnnnncgaaagtcttctagnattaattaacgcgggcccagtgtgcccagatgcctccacctcattgacggggatgcctgcgggagagaaggagggagagtgccattgtaccaacttgcttgggtaaatgaacctcaggaaaatgagttctagattagtaatagcaatgaggatgtcaataaaattctacctgacctcccattaaccctgggaactgttaacttcagtgttagctagggatttcttagacatgcatgggcttaaagttgtttcaagaaattcacttgcttagaattcagtgagtttttttgggaagctggtacaatctgaacaaccctttttattgcttactttgcgttttaagggtctcagttaatgaagtatctcctagcacaggggatgagaagaggggaaagaaggcagggcatcaccaatccactattcccttttactaatcctcacaggaaaagaccatcctacaacatcctccaagtccagctggctatctgttctgcctcatttcttctatgttttattccaccaacacgaacaggcttagttttccccagccctgaacagagctctgtcctccttaggagacacctcatttgcagtttgtttccaagcttcaactcattccaatgttcttagacann

SEQ ID NO: 11673 - DNA, 332 bp, Homo sapiens
acgcgggtgagaaaaggctctaacatgagttgatcttgagcccaatgttgaacagctccagaccttacaatttaaaaaagtagttcagaccgggtgtcttgagttccgcagtatacctggtccagtggacacttgcagaatgccgttggcacatgccactggccattgaggggtccccagatgcataaacagcctgatcctgtagctccccttccccacacggatgcatggaggcaggtggcgaactctaaagcctcactgaaaggcagattgctggactgttagaaggggctcactcacctgcctccaagcgcttgtcttctgtttacata

SEQ ID NO: 11674 - DNA, 342 bp, Homo sapiens
acgtttcctcacagatatatcaactattgtgcatatctctagttctgattctagttaatcaatatcagcagaaagcttatcatttcatgtctaagtgtctgtgtgggcatgaaattgttaggaattgttttagtgaataactgattcaaaaattcattgcttaaaaacaagattttttttttacagaagcattcagaactccaaagagattataactcacagagaattattttaaaaagcagataatatcttattccttttttccacacatctccacataccaacttaaatcttcaccagtaaagaggaatccaggggaaatcataagagaagcatctttac

SEQ ID NO: 11675 - DNA, 329 bp, Homo sapiens
actagaaaaactcagaagctggaacgtgggaatacatcttcatttcacagatgaggaggacctgtctcaggaaaagaggtgactcacccaaggttatagctggttagtggcagaaccaggaccagaagcaaggcctgcagcctcttgtgtaggctttcctagtgcgtgctgctgaccctcaaagctgtccttggccaactcaccacctgtgtgacacttacccccaggcagctgtagggaggaacacagatgttcggggaaggcacttgtgttactgtataagcacaaaggaagctgggatctgagtatggtggcccttgtcggtctct

SEQ ID NO: 11676 - DNA, 349 bp, Homo sapiens
actacagtcactaaagctcagtttcttaaatccatattttaatgggactctgctggacattgaataccaccagtccacttgtcaggatgtctgttctcatgtgcagtgtgatgaagcctctttcatgatgtattgactttactggactgaaatattttgaagagtgtcagccctttgacaagatccatctgaccatttctgttcacaaatgatttctccacacgattccactcaaagcacactcatttatataacacaaagtaactttcccaaataatcatcactttcaaaaaaagatcgtgaaaatactgataaaaagaattctcccggccaggcacggtggctcacg

SEQ ID NO: 11677 - DNA, 418 bp, Homo sapiens
  misc_feature 1, 2, 417, 418: n = A,T,C or G
nngaggacattgaagcagggtaggcagtactgtcagcctcactggcatagaaagaaggtggaggaaatgggtgctgctttcatttctgaggtataagtggtgatgtagataactgctataggaaatgcccacgcatagaacaaatggtaaagaagttccaggtagtcagctggtttcaacaatgaataaagcaggacaccctgcttagaggttgaaatcaaaatgaagagctttggaaagagatacctgctctacagtgtggtgagtgctggaatggaggagaaagcaagaggaatagcaatagagtcaagtcttgaaggatgacggcacataaggagaaagtgttccccacactaaggaagagaaagtggaagcacagagttgaaagggtgtggcacatccacgaaggggatggann

SEQ ID NO: 11678 - DNA, 758 bp, Homo sapiens
  misc_feature 740, 741, 742, 743, 744, 745, 746, 747, 748, 749, 750, 751,752, 753, 754, 755, 756, 757, 758: n = A,T,C or G
catggagctacattttattggagagagagataaactagataaataaaatatatagtatgctaaagaaaaaataaagtagggaagggaaataaaaagaaatacaggggtaggaaagaggctgaaaatctagacaagacagtcagagaaggctcactgagaatatgagtaaaagctgaagaaagtgagagtgagccacttgcatcaggaaagaacagtttaggcacagggaagagcaaattcacagaccatgctatttgaggaccaacatggaggccagtgaggctggagtggtgagagaagctcacaggagacaaccttggagaggctccgggggacacattaggaaggccctgaaggtcccagtaaagactggctcttattctgagtgagacaggagccactcgggccgagtggtacaatctgacttatgtttagtaagatcctgggccactgggtgccctgtagagaagagactgaactggtctaagagcagaaactgtgagagcagttagggcactactaaaatatgccaggtgaggcatggtgattgcctagactggtgtgcaagctgtggatgcagaaaaaagtagctggattgtcgatggattctgaaggtggagtcaagaatttggtcatggacacgggtgtgaaagaaggaacccaaagattctggcctgagccaactagaagactggagatgccatcatttgagatacaacaaggctgtgggaagaagagannnnnnnnnnnnnnnnnnn

SEQ ID NO: 11679 - DNA, 363 bp, Homo sapiens
  misc_feature 363: n = A,T,C or G
actctcagttcacttccatgtgggagggtcatttgccatccatccagattacctttttgattaggcttttcagtgtctataaatatttcggtcttttctgatcatttaatttctaatacatgcatatgctcctatgtataataaatagacaacttcaaatttgcagtttctagatggttggaaaagggaaacattgtggtgtgtaatttatcagccatcagatcctagatatttgagattttaactaagcaaggtattagatagaccatgttgttttggcttcacagaattcattcatattgtgcattacacaatcagtgtgcatattgcacattgattttatctgtaagttgtctttatcan

SEQ ID NO: 11680 - DNA, 294 bp, Homo sapiens
acgtgggctttacgtaaagaatttgtgccattttttcaagccagatatagcttctgtatcaacaaatggaacacaaatctttagtctaggacttagggttggggaaaaagggaaaaaacaactataacacttaaatgaaatctttgtatcttaggtttgttgaccagagtattatatatatatctaatgctactaaaattatgatgttatcgaatattcaagttaattcaataagtggtggttatctgtagtaatcatagagaaaggaactattactatgagggacctgcgggt

SEQ ID NO: 11681 - DNA, 260 bp, Homo sapiens
acatttcacggaggtgggaccaaaagaggaaagaacaaaatcccctaagtgccagcatgttgggaatgcatcattgcaataagattgtgaaactaatgctggcaggcaaacaacaaaaaacaacaactgccacaaactgcaatatgcttatcagggtctgaaccaagaagaaaggcccccgatcttccacagaggacactggcaccagtcccaggtcctgcaactcttgaatagctccatgtgccgtgttctcttcaggt

SEQ ID NO: 11682 - DNA, 413 bp, Homo sapiens
  misc_feature 1, 2, 411, 412, 413: n = A,T,C or G
nnagctccttcgcggtgacaggccgcccgggcaggtacctaattttactcttaagcatttgcgccttgtattttaggttggtttcatttcatttcaacgggagagagtcctgcttcacacctgttgcagtgtgtccttccagtgaacacccaagcctgggctacaagagcgagagtccatctcaaaaaaaaaaaggaaaaaaaaataaagaaaaaaagaggcaaagcatccactgatcctacattcgtgtttttatcacattaccttgtctcatcttcaacttcggtctctccacattgaagggaaggtgacatgatgtcttcttagtcattcaaatccaataacttttaatctgaaggttaagtagtgagatataaactaagagatgataatatcaattttatgttcacnnn

SEQ ID NO: 11683 - DNA, 232 bp, Homo sapiens
  misc_feature 232: n = A,T,C or G
acttaacaaccccatgaggaaattaaggcagggtggttcagtaatttgtcaagggaaacaaggaagtagagcaggcagcagaggcgttctggctctgaactactctgttctgtagaaatcagtgcaaaagtccaagcttcagcatacttgtttcatcttgtgatcacaggtagttttttttgtttttttttgttgttgtagttgatgttcattagtgtgttatgagatggan

SEQ ID NO: 11684 - DNA, 147 bp, Homo sapiens
  misc_feature 147: n = A,T,C or G
acactgtgttccagaccctgtgccaggcacatggaagacacatctttgtttatacccttcccatggtgtctacatgacactgcctgtattatatttatctgtgttcatatcttgcacaagaggttgaaaccagtgcccaggcctaan

SEQ ID NO: 11685 - DNA, 644 bp, Homo sapiens
actttttgtggcttggtttctcgggaaacgtcatcttctcgggcgcagccatcttgccggcaccccccgcgtacccagggaacaaatgctactgggactccacacctacctaagaagcagctctacccagactccacatggctctctgttttggtctggagaccccagctggggtatctcctgagcccagggattcaaaggttcgtggcagaaatatgcatcccacgggactctcactcactcaccattttcttgtagggggattcccctgggtctgtgccactcctgggtgaatggttgatctgtctcactcttctccgtgatccgaaggtcacactatgtcactgatgaatccttatgtgtccacctggatgttccggttgaagagctagtgtctcaccactctttctgctatttgtgagagtggcacacactagctgcttctagtcaaccatcttggccccacctcactcacttttctcaagtaatcaaagaccagaaaggatgtcctttacaagagcagatcccccaaaatgtaagagttcactgaaaaggtgggagctcaaaccaagagaggacttatctcgcagcataaagacaacttgacctcggccgccaccgcggatagagctccaattcgccct

SEQ ID NO: 11686 - DNA, 334 bp, Homo sapiens
  misc_feature 334: n = A,T,C or G
acacatttttccattctatctcacgagctcaagagctttatactaaccagcccagaagatattttccttgctctaaataactgtaattttgggggtcatttataccccactttttatttctttcaaggacctcttactgctcattataaatgccattatccttctctacaagcgatcaaatattataaggtctgacaagttagttttatgtttgcattgtaactgaagtcccatccatctatccttcgggagtttctgaaaactctatatgaacttcactcaaaatacacaagtagcatgtaagcgtgctgatcatatttttaaaattatgaan

SEQ ID NO: 11687 - DNA, 400 bp, Homo sapiens
acttgggagggagcaggaggattgcttgggcccagaagtttgaggttgcagtgagctatgattaaaccactgcactccagcgtgggctacagagtgagagcctatctcaaaaaaaaaaaaccaaacccaaaacaataaaaaaaatacttatgtcgcctatcacatttgaccttttcactgcaaattactctatatttgaaataattttatctttctagtaaaaaagggagatttcaccatatctaatgttacttaatataatacttaatgttacttaatgttaatataatacttaatgttactggctcagagactttgccaaaggatagaaataattcataaaacagatagctcctaatctcttcccaaaggaactaactccatttataccagagcatgg

SEQ ID NO: 11688 - DNA, 870 bp, Homo sapiens
  misc_feature 865, 866, 867, 868, 869, 870: n = A,T,C or G
gcgtccggcagtgggcagtggccttgcccaccagcatcctcagtggagggaggaaaaggccaagaggtctgctagaatgaagtacagtgtggttgggagcagctgtgatcccgccaaagacgtgcagcagagactggagagagctcgagccgccacccacttgtgaccagccctgaggatgcagctgcgtgaaagaacctggcagaaaatagaagccgccacagatgcgaatgacgcctgaacgctcagtgtgctccctgtccacacacagccgtgggccaaggaagccttactgtgctcgaggtatttgagcccagcgtttttccagtgctggctaattgctaagctgtgcagacacggtggtgaccccttggaagccaaggttgaaaattaaaataggcatgtgggaaggaacggggtggccacgagctgtgagggagatggatttcacggacaaccagacaggcctcggtggtaacaacgaaagggaaaacttagaatccagaattgctacaaatgtattatctaaaatacaaagaagtatgacagtgtgacccgtactgaggaagaacatcatcagtagaaactgtctgagtgtccagatgttgaatttagtaaaggcttggaaacaacttgtggatggagcagtagaaattatccattctgaagaacagagagaaaaaaacaagaaaaatgcacagagcctcagaaacccgtggtacaacatctgctgtaccaaagcatgtcgaatgggggttccaggagagaggaaagatatttgttacaataatggttaaaaactttccaaattttaattaaaaaatatgcacattcaagagcacaggaagtttgaactagaataaannnnnn

SEQ ID NO: 11689 - DNA, 538 bp, Homo sapiens
tgttaagggaaaccacaggacaacaggtgagtcaccaagcagcaggacagcaacagtgagttaatcatacagagggctaccaccccactgggctgatttcttctgtttaaagaacacattcaaatccaaagcaaagaacgaaataatgtatttctccccatttctccaaaagacaatgctgagctcatgaccacatctcaaaaaagctcctaaccacacccagcagaacctcagcattgagtatataatgcttggctgacaatgtgcccaggggaaatacagtacttatccattcataacaaatcattatgtatgaatattattttctcataaatggaaaatagatcaatttcattcagcatgctgactgtgagcaatgcataataatgaaaacctaaaacgatatcatgacttagtgaaagaacatggctttggtgcagggaagaccctggccttgcattcaggcctgccaccaacccttaggtcacccttaaaatagtggcaccacccacgcgtccgcggacgcgtgggcggacgc

SEQ ID NO: 11690 - DNA, 331 bp, Homo sapiens
acaaagttgggaaacaggtgagcaaagaaatccatgggttgagttaacagtgatttctaacttcttgaagaaagagggcatttatttttcaacactctcttctttccagctcaccctaaaatatctaattataagtttacgccatacattaaagtgaaattaaattgaatatgttttaagaaataacattcctaatattctaggaaataagagaattcctaggggctccaccatatcaaacctttgattttactatcacacaatttcttttctcctattttcgaactaccactgtttctagacaaaataccagatggttattttgtttcct

SEQ ID NO: 11691 - DNA, 369 bp, Homo sapiens
  misc_feature 1, 2, 18, 330, 369: n = A,T,C or G
nnacagagacacacacanctgagacacacatacacagacacacatacgcttctcatagctgaaaacatggaaggcagtccatctttctagacagtgagtatctaatacaagtcaagacacagtaattacgctacagacaaagggagggaggataaaaaggaaggtcactctgattgaagaggagatggttagtagggggatggatgcaaaggccagatgtgggagaaagagactggcaggcctaaggtcaattcttatcttgtcagtgtggagaaaaatgtgttaccagcagcgtttagtctaatgatgtgtgagagatacacaaaacanaaaggggggtgagggttttgggtagaaggaaatcatgan

SEQ ID NO: 11692 - DNA, 347 bp, Homo sapiens
  misc_feature 257, 287, 344, 345, 346, 347: n = A,T,C or G
acttaaggaagggcaagcgttggtagcaagcttggctttttagtgtcctggagctcccaggagaggagcaaagtcttgtctaactaaggcttgttcctgtgaatatgaagatgcttctctccagtcgctcagtgggaaagtcaaatccaaggctttggggaatgagaattccaacattaaggggtaaggagaagagagactcagcattccataggatgctgggcttgaagatggctctccctcctaccacggcatanggatgagaagaaggagggggcacaggttangtaggagcttactcagtgcatctggaggatggaaaaccaatggcgcactcctccccnnnn

SEQ ID NO: 11693 - DNA, 459 bp, Homo sapiens
  misc_feature 1, 455, 456, 457, 458, 459: n = A,T,C or G
nacaggagggactttgtggagaattcagggtggcagaataagctcctgagaatttaacttaatcttattcttctcaaatttagcttcaatgaagagaaatgaaagctattgtttctcattctcacatctcccagaaagtaacattgaaggtaatctcagtgtccttgaagttagcctttttgagtggttaagttgaaaagaagttctatcttggtgggctcccccagaggctaaatgggcctttgcattgggaggtcaaagtccgggttcatgccattctcccgcctcagcctcctgagtagctgggactacagcccatgaggctactgagctagagtttttgtttgaagatggaggagaagacgagcgtctcactgttacaagtggccccatcccttggggtgtctaagagcttccagatacatacaaaagtcaggggttgcaattctacaggnnnnn

SEQ ID NO: 11694 - DNA, 410 bp, Homo sapiens
acagccaggcagggagggaccctaacagaggccagcaacgggcagttgggggaggtcctcagatcagactggtcccattccacaagcaagccagccctctattgtccaggtctggcagccaacaaaggctagagctgcctagaggagtatggtgttatggatatccacagccatgctccactgcaactgttcccacaacaaaccctctgggctccatgcaggctagagttccatctctgtcaactctccaggaagttcttcctgccagctcagatgttcatgagaatcatggggtctcccacaggtaggctcccagaggtctgcggcaagagtgggccactccacatcaatttcactcaccccatccctaggagcgactcagggccagcgacaaaccgacaaaccgtggt

SEQ ID NO: 11695 - DNA, 370 bp, Homo sapiens
  misc_feature 1, 2, 314, 315, 318, 319, 321, 327, 329, 331, 340, 370: n = A,T,C or G
nnggagctccccgcggtggcggccgaggtacagttcccctgactgttgacgacggagtcctgtttgtggacccgccacctgggttttcttccttggcatgtgtagtccgtgggtgggatggctggagcatcactggctataacctgtttccagagcaagcctgtccaggacaagaaactgtgtgtttttcctatgggaacacagatttccaggaacaagcctgcagcttctctcgcaggtcagagtgatttgtccaatagcagtggcttcaaccaggtcaaatcacggatctgagagcgaggggaaggggagtnncanncnggactntntnccacccctnccctctgcttggctgttctgagcacccacn

SEQ ID NO: 11696 - DNA, 338 bp, Homo sapiens
  misc_feature 338: n = A,T,C or G
tctcaaaacaccatgagatacgtcttacttctcataggccagaacttagtcacaaggtcacatctagctatgagggactgggcagctgtgagccataaaaggcagaagatggcagaaggggtattggataggcaactggcagtctttgctatagacatccttgcagggctagggaattgggtaatgtccccctacagtgcttttacatatacacatgccaacctccctaaccatagcccataagaattagggatatagcaacccctgagaaccaaaatgaagtaatatctgttagtgtcattcagtgccgtcaccatcataggccaatcagccgcagn

SEQ ID NO: 11697 - DNA, 347 bp, Homo sapiens
  misc_feature 202, 278, 330, 331, 332, 333, 334, 335, 336, 337, 338, 339,340, 341, 342, 343, 344, 345, 346, 347: n = A,T,C or G
acatggaaccttatgggacacaaacaggagagtcaggcaatgtgaaaagacttctacactattgttattgtgtttccaaaaaaagtaaaaaatagatggataaagtggaaagacaacagagagatagtttggctagctgggtgagttcagtttttctcccacaacttaacctaagcaaaagcttttaagaaattcagactgngaaggctgggtgcggtggctcacgcctgtaatcccagcacttttgggaggccaaggcaggtggtggatcacctgangtcaggagttcaagaccaacctgaccaacatgggcgaaaccccatctctacnnnnnnnnnnnnnnnnnn

SEQ ID NO: 11698 - DNA, 605 bp, Homo sapiens
tagagggacactagggaaaatgactcataaaatagccaaatgctccagagggtaaggatgggaaggatctttacagctactgtgactcacttggaaatttcccctgacctcatgtctctgaatctctgtcttctactctttgaccctctttctttgccagtgctcagctgattccagctttttcccagcttctttccagcaggtggcagctgccattaccactccaggcctctagggggtgcaatttgccttaaagttcctggtggtactaggtgcaactgggacaatgctgtgaattttcatgaggagctttgatggtaatgtaatggggagaaaaaaagatgttattttaaaagcatgctgaaattgtttgaaatagtgggaaaaaagcaaacaataaactggcaaaaccaaactaaagactactatacaaccatttaaaagaatgaagtcacaatatgatgacattggaaggagctccaagatttaggtggtggaagagggaaggccaagtttcagaaaatgtgcacaatatgataccacttatgttaaaatacaaagtaaaactacaaaaactgaaaaggcttggaatggttacccggacg

SEQ ID NO: 11699 - DNA, 343 bp, Homo sapiens
actaattttacaaaatatggaggcctttcctagaataacaaaatcattataggtttttagtggcaggtttttttgtttgtttggcatggtgtttctttggcataatgatcaatttcttgatcaggaaacccagttctaacatttctaaaattgttttgtttagtgttttctaggagtatttggaagtcaaatgtgtaagcgacttctgtcaggttgacttaaaagtagtcacctcctataatagcgctgtttcaggtggtttcttcctggacacctggacatttcccaggtgttgtcccctcttactcttcaaccctgcaacctaattctacaagctttgccc

SEQ ID NO: 11700 - DNA, 562 bp, Homo sapiens
  misc_feature 562: n = A,T,C or G
actacggtggtaacagtgttgagaattcagcagcaacaagattgagaatccggcagagctgaaccagtgacagattcgcaaggtggactatttggtggcacgaccctggttgtgtttgccactgctgagctttccttgatttctgctcattttcagatctggttctcccatgttcttgctgattctgagagctgcccaacctacttcaataaattccttttctgcataagacagccagagtcagtttcttggttacagacaagacttccaactcatagtcacccaaaatatacccatcctaactcccgctgtaataattagccacattcatttgtttaaataagcaaagatcactcaaagttcctgaaaactccattatttaatgactgtgtctatcaataccaaacttcctaattcagaaggacaaacaaaagaacaaaagaataacaaatacaatcaaaaggttaggtcagaagtgccggatatagaaagaatagatgaaatatgcattttcattttcagtatttttatttattttttttgagatggagtctcactctgn

SEQ ID NO: 11701 - DNA, 407 bp, Homo sapiens
  misc_feature 1, 2, 3, 4, 5, 6, 7, 8, 9, 10, 11, 12, 13, 14, 15, 16, 17,18: n = A,T,C or G
nnnnnnnnnnnnnnnnnnccgagtactgtttctttgtttatttcaagaggtgattgggcaatctacacaagtttggggtccttgcaatcaatcaagacccgaagggagtagcggtttctcagttttattactcctgtaaatccttcttctagtttatttctggtcttgcagaaatatttttcctaccagctgcattggacatggtgaagtttttttgtaacttttgaagattttcagttttctgcattaaataatactttggagtatatacaatttttttgttctacatcatatatccacactgcacatagatattttctggcagaacaatatcccataaaaaatcttaagcttctttagttagaataccataaccttcatatgctacatggtaacattacccgcgt

SEQ ID NO: 11702 - DNA, 201 bp, Homo sapiens
  misc_feature 199, 200, 201: n = A,T,C or G
ccgggcaggtacgcggggaaaacaaaccatatctaaaccatagcagtggcatcctttgaactcacggatccagtcataactgaagttccatctacacctggggtcttcagacccaggctctggaaaagatcctgttacttacaagcaaaagaaattctgcctcttaccctcagcatgtgagtacctcggcccgctctannn

SEQ ID NO: 11703 - DNA, 1331 bp, Homo sapiens
  misc_feature 1, 1325, 1326, 1327, 1328, 1329, 1330, 1331: n = A,T,C or G
ncgcgttttcatcatcctgctgcgcgaattcatcatgctgctgcgcgaattcatcatcctgctgcgcgaactcctcctcctgctgagatatttacctatgtatgtatgcatgtatatgtttggctagattttgtttctccacaccttctatcttaggccactccaggttacttctggcaaaaaaagacaaaaaagagtcaccgctgccatcacccaacctttcactaaaacaggggagagctaaacatttgcgattcactgcttagcaacaggcaaaaatcagacataggttgtttcccagtttttcccactaataaagaccttaagaaaggatactatcctttattaagtacctgtctcattctggcaacttgtcacatttctcaatccaaacaatatctttaaggtattaaaccctatgtttttggctgaagaaactgacctcagaaatgacaagcaatgtatctaaagagcagtaagtaggccgggtgcagtggctcacgcctgtaatcccagcactttggaaggctgaagcggacagatcacctgaggtcgggagttcgagaccagcctgaccaacatgcagaaaccccatctctactaaaaatacaaaattagctaggtgtggtggcaggcacctgcagtctcagctactcaggaacctgaagtaggagaattgcttgaacctgggaggcggaggttgcagtgagctgagatcacgccactgcactccagtctgggcgacagagcaagactctgtctcaaaaaaaaaacaaaaacaaaaacaaaaaccaaaacaaaaaaaaaaaacggtaagtagcaaatctgagatttgaattgagaattgactctaaaagcccatgctgcttctaaaacagaaccttctgcaccttctctctatccctaatacttcttttccacctatacaagaatagaccaaaatagtattttggtataagccctgattctgccttacagcacaaattccagccatccattcactcaatattcaaagttcaatactctcctgaaaagacaggtcctgacaccaacagaacagcttcttgcacagcaatggcagcccctttccctgactcacagatcttctatttgagaaggggaattaatttacacaagaaagccaggcacggtgtctcacgcctgtaatcccagaactttggaggctgaggcaggcagatcacttgaggtcaggagttcaagaccagcctggccaacatggtgcaaccccatctctactaaaagtacaaaaattagctgggtgtagtagtgcaagcctgtaatcccagttactcagcaggcagcannnnnnn

SEQ ID NO: 11704 - DNA, 602 bp, Homo sapiens
  misc_feature 602: n = A,T,C or G
acgcggggggaatggcttgtgcgtgacccgattctgatcggtcactgatgcaggaaacagggaatggcgtgccttaccccattctgatcagtcactgatgcaggaaacagggaatggcttgtgccttaccccattctgatcagtcactgatgcaggtaacagggaatggcgtgccttaccccattctgatcagtcactgatgcaggtaacagggaatggcgtgccttaccccattctgatcagtcactgatgcaggtaacagggaatggcgtgccttaccccattctgatcagtcactgatgcaggtaacggaatgggcgtgccctaagcaaggctttgctttcagatgaagcagggcttaaatttgaatgacatgagggctattttatgccttcctgggactccagatggcgcctcataggatctcacacaagtgaatcatttatatcatgggttcgtcatgtttttagcatgttaacagatatgcaaagtgtaatggagaatcaatgaaaagaaaaataatgtatgaatggaaatattaagaaaggcttcgtgcacattgaataacaggcatgaatacaatgggtgcatatcacagagan

SEQ ID NO: 11705 - DNA, 354 bp, Homo sapiens
acagatcccaaggccattgttcgcatagacagtgtgcacacctggtcagtcaaacagccttgcccgtgcctgtgcctctcctgtggggcctctgagcctggactcttcaccctagctcaaccactcctctgtctttttcttcactgctgtttgcttatttcaaagggagaaaatctgttggtcacagtggtcaccaccgtatccactggccagtctttctatgccacctgcagtctgctggctgattgtccttgagttacatatccactccaagcaaacatacactccaatcacccatggccgagatgttgggttcacacttggcactagtgagatttcttatgggagtggatt

SEQ ID NO: 11706 - DNA, 690 bp, Homo sapiens
  misc_feature 1, 2, 3: n = A,T,C or G
nnnatagggcttttgggaactccatccgcggtggcggccgaggtactgtctatactggatgctgccctggtggctgaaggcacacttcatgatgctgtccagggtcatcagggagacatgttgaaagagctccagacgtgagttttgggcaatgtgttcctcccatttgttcagcatcatccgaacactctcagacatcatggtgatgaatattttcagaatgctgatgttgaagccaggtttcacaatctggcggtgctttttccatttagaaccatccagggtcacaagtcctcgaccgcccctcttggtttttaccttgtcttttcaggagaatcttgacatagtctgggtcatggatattgaagaacatcgtaaagggtccaacccacaagggaacggcacataggtatttttccatcagctcaggatacacctcaaactcttttactgggtaagactccttgtggccatagaaccagtgcgcagggggtgcaggaaacaggtgcatggctctgatcgtccatctcctcctctggcacaacctgattacctgaaacagcagcagagacatgcagaggaggatcagcagcaagaaggggtgagccatgagttcctgaagccaggagggctccattcttctcagaggtcctgagctctccccgcgtacctgcccgggcggccgccacc

SEQ ID NO: 11707 - DNA, 363 bp, Homo sapiens
actgcataactaaaattgactttttttaaaagccagaactatgtcacagttggtgcttataattgtttcaaaattatacgactttatttaattccatgcaacgcatttccacatagaaatggaatagcaaactcctactcaatagcaaacaataaaataaaataaaataaagtatgtaagctttttcctcttcttagacactgtccccagaatggaaaagttataaagaaaggtaggtaaaaatcctgcagcttacacatttttccactgagaaggcaaatccttactcctccagaaactaaaatattagaccccaaacagtgtagggggaagaggggtaggaagttgaaaaaaagaaaaaaa

SEQ ID NO: 11708 - DNA, 3298 bp, Homo sapiens
  misc_feature 1, 3298: n = A,T,C or G
nacccgggggacgtcaacagcaatggcggaaggagaagatgtgccgccgctgccaacgtcgagcggcgacggctgggaaaaagatcttgaagaagctctggaagcaggaggttgtgatcttgaaacgttgagaaatataattcaaggaagaccgctgcctgctgatctgagggccaaagtttggaagattgctctgaatgttgcaggaaaaggtgatagtttggcatcatgggatggtattttagacttgccagaacagaacactattcacaaagattgcctgcagtttattgaccagctttcagtgccagaggagaaggcagcagaattacttttggatattgaatctgtaattaccttttattgtaaatcacgtaacattaaatatagcacatcccttagctggatacatctactgaaaccattggtgcatcttcaactgccacgcagcgatttatacaactgcttttatgccataatgaataagtacattcccagggattgttcccagaaagggagaccatttcatctcttcaggttgctcatccaataccatgagcctgagctttgttcttatcttgatacaaagaaaattactccagactcctatgcactcaactggcttggaagtctttttgcatgttactgttccactgaagtcactcaggcaatatgggatggatatctacaacaagcagatccattttttatttatttcttaatgttaattatccttgttaatgcaaaagaagttattttaacacaagagtcagacagcaaagaagaagttatcaagttcttggaaaatactccatccagtctgaatatagaagatatagaagaccttttctctctggctcagtattattgcagcaaaacaccggcttcttttaggaaggataatcaccatctctttggtagtactttgttgggaattaaggatgatgatgcagatctgagtcaggctctttgtctggccatctccgtgtcagagatccttcaagcgaatcagctacaaggggaaggagtccggttctttgtggtggattgccgtcctgcagaacaatataatgctgggcatttatcaactgctttccacttagattcagacctgatgcttcagaatccatctgagtttgcacagtcagtaaaatccttgctggaagcacagaagcagtccattgagtctggctccatagctggtggggagcacctctgttttatgggcagtggcagggaggaagaagacatgtatatgaacatggtcctggcacactttttacagaaaaacaaagaatatgtgagtattgccagtggaggatttatggcactgcagcagcacctggcagacattaatgtggatggaccagaaaatggatatggccattggattgctagtacctcaggctcaaggagcagtatcaattctgttgatggtgaatctcctaatggctcaagtgatagaggaatgaaatcactagtaaataaaatgactgtggctttgaagacaaaatccgttaatgtcagggaaaaagttatcagttttatagagaatacatcaactcctgtggatcggcatgtgagcagcagtgacagagtgggcaagccttaccgtggcgtaaagcctgttttcagcattggggatgaagaagaatacgacacagatgaaattgacagttcttcaatgtcagatgatgatagaaaagaggttgtaaacattcagacttggataaacaaaccagatgtcaaacatcattttccttgtaaagaagtaaaagaaagtggacacatgtttcccagtcatctgttggttactgcaacacatatgtactgtttaagggagattgtttcacggaaaggattggcttatatacagtctcgacaagcgctgaattctgtagttaaaattacatccaaaaaaaaacatcctgaactcattaccttcaagtatggaaatagcagtgcttcaggaatagaaatcttggcaatcgaaaggtatttgattccaaatgcaggggatgcaactaaagccataaaacagcagatcatgaaagttttggatgctttggaaagttaatataaaagaaaattatataaaaagaaattaagacaaccaagagaaacatggacatatacctcctgactgaatactaactggagacctttcatttgctcatggggctgcttaaatagcaggtctaagaaagtgtaaattattataatcaatctgtggacagtaaactttttaaaaatttttcttctgcattttggttttataaaatgatgtattataaaggtcagttattaaattactttgaagtaactgaccctgtgcccttatggactaagtaagggtacagaatgcagttctgttttgaagagctgttttaagggaacatgcatcactttcgggttcaaaaacaactgtacacatacatatctgcagtgtcttcactgaaaattagagatagaattagttgaagagacttccttaattgctacattgttttactcactgagcaatatcagaaactaaaacatagattaataattcactcactgtttctattcttcttaaaaagagtgaaatctttttaatggaatggttgaagattcctgccaactcaaaatacagtacagctagtaaaatgttgaaacatcagtttctaaatcacctttgctccattagctaattttttggacactaaatgcttcaaagataagaaacttcatcctaatgatttctaaagagcagttaaaagcattaaaataagtaggtaggctgttaagattaaaattaacattttggggacagaattgtgtctgtaaaaatgtcattggttttattacaagtggattattttattcatattttaaaacaaatgtttaagccacattgatttatcctcattgaggattatggtctgtgaccacagtaatatccacttatataaatgccaaataatcagagagcttataaagtacaatggtttgtcatcattttctgaaatttccttctcttctttgtatggtcgtctcatggacgtccagtgatttgaatcagtttgaccacttgtcttacagactgcaaatgcctgcgaatttgcaggacctcataattaaatggcatattagaccatcggcacagaactcacgcaccatcgcgctgaaacgattttggaaccatgggagtgaacccattgattctaaagacggtactaggggagggaaatattcgccaacactgtttacacgaagacgatataacacagggaggcacggtacatgtctcgacaan

SEQ ID NO: 11709 - DNA, 298 bp, Homo sapiens
aggtacaatgcccttggagggagaggggcttcatggaaaatggttgccatgataggatttggggagaacctctatgtttgagggagtttgggtcaggacctatccgtggaagcaaaaactagtgcccaaatattcaaaacatagtttggtgaaagatcacctatgattctgaacgaaatagtgtagataaagacatctggaagttttcctattgaaaaaaagaaagtgtgaaatcagatacttttgtttttaaggctctctttcttaaatttcctaacttggccaaaatgtcaatggt

SEQ ID NO: 11710 - DNA, 968 bp, Homo sapiens
acactttaatatcccaaagtgggcttggcagctcatctgcgcagagattccagcattctctttaataccaccacggatctggggtgtttgttttggtggtgatagtgatgggttattctgtcaaccacgcaaagtagaagtgcctgcagttaggtttttgtattaagtagcaagggttttttggggggatttggtttttctgcagttgtatatgaatagtccattttacaaaaaagaggctcaataaatctaaataaccttctcagttaattatgatactaattacgaacacagacctaaaatacagaactggaattgaaactcagggctgtgggcctcaagtcctcttatgttctgatttgccgcatggtctgtaggaagagaccagctttgggccaattgataccctgggacagtgctccctaagcttcatgagcaaaagattgttgcttgtgcaatcctgccctcagcaagtggacatttgggatacattagggatggatttcaatggcttcctgcttcctagaggagaaatgatgagcagaagccttagctccatgcaaaatatcggctccttctgacattgctggttccctgtctccctactctgggtttgcaatagataaggaaagggcgatggtactcagaggaacttccaatcggcaacatgccttaaatcttagtggccttgtggcattcatgaccaaacatcgtcacagggaaacactcatttcaataactgtaaagaagtgtgcctgaggaatactgagctcaaaacacatttgaaaaaggaatttgagaagggaaagcaatgaaaggaagacagttttttaatttttatttgttttagtattttcaagactctgatatttagtactaatagtaaataattaaaaaaaagtttaaagttcttgagggcacagaacaaaagcttttgagctgggattaaattctagctgcttttatta

SEQ ID NO: 11711 - DNA, 348 bp, Homo sapiens
acctgaggctctgtgccagtggggatgacgggggctgatgtctcttcccatgggctcctatggatttgcccttcagatgacctggtagggctctgagtgactgacttaaagaccttcgtaacgccaaagtggcaagattttggagacagatttgtgtctcctcatccatgatttttgactttaatcttttctgagaagaccagaaatcagagagtttgtcttctcagcctctctgtgcaaggatctgctgagctcaagcttcccttttcagcgtcagctttttaagttgagaataataattaaagaaaactccaatctcaattccaacatcaagtgtccatgaagctg

SEQ ID NO: 11712 - DNA, 340 bp, Homo sapiens
acagtagtcactcttgtcacagtggttattgtatcagacgatacagaacatgttaatcatcatagaaagttctggacagtggtgctctagagtctcaacatgtcacgtgttcgggggatcactggatctaaagccattccttatgggaaatgttggctttcttgaaaatacaccggagaccagagaaggtcaccatgtggagaagaggcagccttcactctgccaagaatgctggccaggcttctctgttttatatctcatcacaatgagggccattctggccctccaaaatatggataccaacctttacgcactgtcagaaatgggccacaattaagtg

SEQ ID NO: 11713 - DNA, 499 bp, Homo sapiens
  misc_feature 1: n = A,T,C or G
natccactagttctagaacggccagggtaccagagtccatgttcttaaaccattaatctacgatgcctctcaagtaaatagtcaattagtggtaggtgtgaggctgtaggaaaaagaggagacgaagggacaggaaagcagtcctcattggaaaactaggtttcgactggcactgttggactgggctgcagtttaggtcctcccactgctgagttccctcacttcatctcctggtgcttctggtttcccatttataaaatgcaagggaaggattctatttatgtcacaaggtgcatctaaggagtaaaaagtcacgtcatgtttgaccaatgttagtcagatcaagatttattttagataaattatctgttagttttaattaccatgactcagtttttatgttcactttttggtcaaagctaaataaaatatataaatatataaaatctgggctccaaccagactcccacacactctcagccaggcatcttgagcaggt

SEQ ID NO: 11714 - DNA, 348 bp, Homo sapiens
acaagcagtaggctgaactcatgtgccaggcagaggtctgatgaacaccaccgccagtccaccggcactggggtcagtgtgttagcggggatatgtggtgctgtttcccagagtgcaaaaaggacagggaggccctgtcacatgaatgctgagtcaaatttatatatatagaaacaagacattgcctggcagggaagatgagccatgttagtgtgggctgtgccaccacttcaccattgcactgattacattgtcgcacagatagctactgcccataatcctgtctcctggcttaagtaagtcagaaatcactgctttataaatgaattcctaaggtggttagcaatg

SEQ ID NO: 11715 - DNA, 10431 bp, Homo sapiens
  misc_feature 1: n = A,T,C or G
ncatatgtatctctgaaaagacaaacccccgaggtgtgaatgtgatttaaaggccgtaagtctgtaacttggtcagggagttagaggaaggggaccctggataacctcgtgatttcattcagaggtgaggaaaatggttaggttgaagagaatatactgtctcttaaagaaagggacattgaaacgtggcacaattaagaaaaccagagtagtgttttcaattgataatctatactcacaacaaatactctgataggtgaatactgctgaacagtttatgtagtgacttttgttgtaggggtgggtttagagttctttttatgtaggtttttaaatgattttattttgaactgaatctccatttgcacagcacagcagacacacaagaactacagcgcattaaaaacagcatgtgtgctggcgggggcctggctttctcattagaaaaaaatatgtttgacaggttatgaagggtaaaacaaaaataattgcaagaactaccgtgcccttctgaccccatgggggccttccctatcccatgattccattttggggagtagaggtagggagggggcagcagttacaagtgctttgagctgtcaactcacattttactttgacctggttgggcaagaaaggagagacaaacttccctagtcaggtatctaggaagaagcctcagctactgtttctgtttaaggtctctggggtagctcttggagccaacagagaatagatggggtaggaatagggatcctggccctatccctttggattttgagttatacctgggtataggaagcagcttcttcgcaatgcctgtgggatctgaggatgacagaaaaacctaagctgtggggtggggcaaatgctataaagtaccagtaggttctggtcatcaatgtggtcctccctcctctctacattattaacccttaaggtgaagcaatggagaagaaaattaattaacctgaactgtcttggacagaaccctttcctctccctctccactagctccaaggcttattaagtacctaatgtcaacaacatggccccattccccttgcccagatggacccttcccacccctgtctatacccagagagcaggaggcaggactgattagctccactggatcccagatgcttgaggttctcattctttgagggtcactttcgaaagctgttttctgggataaacaaagtacgccttcgcagtttcctgcctgatccttcctccagcaagtaggtcacatcaatggcattttttccagggattttttcaaggagattgagcaagatctggttgagtcgttcccgttggttatgccgtcgttcctcaggggtacaggttgactggggttcttgactactttcctctgtttttttttcaccctcactgacgttagcagtggccccttcccgttctggctcctccaggctgggtatctcattggctgcttgctcttgactggctagaacctcttcaatcaagggtagagcatcatcctcctggcccaagtcttttaggggtggctttgagcgctcagacttccaggatgatcgtcctccattcctcttgtagttgtctgggacgtaatgaggcgagaaatcttttttgggagtgagcttcttggggaagtgatcaaaagcatagggtttggtgcagacaggatagcggttccggtggatcttgtaaaacaggtgtgctgacttgtcaagccgataatcacagatgtacacatcttgctcctttactcctttgggtctccctttacaatacgtataaaggtccaacacacagcaggtccccactacagcctccaagggaatgatctcatagagtggcacccgaaatagttcattatgatagaaccgacgggatggagagtggtgtgtttcgtggggacggaaataatggtgaccaaaggcaaaccgttcctctttttcattcttccaaagcttctcaatgcgaaagatgtcaagtttatctcggttaatgtgagataacagtcgataggactgacggaccgggtggccatcaggggtgcgccgactatccctcatcagatacacacagtcaccctgacgaagcagcaagtcatctcggagcaaacagatgaagtagacacagccaggttgggcatagtggggccgagggatcatgggaacctccctgtccacaggccttgggtcacactgctcacaaaggtagtgctccacatctgagttcactcccatacaatcacagtgctgccataccatgcacttgtcacactggatcatgagaccttcatcgttgtagaggccacagatacagcgaataacatcgtcgtccttctcatgcccattctccttttcagagactgaggtctcactgctgtctgcctcacttgctgtctctcccacaatctcatcaatctgggctgatgcctcatgccgggcattgtaataggcctttcgtagacgacaaacatctctcccaactggggatttacgcccatagtacttctcagcattccgaaagactttgagcatgtcagcatcaaaagcttccactgtcttatagtaaccagtgaggatctgcttctctatggtgataagatctaggggatcagagatcttctcataataatcagcattctttttctttgggggaaggttcaaaagtggagctgccagtgcttgccgggaagaatctttataagagatgataccatcacaaatttctttgaagatctgggctaggcgggctgcccgagccacttcaatattttcctctgcagctgccaaccgtcttgttcgaacagatcgagctgtctgcagggcagagaactgggtcatgaagacatcagacttgatattcccatcatctcggcagatcccattccaacgggtatataatgatgctgagtgaatattatcactggtgtgctttacttcctcctgtttttgacgaatcttctcccagtttcggaccaagaatacatgatgctttaacacaaagttcctttcacgattggacattggcttcatctgtaattggggggtcaatctagttggggtgttgatattttcactgggttcctcagagagatggcctctccttttcttcagcttgtgcttagactttctcttctcttttgaccgtccagattttttgtgtgtggccatgggctggctgtttttgctgctggtgagtccattcacacgctgactcttgcctccgatgattcctcgacatttctcaaagccacacttacaaagttgctgtttttccacattgaaggaatgaaagttataatcataagtgagttcagtcccagctggcatgtctttaagagcatagagtccaatccggtatactccattaacagaccatttctgcatttcacaatttgggtcacagctatggttgatgaatcgggcctcatttcccatgcggtaactgtcaatcaccatcccactatccaggttcaggcagtagtggtcactgtgattatgatactgctcaatcatcctgttcctgaactcctgttcactgacgacctcccctaggtattcaatgatgaactgcccagcttttaggggctctttggttctgattccccaacctttttcctcagctcgaaatcgttctagacattgcacccattcatgcctctgtatcctctggttacagcattgctcgccacatgggcaagtgttgggggaacactcagcaaagatcattctattgaggcagtcatcaacacagcccttcctggtgtcatcatctggcttcttacagttacaggtggtagcttcgtaaccagaaaggggtttgacatcaacgtagacatttgaacgaattttcttatatagtgggacatctggctttttgtatagctgattgtgtttccactgccaaaggatatcataaggaagctggaagtcaattctcttttgtcttagatactttcctgaaacaaaaaacacaacatgaatgggcgctggaaataatccatattcatgctctcctggagtatactccagcttctctttctttaattggatcaatcgactctttgggtctgtagttttgtaaacgtcagaatacagccctgctttctgatacttcttctttgggggacgtgggggcttcttttcccttgggatgagagaaagcacaggctgcaaggtactttcaggttcagaaggtttagctggggtttcagaaggactgggaatctcaactggtgcttcattaaagcttttattattctcttgctcttcttcctctggtaatggcttctgcttttttctggtctgttcttccaatagccaaccttttctcttcaacccctttttatgttctgggttcagatttacactctgaacaacagcctcaattacatctgtaactgtgtcaggactgaggtgcagtgctgctccttcctcgtctctgttcaattctgggttgacaaactgagcagcctggaatgcttgcattgatacgacagcctgaaggggacatttccgaggtcgacctggcctacgtttcacaaagttattccctgtcctggcctgcctttgaagttttttggcttttaagattttattgacatggtctaggtttttctttgtggccaagattttgtcgtaattgcacattttccgagcttggcgttgcatagcttccactacacttctcttgatatgatggggggaacagctgcttgtcaacttttcagataggagtgagatgctattattgcaagagtcacttgcgactgcaggcactaaaaggctgtctggttttcccagggttcggtccttgctgtggctacggcctggactggaagaaggtggtgcagaggcagttgcaatcacagcatcaatacttttctccatgggctcttggtcctcattttgtaccatccgctgcagcagactatccacagagtcatccccagaagcaactaatcttggacttcgagagggaactccgtttactgttgaagaagtactctcagatgaagaccttttccgggtagggctacaatttgtgctctctgatggccgctgggagggtttatcagaggttggctgggagcctgccaaagtctgtactgccctttcgttagaaggcagtgactcctttctgtgaagccgatttagtgaagtgtcctgtgcagaaaagagtccagggctgtcagttaatttcttccggccactggagttagggtttgaaactctgcagctgcctattgcacttgtgaaaaggtttgtatgttcatcactgctggctggctcagagttgggagtgaatcctccaagggataagcttggagaactttctgaacagtcaatctgtaaaggtgtctgcaatcccaaggccaatggactagattctgaaggctctcggtggacccactgttcctctctgtttattaagctttttgaaggagagagatgagggcaggacatgtgacaacggtgcttttccttatgcttatatcgctctccaacagcatcctttccaaatctatagcgcttcaaagattccaggacagatcgggaagagccagtgtccatagaaacctggggttgttcagaagaacggtgttctctgtgtttgtgacggtgcctgtgtttgtgctcaaccatccaaccataggccatctcaggaggaacactggggtaggtactcatggaaaggaggggagtcctgctggttgtaagaaaggcctcctgtcgaagtagcttatgctttttcttatggtatttggcaggattgagaagtaaatgaccagcatgcatataggaaggaggtggaagtggcgtggtgaaagaaggagatggaggaggtggataaagagtgggaggataccttccatagtaacctaatcctatgggagcagctgtaaggggtgaaggagagtaaggcataccataagatggatagaatccagtactagaaagaggaaaactaaggctgtgcataaaaggcatttcagccattgcctccctcatcttagggggtctccctcttttcttttttaagtcaggttttcgaatgtagtgcaaagggtctaaggggaaagaaggatgtgtatagaaactattaaagttgattcgaaagatagttggcagaagatctcgggggataaaatgatgacttcgatgagtgatccgaatttcacttaggcgacttattagttcctccagctctgcaataaagtctggatcctgtctatttcgaagctggggatatttctttttccgttttcgtttctgccttttcatcttgtcatagctgaggtaatcatgattcctgcgcttacatttgtgtttatgtttttctttaagactgcttagcactgtagaggtttcagggggaatcagagaaacatgctcaaaagaatgcctcctctttttttgcccacaaaatttctctgccctgtctgatgtgctgttattatctgttccaattccactatcactgggaatggtctcatcactatgagactcactgattggggaaggagtagcttcttttagagatgtgagttcactcaagtgcgaaggagaatttggcaacaaagtaggaggagataaccgcctcctcccctttgaggccttcttcattgcaagagtctgaatcatactgccctgtctggagtgtaaatgcaaatatggcactgaactgggttcaacaaaacctgcatcactacttacagggctctgacctccactagtcccagaagactgagagcaaataggtgatggaagaatctcagaactactagcagatgaaggcagtaatgggggaagaatctgtcctaatgctgacccagctgcctgttgagctgtttgctcaagaacagcaaggctagtaggactaccagaaagaataccatttaagacagtttttggtttgcgacctcttctctttcctatataaatggttcctttcttgctgacatttatctgttggcccaatttagagccaaatgtggcagcaagacttgataccgtattatggagtttggattgcactttccctttattacttgattctacagaacttgaaagaatctgattcaacagtttctttctctttaaagtcttcattttatttattttgcggataattgttttcattaattgtccattgtttctcttggtaatttttttatctggttccatctcaaggtcactcatactacagacacttggcctatgactgtcatctaggtcatctggatcctgaagttgatcctcgctctcaaagaaatcactgctacttctatggttgtcactttcagattctagcttgcttggactttcagtggcaacaaatggagccactgacagtacaggtggcttcatcttgactggtgacctcatttgcctcttaggcctgcctctcttttttggaaaaggagacacagacagaccttgtttgaaggaagggatttcaatttctggctgtaaaattgggggttcttgttcttccttagactgtaaagaaaacactttagaagcagggatttttaaagtccttttaggtggcccttccagttgaggcatctccttagatttaggccttcctcttttgggcttataaatatcagacaaaaggtcactagagacacacatactggaggatagtttgtgagtagcaaaagacttatgagatggtttttcactatcagctaagagagcaagagatggagctgtggatttgctcaactttggcaatcggcgtttaaggaagtcatgatctacaaatgaagggggtccaatgtttttcataaacttggctggctcagaattactatttgatagtgagctacatgaaacgtttttaaaaagctctgatctttctaattctagcccttttggagaccggcatgtgcttcttgccaccactttagtccaccgaggttttcttccttttcttttttttaatggtttggactgcaaactagtacttaggctttcagcaacttggcagtgtttgtctgatgcagatactgcacccagttttaaaaaaggcttattactaaataaactagtgaagttaacaactgaaggagtaatagtatgaatgctggattcagaagtcaaacttggcttttttccaagggaagagcttattcttggaatatctatatgggtagtttttgaatcatttacctctttatcaatccctttacattcaatacttatactatgaccaactgacctatgaccaacgttcaagtgggtactttcagaagtaaactggttctttccaacagattcagaaatttcttcgattagttctgtagtagaacttaaaagtaatggattaggagccaactgtgaagaagtttcagggggacttctggttaaaggattaacagatacagtaggtgatggggaagggagattgctttctcctactgcactgaatggggatttagcggtagatacatcagaagcacctcccattttaaagtccggagaagtgcaatatacaggaggctgcttttcatgctttgaggtttcataagatcccttttcactggatgagaaactgtcttgctgaatgcatgttccttcattaaacatttctttctccaaattaatgatttcttttcgtactgagaacttttccaatatgctttctttattctgccgtacaacattcttttcaaaagttttgctggtggcactatctttcagggattcagaaagttcctgactttcctgattattgatgtttgtactacaagaagccttaagcggttcctgagtggggagcagtgcttcggctttaaggtttatggcatctttactgatcagacctgccaaaggacaactcattagtttctttccaatgtccttattaaccaatcccattgctgaacttgctacaatcttctttgcacagtccttggccactaggccaacagtagaacccaatttctttcccaaatctttattaaccagtccaaccacagtgccaagtcctaacttcttgccagactctttatgcactaaacctggaacaataccaattcctagcttctttcctgaatctttgcttagcagtcctactgtagtgatagttcctggctttttgcctaagtttttattaatgaataccgctgtagtgccagttcccagttttttcacagagtccttattgaccaatcctactgctgcattaaacactggctttttcccaggatctttagttaccaatccaactgctgtgctgatggttggcttttttattaagtccttatgtattattccagctacagagccaacacctgctttcctgatcaaatccttgctaaccaatcctgctgtagtgccagttcctaacttcttcggttttgtcttggaagacttggaaggaggacaggtagcaatcagctgtgccaacttttctgttacactagttcctccattaagtaatgctctgtcctttaaatcaggatcccggctaccaagaagagtagatggcgttgcattaatataatctgccatttctgagtgtactggagacagcttcttagacaaaggattgttttctccctgtgaatgaagacggatgacttcttcagactggcattcaatggctgcaacatcatctgctttcttgtacaactttgaagggtctcgttttgaaggacagtgttcattcttttcatccgtcatctttccacttttaagtgctttccttgggtgcttaatagttgtttttatggcaggtcgacatacatagttctccaagttctttggaggttttttagttctcttagcctggaggccaattttcaattttaaatttccctctgaaaagtttgtttctttcactgaaaactgttgctgtgcatcagtcaaaccatcatctttcccagcttcgatgtttctttctcgattccgtttgcgaaggtcctcttcctcctttgtgtttttttctagctctacttctctcttactgaccaatgtgccagtactgatggcagaaggactctttcttgaaaaaccttcggaatcagaacccaatcctaacatagcagtatttctagggtccatcacaagcgtatgttattgccaaggaatcttatgaaaattttacagaactgtgttccataaaaaacaaggatctccaaaactcgaaaccagcatctttctcgtgtcggaggccgaggccgaggccgagagcgatgagagtgcagggaagtggggaagagggggtggccgccaggctcctccgcttccctgggtccacggcggatccctcccgcttgtcaggaggcggccagcgggtaagctgactggcggaaatgcgagagaggagaagggaaaggtggaaggctaaagggggcaaactgaggggaggcgggtcccgcaaccgagactgggatccggacgcgtgggcggacgc

SEQ ID NO: 11716 - DNA, 349 bp, Homo sapiens
  misc_feature 349: n = A,T,C or G
actacaaagatcctggggagcctgtaggtgacacgtatgatttgctgcaagaaatttcacaattaataacaattctaggtctatatggttgatttgtgataaaagtcacctatggcaaaaacaagagagaagttgtagggagtagtttgggaagtggtaaggtgagcaaaggcaggaatcttctggacaccaggaatgtaaattgggggaagaaaaatattccaaattttctagtcattgaggaactgccaataacattaattatgaatcatctatgtgagctgtagaatggtcttttctgtgtttgttcatccattcaataaatacatactgggggtggccatgtgcn

SEQ ID NO: 11717 - DNA, 1321 bp, Homo sapiens
gcgtccggagcttcccaagccctggatcttacttagggagtagctgagagacattgagaaggaacaacctgggatgcatcccatgcattttcccagacctggtggctgataagaggactccagtctcagtcctagctcatagcaaactgtgtgggaatcctgtggcctagcagcagcagcagaagcagcatctgttagcattataaagtctcatgccaggattggaacactgggtctttggtaggaaaggggcccacacagccagaaatgataaatgagtacagcttgggcctccagctttgggcactagaattggacccctgcacccccatcatgggactggagcaggagatttgcctgagaggtgtggttttggacccaatagcaaatttgcaggctgaaggcagatatatggtctgtctgattcctgtggtcgggatgaggaaatgagtcctgatggttctggagagagagagagaggcaggtcccatactgtttgcctggttttaacaatgggtttgcccttgccttcctgtgctgggacattgatgcaatgtcagttgctctcatctttgcctaggcatttctacagggtttggcaactgtccctagatccctgtcagagccagtgcttgtgcctgctactgggggaccaaatggctgtcttgcccagtccagctctacccagcttcacctctccccaccagtcccctcccctcccccaaggctgagtgtaagacccaaaccactgagctttccctggcccaacccattgcgtgggacacttaagtacttctcctggttaacaaagataagtcgtaaaccctactgttagaactgtagccagctgtgacctgcaactaccacctgctggcctggaggttgacccacacagcccattacaacatctgcttacataagtgcacagcacttgggaataagaaaagcttctcatgacttcttttaccaccattgctcatgccaccccagcttctcaggaggttatgagccagctcacccacccgatacaccactactgtaaccagcatttgagaaagccaccacactaaggctgtttatatccaaggaaatcctagaatatttgctactgaacacactcagaagcaaagtcaaacaatcctactcaaattacatcatagtaacatcctcaggattaaaaaaagtccactccagaactcccattcacaattgcttcaaagagagtaaaatacataggaatccaacttacaagggatgaaggacctcttcaagaagaactacaaaccactgctcaacgaaataaaagaggacacaaacaaat

SEQ ID NO: 11718 - DNA, 1137 bp, Homo sapiens
  misc_feature 1, 2, 3, 4, 5, 1133, 1134, 1135, 1136, 1137: n = A,T,C or G
nnnnnaacctgattttttatgggcatgagtcagattagtcatggatgaagaaagcacggaggaaaagatctagaacgcagggcattgctaaggagggtggctgtacatgctgatatagggacagcttagagcattagggagctgctaagagagaagagggctggaatagcaagccaagagttacgtgggctcagagggaggacggaagccctcccaggtggcagtctgcgaaatgaggaaaggtcccatagagaagatgtcatttgagcagatctgttttgatagacagtatttagatgcagcctaaacgaagcagaactgcatgggcagagactctgaggcaggcaaagtactgtctagggcaagcttgggagagcagtgcagacattcatagtgtcacaagaacatataagggaagaaggagaggtcagggaaggtttataggaaagatgacagagaggaacctgagtgtaaggctgagctacttaatcagctatcttgttggcatatagcttctgctgactgctaatccaaggtgagttcacttcgtggagtggtagatgaatgccattcagtacacgtggaagttacacagtgactcccacttagactacaggtcataactcggtgtgggagtagagacaagcgaaccatggccaggaacagctgtgccaggtaaacagtcccggaacgcctaccaaaggaataggccggaaggcaaacaagagacgcagaagtaaccagaaaagacgaaccctcacacagaagaaggccgccagaaagcacccaggtgcccagcacaacgcaactaggcaaaaatagaagcacaacaacgacgcaccgcgcacggacagggcggaacaagacggtaaagacacaccccaacgaggaaggcaaaacgagggacaccacgaagaagagaagacccccaaccaacgacagcacgacgccccgacaacacacagcgagccaccacatcacacacacaacacacagaggcagacaagaactaacacgaggagacggacaaacgaagaaggagaagaaggagaacacaacacgcccgaaagcacgaacaacaaaaggcaagaacggaccaagacgcaccaatacgcaacgacagacaaccagannnnn

SEQ ID NO: 11719 - DNA, 1562 bp, Homo sapiens
  misc_feature 1, 2, 1562: n = A,T,C or G
nncgccgccgtcgcacgagtctttccttagtaacctgtgcgatagctgtggatgtttccaaggattgtcttcagtcatggccttgggattaaagtgcttccgcatggtccaccctacctttcgcaattatcttgcagcctctatcagacccgtttcagaagttacactgaagacagtgcatgaaagacaacatggccataggcaatacatggcctattcagctgtaccagtccgccattttgctaccaagaaagccaaagccaaagggaaaggacagtcccaaaccagagtgaatattaatgctgccttggttgaggatataatcaacttggaagaggtgaatgaagaaatgaagtctgtgatagaagctctcaaggataatttcaataagactctcaatataaggacctcaccaggatcccttgacaagattgctgtggtaactgctgacgggaagcttgctttaaaccagattagccagatctccatgaagtcgccacagctgattttggtgaatatggccagcttcccagaggtaagatggccttgctaaaatctctctccgtggtctcttttggaatggaggagactgggtcatatcaggaggaagtgttccttcagcttaggatgaaacaagagagaagacataataaagagaacttaaggataaggcaaagctcttttcctgttgccagattccttttctgttaaactcagatgctacagaggctaggtaagttgtttgaatacccaaacgggtcccatctaagaaaaacaatactggagatgcagtgattggtgcttggccagcgtgaaaaggctctggtgagctggagagcctgtaccttgtgtgagtggaatgcctctgcccagctcctgctgatcattgccaggcacaatgtaggcctggtcatcagtgttacctgatactacgatttttatttccagaagaagctagtaacacaaatttttatgtgacatctttattctgtaaatgttgatgactaattgagttttttttttaaagactatgaagcaaataaaacaatactttaatgggccaaatgtggcctgagggccaccaatttgtgacctctgcattagtatttggagcagaccctccaggaagtccttttatactagactgaccatcgcagaatattgcatggagcacagtgcttccaaaactggaaggtgggttgtattaggtcattgcatctttgaagctttatgattttaagtgtagttgaagaaggtaattgggctttttgttattggtccactaggaattggcctggattaggagtcttaaagtacctggaatccggtcccatctctaccaccaactggctgtttgaccttgggcaagttgcttcactctctgggcctccatttcctcatctgctaatataaggtgaaggaatcctcctgttcttattgtctatttcagtagttgtattccaaagtcatagaccaaggttggacctgttgtatttgacaaactaggctagagataggagaaagggaaagcccttgctgtgaacacactgtcaaatcaacan

SEQ ID NO: 11720 - DNA, 516 bp, Homo sapiens
  misc_feature 516: n = A,T,C or G
cgtccgaaatgtctagtaagcctcaggccctgggatgctaggactatagaaccctctagaatcacaacacagagccacagcacaaattcgggttctgaaaaccctggcaagcctcttcttccacagcagaggtagtccaggatgcctttcaaacttcatggctacatgtgtgtgtttccctttgatgaacagtgatacaatttgacaagctgaaggtgttacctaagtgttacctcttttcctgctatctgtcctgagtcctaggtggttctgtcaacccccaggtcacagatgaggtgttaaatgcctgctatttggagattaaatggtctgaatatctggagatgggctgcggtttaattgtagtacatgaataattgcctcattttatattgttcctttgaaattgttgtctgccaccattaatgccaatagacaccctgaaattccattcataagagacctgaagcttctcctgcagcacagaattcagcataaaggagacctgtttgaaan

SEQ ID NO: 11721 - DNA, 356 bp, Homo sapiens
actgagctgagccatgccagagagccttttattgcaagtttctctggactgaggaagaaatttcctctgagcactctgagaagtaatcttatatatcaaaattatataaggaagcacacggctaagaagatgaagaccgtgctgggcccaagccagcgtgtcccatgtgataattctcaacaagtctttgggctctttcttggatcacatccctgtaggggagctgaataaggagagaagtgacattcctacactgcttcctggtttatgaaatgttcttacctaccctagatcttcacaacaatccaggaaggaaacgggcattactgcattgttttaaaggtatggatactagc

SEQ ID NO: 11722 - DNA, 216 bp, Homo sapiens
acacaagggttggcctgagtccctgtgttgtgaaagttggcctacaaaatgagtccacagggactgtcatgggttttgagtttatggaggtttgtccattgctggagtctactgggatgagccttggtctgctgagcaggtatggaacctgagtctggggaagtgtggggccatacaggtcagactgaagggtagggttatggggactagcctagt

SEQ ID NO: 11723 - DNA, 360 bp, Homo sapiens
accttaagaattgctgacacatttattacaatttcaaggctacaactcaaatcccaggaacacaggattgcagtgacctacataatttgggctcaaataccttcaaggcattccgaagagacagagaacaccagaacaagggagaattggagtggaggtggatgctgaaattccagtataaaaatctactctggctgaggaataagacaaaatgtaagtgatttaggaaaattatcccagacaaatgagaggtgaactttggaagggggtataaatcaagataataatttccatatttgctgcttcttttactttttgcagaagaaatgcaatatagtcgctactcaggaattttgactg

SEQ ID NO: 11724 - DNA, 336 bp, Homo sapiens
acgcgggacccactgtgcccagcccttgaatttctcctagcccttcagttcctcaagcttcatgcctcccaaggttgcaccccccatggcctgtcctgcagtcctggggcccttctctgaggggatgaagggggcacttccctgaacagagagaaagggagacccacaccacttggattaaactccctgggccccagctggctctgcaacttggccaagaagccctatctcctagggcctcagtgtcttagtccgtaaaatggttcctgaacttttaaaatacaaacactcttttgtagagtcgaaacactttgcagacctgcactctgtggcagt

SEQ ID NO: 11725 - DNA, 328 bp, Homo sapiens
accaccatgcctgactaatttttatttttttagagatggggtcttgctatgttgcccaggctggtcttgaactcctgggcttaagcagtcctcccacctcggcctcccaaagtgctgggattactaataggcatgaaccacaacacccagccggcatatctgtattttggttgcacggaggctgctgctataaaccgtgggcaccagtgcccacgagtcatacataattgctggcccccatggctggaagtatctgagggaacctcaggcaaggccgtttcttttctggaagctccaagttctgggtccttcttaataaatcttctcg

SEQ ID NO: 11726 - DNA, 426 bp, Homo sapiens
  misc_feature 1, 2, 3: n = A,T,C or G
nnnacattattcctcctaagctcctgatttattttgcacctaattatttcagaacaagcttgaggatttctcctcctcttccagaaccctgtgacagctttttgacacttgaaggatattttcacacacttgtaggtcggcagttctgctctgaacattgaggctgtgaaaaatcctatcactcacgggtggccctaaactctctctcttcacagaagactcatttgaactgaaatatttcaagaaatgaaatttgaccagaaagggtaaaatacctgacaaagtggcaaataaatgtgtcagactaatgggttcagcacccacatccaatgactcatgcagccacacatgcaatgacaaagccatagaaggagaatcctactgcctgtcagccactgagccacagggtggaactatgccagtagt

SEQ ID NO: 11727 - DNA, 678 bp, Homo sapiens
  misc_feature 1, 2, 3, 4, 674, 675, 676, 677, 678: n = A,T,C or G
nnnnatcataaccacaacatgttgatactgctttaacatgcattttttcttttcttaaaatttaatgttattgaattttaagttccaggatacatgtgcaggacatgcagttttgttacataggtttacatccattcccaatgcattttcacatctaacttctcatttaatctttaccaccgccacccataaaagaggtaatattactaccttcacttggcaaatgaggggaccaaatctcttgtctgcgactttcactcagtcactcattcaatcaattattaagcccctacacttgccaggcacttgcccaagtcatgggatgcagccaagtactacgccagatgctgtttacacatagagttttgagctgtttctcaaggaggggcattggtggcatttgggcagaatgattctttgatgggcagaaaggtcccacccttcgcagaatgtctatcactaaactgcaatcattctcgccaatctttagggtggatgggaagagtaatgcccaaatgagagccctcccagatgttcagagcagcggatatgaagtcatacagccgggtttggtttttattccatccattcctctcctggggaccttagacaagtgataatgctctatgcttcagtttccccccttgtaaaatggtggtaattcccgcgttccnnnnn

SEQ ID NO: 11728 - DNA, 229 bp, Homo sapiens
accggagggatgcagcagtttgctccctgttctacttgaccttcctttaaatatttgaaaccagatatcagctcactaatccactttcccagcttgctcttgtctagctaaactgtcccaaggtccttcaacggttccttgtttaagtcgcttttcaggcctttcactacccgggttcactccagctgtgtagcaactctccccacaaaatggaaatgcgatagctagt

SEQ ID NO: 11729 - DNA, 546 bp, Homo sapiens
  misc_feature 546: n = A,T,C or G
actttcaaagactttagaaccaaatgtcattcagctgaaaccataatgtattataaactacgtcttctagagctttgttgtcatagagtcaaatgagatgccaaatgctagcaatcctatttaggaggcctactattaggatttaaaagaagtggactgccagagatgaattatgtgacacagatgctaacatctagttattatgagtgatccattctgtcatgaggtagcacttgaaaaacaacctgggacaaaagaacaggcctctggcactactgaatttttggagagagaaacctttagaagttagcatgtggttctttctggacatgttcattgccttagttctccttttgcaaatattttgtaaatattcatgaagtgaaatgagatgtttgagaaggcagatctgcagatcccctaaagagcattgtcagttatgctgggctgttcctaccctatccctctgtttacctgcggcggcctctcagagcgtgatcgtggtggctttgtggtggttttaaatgtaatcgtgagaagctagcn

SEQ ID NO: 11730 - DNA, 474 bp, Homo sapiens
  misc_feature 473, 474: n = A,T,C or G
acagggctggatccttcccagccagggtgcctgggattattggctttcagcagccgactcacggaggcctcctttgggctaggcactgggacagacccctgcctccccaaaggcatgagaccctggcctgccatttgggagctcagagcctggctagaggcaggagaggtgaggagggaagataaggacacagatggtgaatgtggtgagaaaggaagcatgagggggtgggcatggtgcatgggagaacagaggaggcgatggaggagtccaggaagccttcctgggaggcggtcgcctgagctgagcctcaaggagtatgagcagcttctcaacaggagaagagagtggagagcactttgggcagaaagttacaggcagagggagcattccaggcagagggagcattccaggcagaaggagcactgcaaggagagggtgcactcaagaagcaagggcactcagagagagann

SEQ ID NO: 11731 - DNA, 239 bp, Homo sapiens
acttaataaattactgttattattaataactcaccattattagttcaaatgaatgaacttatccaaagtttcaaagagtctacacaaaaatatttgctttcatgtgcttgagtaaagaatttagtatctaagaagcataacacctttaacgtttaaaacaatggttaatataatttataggaaaaattttttaatattctgttaaaaacagcaataaaagaaagaagatgccgggcgca

SEQ ID NO: 11732 - DNA, 518 bp, Homo sapiens
  misc_feature 518: n = A,T,C or G
accaccttggttgagaactcctgactaaaagaaggcagggcagagcagggtatgccattgatgttgattcctagcatccaagaaccacatctgggcatttgtctgaaggaagaaattgggaagtttccatgataaaagctccagtggaaattgtagaccttgggaatgaatatgctaaactgaggttctcaaccaagggccagatcacaacttcagaggcctgaggcagacgtgtattttggaaaagcttcccaggtgattctgattcaggtccctccctcagtgagtcataagactgaacaggaagacaagaaaagttgccccataatgatggctcatggttatggccttatgatggggatatagctgaggcagcacacaccttggagctgggctataggcagagctcttattttagatggtggcagaagacaccacacacaatatgaaggcagaagagcaaaggtcactgagaggccatgttttgcccttcagtgttgccaggtcctgctgtgtgn

SEQ ID NO: 11733 - DNA, 645 bp, Homo sapiens
  misc_feature 506, 644, 645: n = A,T,C or G
acagggtttactcagtcctgttgtgtaataggaagcaggaaagggcaagggccctgggaacaacctcagccctgccacttactggtcatgtaaccccgagcaaaatgaccacctctgagccccagtctcctcttctgtaaatgggtataccaccacctactcataggctgcgtgatgagaaatggaataatgtcagggagtgcctggcatgacgctggcaccctggaggctccccaggaacggtggctactgccttcagaaaaactgaatctacttcaacttattttacgtaggccaaagcatccagtcagtgagtaaatcaagctgcaagattcatttctacttaacttttaggaggagtcatcccatgatacctcgaataggtctcaaagcacatgcatgatataaatgattcactgatatgactctggtcagatgtatgttcttatgaaaaacctaagttcagggtttacctaacatacatggggatactcatcttccacctnccaaagcttccaaatcaaggccagagacttccggtcatcatcactatttttgggccatatatctggcttccgtgggtaaactgctgcctggctggatgggggagtgagatagcccataaccctatacatggatgggcnn

SEQ ID NO: 11734 - DNA, 935 bp, Homo sapiens
  misc_feature 781, 823, 850, 924, 932, 933, 934, 935: n = A,T,C or G
acgcggggtcactggactgaaagttccctaaggccaaaggccattcctctttggctttcagtagtatgccctggcattttctgcaaacttaccacttgatgggtgctaaaatatgttttaaactgagtattgcacccaacggatgaaaattttctaaaagtgcttctatcaagaattaggaaaccaaagtatagaaataaatgaagctgataagcataagtttgtgatgctaaataaaattacactgaagtcctagccacagattggcaaggacagttttgtgggggcagccccacatgccatagtcctctgcagggagccataacttaacatccccatgtttaaattttaaattatatacccagccccttgttttgtccattaccagttgagaagtgaggtaattcattctcctttctactgcttctgcccatggtgagaacagaacttccatatacatcttctctgcccagctggagggggctgatggaggacacagcttctgtcatccagcgcctcccctgggagtctctttactgattggtcttcatttgatctacattaggtcacatttactgatggatggaataaactgctttaacagaatcatggtctccaagtttcacttcaccttctgtcctcaggtgtggcaggtgccctggccagagcctgctattctctccggcttcctgtttctttgtgtcttttatctactgttctgaaaaagtgaatgggagtcggggagatggggaatttaaagtaaggaggcccggctgggatngggtgggctcatgcgtgttaatcccagcactttgggaagggntgaggtggggcagattcacctgaggtncagggagttttgaggaccagcttgggccaacagggtgaaaattccgtttctattaaaattacaaaatttggccnggtttagnnnn

SEQ ID NO: 11735 - DNA, 1650 bp, Homo sapiens
  misc_feature 1, 2, 3, 4, 1633, 1634, 1635, 1636, 1637, 1638, 1639, 1640,1641, 1642, 1643, 1644, 1645, 1646, 1647, 1648, 1649, 1650: n = A,T,C or G
nnnnattataggcttaagccactgtgaccggctgcttttttcctagaatatatagtttgggtttcttttccactcgtgatgtgatttaaaaaattgaacctgttgtatatgaatgtggttttgtaaactataatatttggtatcatatactatatttttttctatatatatatatgctactatatagtcatatagtagcatttttttttatagctttctttggagttcttggtcttagtgtctaaaatagtggccataaaggaatttggaagttaagttgttcttgctgacccaaagaaaaatcagatgtttctgtttaggacactgtatgtgacaaacaaggaagtttttattaatttatttttttgaagaagaattgatgagagaataatgagaattcctccaagattaaaagtaaattataagatcctgtgctattttaatgtaagccaacatttgaatttaatttgacttctattttcagtaaattagagtgaaattttagggatgtctttatctcctatagtgtgtgttttgccaagatttattaagggtaattttggattttagaaaatgtacagtttctaaaggcttgtgaacgttttatattgatagaaaatgtaagtaagactagtaacacattattttctccaaaggatcctgtgactgacacaaaaaatatgatataatattgaatctgccaaaagatgcactgttaatctagggttatgttatgttgttattttattaggtatgtgatactatggtgtgaattttagaatataggtaattatttaagtaattactgtaattctaaacatcttctgagatgttttctctaaagcagaaactcagcttttactcatgtttagataatgtgatatagctgttctagatatttgagattagggttgaggcaaattgttgacatataattaaaatgtattttataactaaaatttagaagaatggaaaaagtttacattgtatttataagactttgctaacatgctttatgacattacggagaagtactaggaagaaggagatctttaaaaggagtgatattctgtttgctttgctggagtaccttatcaggaaatttgaaatcttagccctttaattgtgatatctgttaattctaaaacttacactgaatttaactttgaaggtcaacatatggatttttttaaaaacaatatttactctatcaaaagattagttgtatttttgacttgaggaaatagcttaatctgaacagcacgaaacttgacaaaaaagtttgctaatacataaatattggctattttaatctgttgaaaacggaaggctagtaccaagggagacggtagtaaaattatagaaggagctagtgaaaagtaaacattatgcaacatgaaaagaatactaggggaaaaactgacagagtagaataacaggaagattagtcacttctggaaggaaaaaagtaggtaggggcagggggatgaagtactttaaacaggaatgtggaactggaagtgctagggctaaaagacagatgtgagcttatttgggagctaaactgggctttgaaaaaggaataatactggtagcatttaatatcaaaatttaaattttatgttaacagtannnnnnnnnnnnnnnnnn

SEQ ID NO: 11736 - DNA, 292 bp, Homo sapiens
  misc_feature 1: n = A,T,C or G
nagctcacaccgcggcggcggccgcccgggcaggtacttggcacatctggaaaatgacggagtctttcaaaaatactgctgggaagatgacctgttttcactctctctctaggcaggttcacatcaccagatgatgctggatatggctccactccaaggaaaacaaccttttcttggtctttcaatggctgtttatgagtatacaacaagtgctttctatatactgcaaactcgttagacagacaagtccctctgtcaatcccactctacagtgcatatgcttctgtgtggt

SEQ ID NO: 11737 - DNA, 540 bp, Homo sapiens
  misc_feature 530, 531, 532, 533, 534, 535, 536, 537, 538, 539, 540: n = A,T,C or G
actaggcccatggtagacagtcaacaaatatttgtccaactacttaagagaagataaattatttttctaaatacaactttatctatgctcttgctttcataaacaatacctcctaagagcagagattaatatgagtagctgaagtcaatttaatatagtggagttaactgctctgactggatgttatctatcaatcaacaatcataaattgagcatcaactatatattcagcatgaatatcctcatcaatatctatgtatgtatgtatgtatgtatgtatgtatgtatctatctatctatctatctatctatctatctatctatctaatccatccatccatccacactctgaagatgctatatatagaggccatgggaaatacagaagtctatctatggcagggccctgccctcaaggaaatggtgggggtccaacagtattcactgttgtagaaggtacctgcccgggcgggcggccgggcaggtacttgcccaaccaactaacccatctgatcagaaagttcacagcnnnnnnnnnnn

SEQ ID NO: 11738 - DNA, 669 bp, Homo sapiens
  misc_feature 669: n = A,T,C or G
actgagtaagaagcccatttggtttgtgtctgggaggatgggcagtgaggatgagtgaggatgagtttaatttagcttggtgagagggggacaaatccaccttttcacgagagctgtttctcatcgctttttgtcccccttcatccacaacccccgcagccaaggcagtgtcagtaaattttgggatggaaaagccttaggtaggattcttatgttttcgaaatgtgactgattggaattgggggaaagctgtattaaaattggatatgtggtaaaagctggatatgtggttattacccatatccagtagtgggtcatgttcctgtgctaccatgatctgcccgcagtaacctagcaagacatcaaatcacagtgtgcagtagatggtaccgttgaacaagccaagccatattgtctgcagggatctgagatgataaagagattattacagaatttgttttcataaggaactgtgtaattatgatgattagccaaagaaataagaaagaaagaaagagagaaaaagaaagaaaagaaaagaaagaaaaaggaaaaaggaaagacgaaagaaaagaaagaaagagaaagaaaagaaagaaagagaaataaagaaagaaagagagagagagagaaagacagcctggtctgttacctatgctgtcctactan

SEQ ID NO: 11739 - DNA, 434 bp, Homo sapiens
  misc_feature 398, 434: n = A,T,C or G
acaaggctgccctttcagaacaaacccaggacgttcattataaaatagcgaactggccttccagcacttgatgggaatgctgaataatgaaaatgtggtgtgaaatgtctcgaatatttatattttacataacaagagcagggattccaataggctttgaattttagagaaattacaatgagtaattttagttcctgagattttagaatatgatgctagtttgtaagcagggcaaaaggcaaaagtctcccagaagcaactataatgtgtttgaattataataaaagatttagtgtccgaaaaccattttttcaaagccaggaataggccaggtacgatggctcatgcctataatcccagtgctttgggaggctgaggtgggaaggaaagtgcttgangcccaggagtttcagttgccaggcctgggccaacan

SEQ ID NO: 11740 - DNA, 365 bp, Homo sapiens
actgtgctcagaaatgtgaccagcaatgtaaaccgacagaaccaatggctttttagaaaataacaaagtatttccgatccttttttaagtagagaattttctcccagcacatcctatttccaattgtgtgcaaaaaaccttccagcttacaaatgttaattcgggggttggcaaataaaggcccagaggccaaatctggcccaccacctgctcagtctgcaagctaaggatgttttcttacatttttaaatggttggggagaaatagaaagagtatttttgaatatgtgaaaattacatgaaaaatcagtgttcagtgtcaatgtttctttggtatacagccacacccattcattcacgtattgt

SEQ ID NO: 11741 - DNA, 383 bp, Homo sapiens
  misc_feature 382, 383: n = A,T,C or G
acaaaactttctaaacatcctgttttccctcaagacagggcactgttcttaataaactgaacattcttttgcactggccctggggcaagggtgtcccaaaagctttgacaggggtgccatttggcataaacagtgtggtaatagggtggagtcagaaagaaattctctcatcccttttacaactccaggcaattctagaaccaacccttgggaacccagggaaagaactctgaaatgatacgctggctgaagtttgccgtggccacacctcagggttaagcattgaaggagctaggcaaagaatgtgtgtgtttagctacagactaagtcacagaataagagggttttggtattcttccatttttgcttagaattctatgann

SEQ ID NO: 11742 - DNA, 541 bp, Homo sapiens
  misc_feature 540, 541: n = A,T,C or G
actgagatcctcttcccaaaccaatcaaaggcccatttattgagaggtaaccagataaaataaaatggttgtaaaccaaacactccctggtggttcctcgtaggaagccatgcttccccagcttcaagcctttctatgaattctatccaaaacagggttggatcagattcttactgagatcctacttgacttaatccttggcttggggttactagggaattaagacatattcaaaggaaaagaaaaggaaaaaataagcagctggagtttgtgtgcttgggtatgcttctatgtatgtatacacaatagtttaagcctggctaagacttttatgattcatgtcatttcttgtatacagacttcatctcagttcttagtggtttttcagtaacaaggtatttgcttagcacggaaaataagtgtttctacctgtgattgccagactggtgttggtctctctgcaaagcacatttgctcatcaagaactcacgccctctaaataggacagagcaacaagtattggcatgcagacaaaaaccnn

SEQ ID NO: 11743 - DNA, 595 bp, Homo sapiens
  misc_feature 595: n = A,T,C or G
accctgatcatatcaagggccccattttaaaaggagacattctgatgaatcaaaagaaagatatactaggagcaaaaaaatgttttgaaaggattttggagatggatccaagcaatgtgcaaggaaaacacaatctttgtgttgtttattttgaagaaaaagacttattaaaagctgaaagatgccttcttgaaacactggcattagcaccacatgaagaatatattcagcgccatttgaatatagtcagggataagatttcctcatctagttttatagagccaatattcccaaccagtaagatttcaagtgtggaaggaaagaaaattccaactgaaagtgtaaaagaaattagaggtgaatccagacaaacacaaatagtaaaaacaagtgataataaaagtcagtctaaatccaacaaacaattaggaaaaaatggagacgaagagacaccccacaaaacaaccaaagaaaaatactattataaaaatagtgttcttttctgctttcaaaagactacgaagacgattgaacgtactttaactggtgaataccattcatatttatcgtgacaatggtatcaaagaacatcagn

SEQ ID NO: 11744 - DNA, 428 bp, Homo sapiens
actttgaaacattcctggcaggcaatgtgtccaagagggagaatctgagacccactttcctgaggtcatccaatcccctcccatcttatcaggggtatggtatggcagctgtggcagagggatggaggagaggagacaccagagggaaaaaaaaaacgcaaatcctgttcacccaggaggtcaacattggaaggaatacagaggagaaagcaccaggagggtgtaccaggcataccccgagatgaacaggggtttgggcgaagttggatgtgcaaacaactcaaccccaccatgacatgaaggaggccaccgtgtgagcacagggcctggaacaatgggtgtaatgagttactgccacgtcagagaaattggttgctcctgttgatatggatcgactgtgtccccacccaaatctcatcttgaattgt

SEQ ID NO: 11745 - DNA, 475 bp, Homo sapiens
  misc_feature 463, 464, 465, 466, 467, 468, 469, 470, 471, 472, 473, 474,475: n = A,T,C or G
acaaaatactttcatcaagaaccaaacgttttatttcctatttagctgaagaattaatacttttacagaagcaatgagtgagcacaaaaagcttattttcccattctccatgttctctcctgaaacaatgatccaagtgtatttagaacaaagaatcctaccttcaaatgagtgtagaccctctacaggggtatctaccacgttccttcatgtccccaaaatagctcatagaccttgctagaagagagtgatgtgattttccttacctaccaccaaaatgaaagagagagagacagagagagaaaaaaaaaaaaaccctccgaaccaaaaaacccccctaaatccccctttggtggcgggcccccaccccctcttaactaaaacgtgacctaaggggtccccaaactgacctgtagtataaaccacagttcagttctttggtgggcaaaatcaaaaggggagnnnnnnnnnnnnn

SEQ ID NO: 11746 - DNA, 2394 bp, Homo sapiens
  misc_feature 1, 505, 506, 507, 508, 509, 510, 511, 512, 513, 514, 515,516, 517, 518, 519, 520, 521, 522, 523, 524, 525, 526, 527,528, 529, 530, 531, 532, 533, 534, 535, 536, 537, 538, 539,540, 541, 542, 543, 544, 545, 546, 547, 548, 549, 550: n = A,T,C or G
  misc_feature 551, 552, 833, 2381, 2382, 2383, 2384, 2385, 2386, 2387,2388, 2389, 2390, 2391, 2392, 2393, 2394: n = A,T,C or G
ngtccattacagaagtaacgtatttattgtagaaatgtaatagataaaaatgaaataattattcatattctcactattccacaaatgtctgtgattaacagattcattgtcaactttagttctcattctgcacatatgtaagttatgtttgtatctaatgtgaaaattgtaatacagtcatcccctcaaatatgtttagggaattggttccccaggaccccccatgggtacccaaaatctgtgaatgctcagctctctgatatgtagaatggtgtagtatttgcatgtaacctatgcacatcctcctgtatactttaaataatctctagatttcttataatacttaatacaatgtaaatagttgttttattgggccaggcacggtggctcacacctgtaatcccagcactttgggaaatcaaggcaggaggattgcttaaacccaggagttagagaccagactggacaatatagcgagacctcatttctactcccccccaaaatnnnnnnnnnnnnnnnnnnnnnnnnnnnnnnnnnnnnnnnnnnnnnnnngcaaactatattaaaaaaacggtcatgctgcatggttttttatttgtgttatttttattgttgtaatgttactttattttctaatattttctgtttgcggttggttgaatcctcagctgtggaacctacagatacagaaccacagatttggagggccacattgtatatgtactattttgtgacttattttgaatatttctgcatcattaagtattcattattttttctagactataacttgctttgtctactgtgtaaatatgccatgatttatttgtagntaattttttacagttaataacactaggatgaactgttagcctattagccaatctttgactatctctggcttgaaacagcatatcacttatatttgtttggagtagatagagcaaaaagtaaagaaatgattattattaaataggacatatcccatttatcagcagatggttacagtagttcagactcttttacttctgacccagaacagatcgggagcaatgtaactcgtcaaaggtcagtatttctgtcaatgaaaagcatgttaaactatcttgctgcgttttaatgtttaaaactatttagaaccaagcacaaatgattttgttctctgaaagctgttaggttactttttgatttatgtaaaagacaagtaattttgatcctttccaacttgaatagaaaaacaaaaagaaccctgactttctaaatggtatgttgtggaagctctaaaaagaggtgataacttcttgacgatagaagttttataagtcctttttgtacctaaacaacgagaatctgtcaagtaatacatgtatagccttatggtaagtaccaaaagaattctgtgttttaaaacaccatccaaaagcacagcccagtggtgggccacctccccaccctgaagttctgcgttacatataacctttcaggcacaaacaagaagggtgtgggatagggtggaggaggctagagatttgtctgcaagggctttaccatccactaaaagctgtgtgcaggacagaagcatctttctctcctcactttttgcacgtgttgagtatcattttgctgtgtgcccagtggatgtagcgaggatgcagaatctccaagcagcttagagtcagaaggctgcttgtcttcctttctgattcttcatgtagttcttcctgtgtttcttagcattctcagtcatcttggattttactctgctgtttattcccatatatgcagatcagattaccagagtccttggagactcttttcagaatatgaaagactttggtagcaaagaagtgaatctctagggcgagttgagtttgagcatagtcacctctaaaatgagatggcctctgcggacacatgaaagggtacttcagcttaccaaaatccagaacttaataggttgaaagctaaccatatctgaaagtagactttcctttatacaattattttttttcagactattattacttttaattgaatgggaaagcgtaacactaagtatgcagtctattatgaaatcatgttgacaactaagtttcttttcaaaatttttgaggccgagcacttctgtaatcctagcactttgggaggctaaggtgggcggatcacctgaagtcaggagttcgagaccagcctggccaacatggtgaaactccgtctctactaaaaatacaaaaattagccgggcatggtagcatgcgcctgtaatcccagttacttgggaggctgaagcaggagaatcgcttgaacccaggaggcggaggttgcagtgagccaaaatggtgtcactgcactccagcctgggcaacagagtgagactgtcnnnnnnnnnnnnnn

SEQ ID NO: 11747 - DNA, 153 bp, Homo sapiens
actgggggtcaagacttcagcattcttttgcgggggaccacaatcagtgacaccctgactcgcaagcctcaatcacctgttccagtgagaaacaggactgagatcagaaggaatgaggcagagctgccctcgattggttctcctctcctcctc

SEQ ID NO: 11748 - DNA, 820 bp, Homo sapiens
acctcacaatttaaaaaaacggggaaaaatagacatctgacaaaaataaaaataaaagaccaagaacacatgagctggaatgattaatatgttaaaccatgtgccaaactcaatggtgaatgtgaatgtgtattttaatcccctgagctagccagaataagaaaacttttctaaacacatggacaacttctattttaaaagattcaggggaagtctaaaaaagatatgaaagtttaaaagatataatttttttttaaaaaaatcaatagaatcatcatagttgatcagagtaggcatctgacccttagagaaaaaaaacaaaacaaaaatgtcaactctagagttggagtaagccctgacagtccccttcctgtatttaggtagataaaccactatccccacgccatgaatgaagcagaagcgctcagagtggactgcaccatccaagactgggagacactgggtagaacagcgagaaatcatgacgacttctttcccaggtgggggaaagccagagaaacgcaagctacccatgcactgcctgctccacgcatcccaagaaccctgcggatgggctgtttcagcacgtgctgctaatcaccatgcagactgctgtgcctggatgttcgcctgacacaaagtactggtgcctgacacgtgtgcatcctgtaacactttcctttgtgattaaaaaagagggaagcatttgaaaaacttttttttttttgagatggagtctcagactgtcgcccgagctggagtgcagtggcgtgatctcggctcattgcaacctcagcctcccgggttcaagcaattctcc

SEQ ID NO: 11749 - DNA, 529 bp, Homo sapiens
  misc_feature 529: n = A,T,C or G
acataaatcaggggtcttgagaccatctttcttcccctggactgaaggaactcaaagctattttctcctgggattcacaggaacaagctctgaacagttgggtgccattgtggtctgtagacttttacagaaaaagctctaccagactgttgccttgaaactgttaatctgtttgtcattagtcattccacctggctggtggttttaaaacactaaatagtcgttggaaagttaggtagatttcattaaagcaagacttgaaaaatagttgcttcaggatccccaggaggcttttgcacttggggttggggtgaggaatggatattcataagttcagtgttgatattctgctgcttttggggaggggtagggagagagagggagcattaagctctccagactcctggtgtttgggcaggtctaggtctggtttgggcagttggttgtaatctgagtgcctggacttgcccggtaagttttgctgaaagagaagcaaatgttcctgagactggaagaggaaaagctgcgn

SEQ ID NO: 11750 - DNA, 241 bp, Homo sapiens
aggtacgcgggactaattttttttttcttctacttagaataaaattcatgtagtgcagtatccagagcacattaactgaagtatttggagactagatttaatctcagatctcacccttggtaaaatcattaagcttctgagcatcagtagtctcaaacttttcatgagaggggtaagtgtagttttcaaaggacagaaggaggaagactacagtttcttgagcttctccgatgtcgtaggt

SEQ ID NO: 11751 - DNA, 686 bp, Homo sapiens
  misc_feature 535, 554, 685, 686: n = A,T,C or G
actttttttttttttttttttttttttggagagacggggtttcaccatcttggccagactggtcttgaactcttgacctcgtgatccaccctcctcggcctcccaaagtgctggcgattacaggcgtgagccacataacagcagttctcaccaagcatctgacagccgaaaaactgaaagcattagagaatgctacaggacaggctttggcttagtagtgagttctgagttcaagctgaggctctgcacttattagctagaactttgcttaatctctcacaggtctcctctaaatgattaaatggcgtaacggaggtaagcggattagcacaattcccggcaaacagtaagcactcaattgttactactgaattgccagttcacaggcacaaccaaccgatctctctcatctcctggttcctctgttgccaacttcctcgttgaggtccaacaggatacctgtggggtaatgtgtcccagatgatatcccagtcctgacaccaagacaaaggcaccaaccaaaaatggcgacctnaaagccatccgagggcgtnaattacccgtcatgctaccgatagataaataagcagcgtcgggaagaaaagctagtgaaggattcttaacgccgggttggaatacgcagagctcgctcatgctgccactcaaccacaagcagttaaaagcnn

SEQ ID NO: 11752 - DNA, 531 bp, Homo sapiens
  misc_feature 528, 529, 530, 531: n = A,T,C or G
actaaaaatatagcaatgtgggtgggctccaaggactgttccttcagacctcaaatccacatgcttatagaagaccacataggtcagagcaaactctctacacctgtctttgtcaactgtcacccagttgaagatctctgaagctgcatgccgatttaggccaacaatcagactatgtagcatttacatttacatttgtctgtgtgtgataacatgaagccagaaggaaggaaaatttgtggctgctggtttccctgacaagcagtttgaaggtcaaaagaaaccaaccctggaggaactcgagttatgacagagcaatgttaagtgtagacctaggagggaagcctatagggctaggataggggtgctaacagataaagtggcaaagcaagagaagaagggaaagacggcagatgaggaaaggtgccctatccatagcaggatgcaatgcaaagacaaatctaaggtttctgtttcttcaccactcctggcctaggtctggctttgctatttcctagcagtgtgacnnnn

SEQ ID NO: 11753 - DNA, 545 bp, Homo sapiens
  misc_feature 533, 534, 535, 536, 537, 538, 539, 540, 541, 542, 543, 544,545: n = A,T,C or G
acaggcaactgagaatcagaatccacccatggtaacagcaaaagcagcaacatctaaacgtcgctgctaacgtttacctctgatgaagttgtcaaagtcatcctgccagaaaccccaaaagtttgaattactaatgtggcgtaactcacacatgaagcaaaatgggagaaaatatcagttatttgagcatggaaactgctgtatttgtatatactcagctcaaccaatgctttctgataatcagaggaggtgagaagtaacttagagaagcacagttcaagccaacacactgaacctttatcacacctgccagaaagcattaggtagatacatgtaagggtgactgtggagctcatggacaggaactcctcaatctgcggaaacccatcaagacgagagaaagaccacagacgtattgagggttgggaaaatccaagaggaagcaacggacagaagaaaagaagaaatggaaataaagtttctgatttccttgtgctgttcaagttcataaaatggactggttctcatcggcnnnnnnnnnnnnn

SEQ ID NO: 11754 - DNA, 572 bp, Homo sapiens
  misc_feature 571, 572: n = A,T,C or G
acgcgggatatattcaaggtatacgatgtgatgctaggtggggatgtagggtttgggagagaggagacagcattgcttagatcagtcacgttcagagacctctttacataatctttacttccatcacaggtgcagataggtggcttcagttcatatctcttcaggaatacacacacaaactggtggagaagagcaaaggcatgctgagctggagcccagagcaaggccagactcactgtccagctcttttctcctttactcagagaggtctaagagaggtgtggctctttcatgattgggcagaatgataaatgttcagatgccatggactttcagtatggttcacaaagagtggaaaccacaaatgataatctgtgaattccaagctactgtattatatggatatatgaatatagtttatgaatatatattaaacaaaaataggatcatacaatgatgatgttttacagctggctctttctcaattaacagtatctttccatgtcagcacatacagacctaacttttttttaagtattccattatatagatataccacaacctctaaacnn

SEQ ID NO: 11755 - DNA, 854 bp, Homo sapiens
  misc_feature 854: n = A,T,C or G
acacggggggctgttgccatggatacgctttgtgtagcggctatgggcgctgtcttacaacaaagccaaggaatctcgctgctgagggcagttctgtgctttattatgaagaataatggacgatgatgatgcaaagctcaaagcagaaatagaagctgaattggataaactcagcatttcctccttggaaaaagaagacaatgagagtgatgcaaaatcagaaacccagagtgatgatagtgatacagattcagttgaattaccagaatcagttcttcactgtattaacatcataaagaacaggagtaaagctgttgaagagctcattcttcaggacctggaagatactgatattttaagctgtagttatggagcagtttctaataatcatatgcatttaagaacaggactatcaactgaatatgaagaaagttcagagcaattaattaagatattatctgaaatagaaaaagaagaatttatgagaagtaaaaccgattgtgccactcctgattttgttcctgagcctagtcctcatgacttgcctatggatgaacatgttttaccagatgatgctgatataaattttggatactgtgaagtggaagaaaaatgtagacagtcttttgaggcttggcaagagaaacagaaggaattagaagataaagagaaacaaactctcaaagctcagagggatagagaagaaaaacaatttcaagaagaagaagaaaagcgacattgctggatgaaacaatttaaagttgaaaagaagaaattagagaacattcagaaggagtatattagaaacttgcatttacaaatggaagaagaaagaacaagatttagtgaccaan

SEQ ID NO: 11756 - DNA, 2080 bp, Homo sapiens
  misc_feature 2075, 2076, 2077, 2078, 2079, 2080: n = A,T,C or G
acaaggtctgaggagaaggttgaggtctccccaagacttctctagaacacttggtgagaggcgccatgaggacaggtgatgcttgggcttatagctctgactcaggacatcactgctcaacagcctgaagcccacatccaaagctcatgtcatgctggcaattgaaggggtagcagagcccaaaagtccagaggggctcatcacagggagcagatgtctgtgagcaggagagacagcggctgtagggatcgatgagacttggtaagcatgatgtgctcttgtcagcatagcatctttgagctcacacaataattgatgtataattgtccatttcagtaaggagtttccacatccactatcttacacgattctcacaagggccttgagtaaatattacctgcatgttatgggtgagaaaggggtagtttagagagctgaaaggatttggtgaaggccagactgaggctgaggctggggaacatcgggcagcatgagcggctgcgggctcttcctgcgcaccacggctgcggctcgtgcctgccggggtctggtggtctctaccgcgaaccggcggctactgcgcaccagcccgcctgtacgagctttcgccaaagagcttttcctagggccaaatcccgaagaaggttaagttagcccagatgaacttaatgaaatcaatcagttcttgggacccgtggaaaaattcttcactgaagaggtggactcccgaaaaattgaccaggaacgggaaaatcccagatgaaactttggagaaacttgaagagcctagggctttttgggctgcaaagtcccagaagaatatggtggcctgggcttctcccaacaccatgtactcaagactaggggagatcatcagcatggatgggtccatcactgtgaccctggcagcgcaccaggctatttggcctcaaggggatcatcttggctggcactgaggagcagaaagccaaatacttgcctaaactggcgtccggggagcacattgcagccttctgcctcacggagccagccagtgggagcgatgcagctcaatccggagcagagccacacattaagtgaagacacagaaggcactacatcctcaatggctcccaggtctgggttactaatggaggactggccaatattttttactgtgtttgcaaagactgaggtcgttgattctgatgggtcagcgaaagaccaaatccccgcgttcctagtggaaagagacttggggggggtccctaatgggaaccccggataaattaggcttcggggcccccacacttgtgtgggtccatttggagagcccccggatacctgtggggaacatcctgggggaggtcggccctgggttggaggtggcgcatgaacatcctcaacagcggccggttcagcatgggcagcgtcgtggctgggctgctcaagagattgattgaaatgactgctgagtacgcctgcacaaggaaacagtttaacaagaggctcagtgaatttggattgattcaggagaaatttgcactgatggctcagaaggcttacgtcatggagagtatgacctacctcacagcagggatgctggaccaacctggctttcccgactgctccatcgaggcagccatggtgaaggtgttcagctccgaggccgcctggcagtgtgtgagtgaggcgctgcagatcctcgggggcttgggctacacaagggactatccgtacgagcgcatactggtgacacccgatcctcctcatcttcgagggaaccaatgagattctccggatgtacatcgccctgacgggtctgcagcatggcggcgatcctgactaccaggatccatgagcttaacaggcaagtgagcacagtcatggtaccgttggcggaggttccgggactcctgggcgacttgtggcctgggggttgcggcacctggggttgtgcccctttttgcggccgtgcacccgttgggggaaccctctgttccgccggccggggaactgtgtccttgggcacatgggggccgtgtgggggggccccccaccgtggtggccggggggcgccccccttttgccccagnnnnnn

SEQ ID NO: 11757 - DNA, 612 bp, Homo sapiens
acagatcaataagcaatctgcactacttcgcagagcattgcgtatttatgagcatggtgaggaggttatataggatttgggaaggagggactccaaaccacaaaggtaaatggttgggcctgcactgcacattaagcttgctgtggtttttctgctgatgggacccatgaatgtagttttcctcctttggtggttttaatgctgaatgtgtaaaaccctaggcagattgtgtaacatcccccaggcccagctgctggtcctgcccattaaaggggaacttcaaggcccgattccttggctggcagctgcactgtggagggcatcccaggagaagttgttgggaaagggtggtgttgctttgtaagtcggttcagtttttgtaaagcaagtcaggaagccccagtgaccttttttgagcttatactggagcaattccagttcctttttttcttccaacttacctgtgaaaaggcagggctggaatcctatgttggccaagccatttctccagggctttgaaggtgacagacccctggagccttcctgtgagcccacagctgggcctggcagcctttctgccctttccagtaaaggaatgcagtaaacctgtgt

SEQ ID NO: 11758 - DNA, 545 bp, Homo sapiens
  misc_feature 545: n = A,T,C or G
ccgcccgggcaggtacatgttatctgcccttggctgtatttaaaagctcaatttatcaaacaaggagagagataaaaaggagtaaaatattttgtttggataaagctctgtcactgaatgtctttgaacccaaagaagacaccagaaagtctccaaacctctaattcatctgtaaactgggaactcatactaagtcatgctgactgtaggaataaaaagatgaagaggaagggggggctcactagcaatatcaggcactacccagaattagtgccagttgatccctggtcagggtgcataggcttggagaagagtaaatttgcagggcataatggaccatgctctgagatgcaattttcttaaacttaattggctctggatgagtgcattccaatgtgacggaggaggtatttgcttcctgggaaggttttctttcacaacaggcaagaaaaattgctctttaaaatatacctcttcggggttgaaaaagacaaaatcctccatggcttaaaattctaaatggctagccatcatcaaaagtaccn

SEQ ID NO: 11759 - DNA, 578 bp, Homo sapiens
  misc_feature 1, 2, 3, 4, 5, 6, 7, 8, 573, 574, 575, 576, 577, 578: n = A,T,C or G
nnnnnnnncaggtacaaatctgtttgcatatttgacacatttgttggcttttatcttggggaccagcagaccaccccgcagatacaatgcacggaatctagcaaacaataaagagcagtgtgctcgcgtggcagatcgttcgcttccttcctttttcgccttcatttttgggaagtccttgcctcgttagttccataggccatgagacatagcaatataaaatgccagaggatgttcaaatgggcgtgtggaggaagagggaaagcacgaattctgggccaaagagcagatggccagccagtgacctatgaagggaagctcatgcttttaaacaatggcaatgtttcttttatgtgcagttttcattaaggagcaccgagactccaagttggaggattctgaaagtggtcatagaggccctgccctcgagatttaatatccaaagaggaaacagtggttttaatataatgaatatatgcagaaaacagccggagacaatagagaccctttggcacatttcgcggcgctgctaaaatgtgtgctgtagctaaaagcccatttggaaaacttcannnnnn

SEQ ID NO: 11760 - DNA, 2649 bp, Homo sapiens
  misc_feature 1, 2634, 2635, 2636, 2637, 2638, 2639, 2640, 2641, 2642,2643, 2644, 2645, 2646, 2647, 2648, 2649: n = A,T,C or G
nctgaagctccaccgcggtggcggccgctctagaactagtggatcccccgggctgcaggaattcggcacgagaaaatcccacagtggaaactcttaagcctctgcgaagtaaatcattcttgtgaatgtgacacacgatctctccagtttccatatgttgagattctacttattcatcagtttgttgtgcttgtcaagatcagacgcagaagaaacatgtccttcattcaccaggctgagctttcacagtgcagtggttggtacgggactaaatgtgaggctgatgctctacacaaggaaaaacctgacctgcgcacaaaccatcaactcctcagcttttgggaacttgaatgtgaccaagaaaaccaccttcattgtccatggattcaggccaacaggctcccctcctgtttggatggatgacttagtaaagggtttgctctctgttgaagacatgaacgtagttgttgttgattggaatcgaggagctacaactttaatatatacccatgcctctagtaagaccagaaaagtagccatggtcttgaaggaatttattgaccagatgttggcagaaggagcttctcttgatgacatttacatgatcggagtaagtctaggagcccacatatctgggtttgttggagagatgtacgatggatggctggggagaattacaggcctcgaccctgcaggccctttattcaacgggaaacctcaccaagacagattagatcccagtgatgcgcagtttgttgatgtcatccattccgacactgatgcactgggctacaaggagccattaggaaacatagacttctacccaaatggaggattggatcaacctggctgccccaaaacaatattgggaggatttcagtattttaaatgtgaccaccagaggtctgtatacctgtacctgtcttccctgagagagagctgcaccatcactgcgtatccctgtgactcctaccaggattataggaatggcaagtgtgtcagctgcggcacgtcacaaaaagagtcctgtccccttctgggctattatgctgataattggaaagaccatctaagggggaaagatcctccaatgacgaaggcattctttgacacagctgaggagagcccattctgcatgtatcattactttgtggatattataacatggaacaagaatgtaagaagaggggacattaccatcaaattgagagacaaagctggaaacaccacagaatccaaaatcaatcatgaacccaccacatttcagaaatatcaccaagtgagtctacttgcaagatttaatcaagatctggataaagtggctgcaatttccttgatgttctctacaggatctctaataggcccaaggtacaagctcaggattctccgaatgaagttaaggtcccttgcccatccggagaggcctcagctgtgtcggtatgatcttgtcctgatggaaaacgttgaaacagtcttccaacctattctttgcccagagttgcagttgtaactgttgccaggacacatggccataaataatagaaagaaagctacaaccacaggctgtttgaaagcttcacctcacctttctgcaaagcagaaaaagtatgaaaaaaaccaaggcttttttcagtagcgtcctatggatgtcacattgtacatcaaacaaccttgtgattataaaacgatcctgggaaggagcccctaactagggcaagtcagaaatagccaggctcgcagcagcgcagcgctgtgtctgctgtgtcctggggcctcccttgttccgacctgtcaattctgctgcctgtcacgcgggtggttctgcccatcgcggctgcgggtcaagcatcttcaagggaaggacggactggaggcctcaccgtggactcaactctgcattctccgtgccacattcctccagttcccacacgtagaagggaacgaaactgacgtctacctcatggggctgctgtgtgggtttgggaggcaaaaatctatgaagggttttttgaaatcccataggtgccacatctatgagatgtttgataaatgtgaatatgcttttacatttgggcttatctaatttgcaataagagagcctctctctatcaacaccagcttctctctcgggctgtttgctcagggaaggcaagaaagccacgtgctggccctctgccttctctaaagtgctgttggagcatggaggagctggaggagatggggatggactgacagctaagagggcggctgctgggactagatagtggatgaagaaagaaggacgaggaagccgtggggcagcctcttcacatggggacaggggatggagcatgaggcaagggaaggaaaagcagagcttatttttcacctaaggtggagaaggatcactttacaggcaacgctcattttaagcaacccttaagaaatgtttatgtttctttattaccaatgtaatctatgattattgaaggaaatttagaaaatgcgtagatacaaaaaaaaaaaaaaaaacctcgagggggggcccggtacccaattcgccctataccggtggggggagcgggggcccgggggaaggggcctcggggcccgcggcacttttccccccgggggggccggatcgggacggccccnnnnnnnnnnnnnnnn

SEQ ID NO: 11761 - DNA, 1189 bp, Homo sapiens
  misc_feature 1, 22, 84, 1176, 1177, 1178, 1179, 1180, 1181, 1182, 1183,1184, 1185, 1186, 1187, 1188, 1189: n = A,T,C or G
nccaccacgcccagccaatttntgcatttccagcagagacagggttttgccacgttggccaggctggtctcaaactccccaccncaggtgatccacccacttcagcctcccaaattgccgggactacaggcatgagccaccatgcccagccagcaatacacttttctatagtaccagcaaagatggatgtatacacatacacgagtcaatttactgtaatcctgtttcattagtgaaacacagagaaagaaaaaacaagaaaccacatgactgtccatcaacagatgatggctcgactaaactatgaatcatccattttgtgaactgctgaaattttaactcgtttcaaactccgcagcaactgacctaaattgatatccgtacaccgagaaaaagtaaaaatgttacgaaagactatatagaggctattcactagtactaatagcatgatctcatttttataaaaacccaaaactatactgcatatatgcatatatctttcctaaagaagattaacgaggacacacaattttctatatatatcttttattttacactagcatcactttttgtttttattaaagagaattttaaagagaccagatatacacatatatatctgtttcgataacacaaagcaccttctaggcacgcaatatttagaaaagaaattctctgcgtattgtttcttgggaaggtaggaagggtaagcattgcagcagctatcctcaggtcaacctaggtgtgaatcctgacctcattgagtagcaagttctttagtctctaggagcctctgttccttcatctgtaaaatggggataatttctcccacctctcattagcctgttatgaggatttaatgtttacacctaacctgcaaatcagtcattactagcgttcttttattccaagctcattcctctcaaaaacaaagacagaaagaaggaaccaaaacttccctccctgtggtttccaagagctgcctggcagtgcctaaccatggctgtgctgcttcggaacgcagcaaaggttcagtggggactcctgttcagtgttcctggagctgccagcgtgagtcaaaggtgagctgaaaacgctggtggtcctcagttttcatgttgggagtttatcacaaccacaacaccaacattcagcttctcaactggaacatgcccnnnnnnnnnnnnnn

SEQ ID NO: 11762 - DNA, 487 bp, Homo sapiens
  misc_feature 1, 2, 482, 483, 484, 485, 486, 487: n = A,T,C or G
nntacagactagccttcatctagttcaggactcctaccatacccacacctttttacctactttctagtcacaaaataacttttcatcattctgagcacaccacgtccttccatgactccttgcctctgatgtcattctgaggcagggctgaaatgagagacaccagagtgagaccttgctttaatttattttgatgccaaagctaccaaattctattctaagagaagatcaggcatgtaacagtgtttttaaattgccggcagcaacccattagtggatcatggccatcatttaaaaacgctaatctgaagaatatcagcacatatcacacagagtgaggtcattactgctttatgaaacttctgttacatgaacatatatgtgatgaaaaaaacttatatgtcactaaaacaaaattggaaatacactgacatttataaaatgtattgaggaagagaaacttggcttaagtgtgtggagannnnnn

SEQ ID NO: 11763 - DNA, 357 bp, Homo sapiens
aatctcttaaaccgtaagagaatctcttaaaccaaaggctgcagtgagctatatggtgccattgtattccaacctgagtgacagagtgagatcctgtctctgaaaaaattttttaaattaaaaaagccaaggacatgaaacacaccattatccaaatgtattacccaaatatcttcaaatgctaagaagtaatttttggattaaaggtctcttcggagtctacatgcctacactctccttccattagtgtgaataatcaaaaactaaccggatttcaagtggaacatttaaactgacatcttctgatgttatttcatccaaattactttgagataaagaaatgttgcagacaattgt

SEQ ID NO: 11764 - DNA, 480 bp, Homo sapiens
  misc_feature 480: n = A,T,C or G
catagtatgataatcagtctccaaagcatcacatgataattccaatcataccattgacatgtcaaggtaattacattatgtatggttgtcacaaattatgaagtagtgtatgattataagcagatatggcaaatttgttcagtaaatccatagatgactacatcctcagaaatactcagataatactaaaaattatgccttagcataatttgcatgcaaaattgccctctagtgtttttgttttgttttgaggcatagtctcgctctgttcgcccaggctggagtgcaggggcacgatctctgctcactgcaagctctgcttcccgggttcaccccattctcctgcctcagcatcctgagtagctgggactacaggcacatgctgtcacacccggctactcttttgtatttagtagagatggggtttcaccacgttagccaggatggtctccatctcatgaccttgtgatccgtgcacgn

SEQ ID NO: 11765 - DNA, 1026 bp, Homo sapiens
  misc_feature 1, 2, 3, 4, 1024, 1025, 1026: n = A,T,C or G
nnnngcttgagacgcgcctggagctgctgtgaggagggtgtagtctgtcgcgttgtcttcgggcgtgttgcctgtttggggacgctcaaatctctggtcctcgataagggttatgctttccgatattggcttgtacacgatcttgtccgggattgcggctcgttgaggtttgtccagtgcatttatggagcctcccggtcccgtctgttttgacttgtggtaacctgtgtcgtccgtgtcccgttgtttaccgcctcccgtgatactccgcctcagtgactgaggttctctttgggccccgtaaactgaggattatgatgagctgatttcagatgatggagaaaatgtgaacttcaaaagccatctcagaaagttgaaataggagaggacgctggttccatacttgcctgcaatgatcttcagcgtcttctgccacaggctgatggaattcagaatttccgacagtctgttcttggatctccgataatcccgggaaatggagttcagacactgaatacagcaattgagctgaaggatacgatgggtctgtttgcttttttctttgtccactattttcctaaggttccttttctcttccatggtccttggctggttcctgatggctttaattctgtctctggatgtcatgggtataagggatgcgattaacttctgtccttggggtgacttgtgccaatcacattcagacaatggtgggtttccataagcatggacaggaccactttcacctacataatcagggttcacatagccacttccaggagcacctggcagagagtggccatatgagtttgccatctccatggatgccatttcaatgccttcagggtaatcattctctccccaaagactgcccacggggtcatcactcctgtgacgaaatgagggctggattgaagatgttctgctgagcacccccctggtcatctttggggtctcagaagagccataatcatgaccattctcagcatctgaataatcaggttctctccaagtgcacgcnnn

SEQ ID NO: 11766 - DNA, 425 bp, Homo sapiens
  misc_feature 1, 2, 3: n = A,T,C or G
nnnactgcagggcccaagagcatacaaagctagttatttggatccaaagttggtcaagtgtgcagtgtttagacatcatgatctaggcaaacagaattcctggcctgaaatatgtcactagttagaaacattagaagctttcaggtaaataaatataaaaaaccagtcaaccgtattcttatttcttcgtcagagaatcatgtgtcgtttggtttaacttcctgctggattctggatgggagttgttgaacatattaatctcattattttctgtagaggacaggttgtcccccccttcctcattagcgccctgactgcttgttagggctctctgcctctggccctgtgaccagcacggttgctccagcaggcagcagtgcgtgggcctgctctccatggcagagacagggctgtgaagcttgggt

SEQ ID NO: 11767 - DNA, 505 bp, Homo sapiens
  misc_feature 1: n = A,T,C or G
ncaagatgaagaggaagatgtaccacaggacacgcccaggatgttgggttcctggtgctgaccacagtgctatggtcactccacagtccagcactgcagtgcacaaagggtgccctttgacaaaaatgctgcagcaagagtctgaccaacttgaaaagcagcaaatcaacaagataaagattcctgagagtcctaagtagcctctacgaagatacaaaacatgcacactcacacaggctactgacatgtctgacagcagaaattaacaggcagctctgctagcctgttaatttccacctggaaatgagagtattatataaaaccctcacatgctcagtctccttccaaagaaaagtaatatattttcctactgacttttataccggtatcatatgtatagaggtccccaatcaagagaacactttacttcagcatgaacattaaaaacttcttacacaaaatgaaaattactattatataatacttttattacaaaaatcggacg

SEQ ID NO: 11768 - DNA, 191 bp, Homo sapiens
  misc_feature 188, 189, 190, 191: n = A,T,C or G
accataattcatatatcctgtttttatttgtataggaacctaggagaaagagaaggaaaattgaaaataaattaagtcaaatgcaatacttgtgctaaaaatgttgtcaaaagttgaggccactttctaggcaaaatgtttggaggcaagagtttgccttttcagtcttctttctcattttcaaaagnnnn

SEQ ID NO: 11769 - DNA, 353 bp, Homo sapiens
  misc_feature 336, 337, 338, 339, 340, 341, 342, 343, 344, 345, 346, 347,348, 349, 350, 351, 352, 353: n = A,T,C or G
actttttttttttttttttttgtgggcaaaatgaaatctgagtggaccaatgacctcaccatgtccagtgtttggttgctagtttgagatttggaaatggctgttcaggtgaagaggtaaatggatccaaatgccttgttataaggcatttgacaatgcttacagcaagtattgtgaatagagggcctttaaattctagcataaacattccgggctactggttatttttttggttgtaacttacatttgaggttttcacaagagacaggctctacaagataccctacatgtctaaaggactaagaattggagagccctgacattgaattaggacgnnnnnnnnnnnnnnnnnn

SEQ ID NO: 11770 - DNA, 271 bp, Homo sapiens
actagacatctctctgaggtcatgtcacactcaccatgccaccccatcatgtccttatagatgggaccctcctcttctggttaacacatcatctgaagatagccagagagccatctctaagctgtgcaatgacaaggagtcatccttcatagaagacatctgccccccaaacaggtcgtctatacttgatggtgacttgttaagaagttcaccctgtgctttatttccaactcaggacacctggaaaaggtaaaagaaccaccatagttgt

SEQ ID NO: 11771 - DNA, 601 bp, Homo sapiens
  misc_feature 588, 589, 590, 591, 592, 593, 594, 595, 596, 597, 598, 599,600, 601: n = A,T,C or G
acgtaagttgaagtccaggagggttccagacacagagcttctggtgtcttctccctgtggagtcaggactcattactctgctgtctttgatgtgtgacaacaggcaccaactatcgccaactagagaagctcaccagagctctgatgttggaagtttttattggggcctcagcatgtagacatgattgactggttggtggattaactgtctacatggttaatcttagtgtccaggtcagctgatactgcgtgaccaaaagctcctaccccgaatcccttgattagtatttctggcatagcaagcccccatcagaaacaaagacattcctcttagaggtaatatagattacctttcagcaccagagggcaaaggccagactactttttaggcaagtacacattctttactacatcccacccatccgtccccgacagggagctggccagaaatggagccctcctgttaaattgtctgggcctgtctttgaggcgcaaaaaaaaaaaaaagtaaagccttctctgctgtgtgcagctaggtttcctgaggtttcattgagagcttggtttaggtttgatccatgatactcnnnnnnnnnnnnnn

SEQ ID NO: 11772 - DNA, 591 bp, Homo sapiens
  misc_feature 576, 577, 578, 579, 580, 581, 582, 583, 584, 585, 586, 587,588, 589, 590, 591: n = A,T,C or G
acggtggggcacccaggtagtaatgtgcaggaagtagaattggcaacaaaggacacagaatgaaatggtgagatggctagcggaaacatagggagaatggcatcacaaaggcaaaggggggaaagaatttcagtttagtggatagtcaaccaaggcatttcacttagcagtcaggaatgaaaaaacgatactgaatttgaacattaggaaagcttggtaaatttcaagagtataatttctgcaaagttggaacacagtgaataaaaaagtgctaagaaattgaggacaattgaaaagtttagcaaatgataagacaaagcagaagaagatagtagatagtgaggacagcagaatcaataggagggtttcttgggaaggccatctttgttttaaagtttatggggagagaaccagtgtgcgaatggaagtagctagggggagaaactgaaaatgctaggaagactgggtgtggtggctcatgcttgtagtctcagctgctcagaagcctgacgtaggagaattgcttgacccagtagttcgtgaccagcctggaatatagccagaccctgtttccannnnnnnnnnnnnnnn

SEQ ID NO: 11773 - DNA, 581 bp, Homo sapiens
  misc_feature 1, 2, 13: n = A,T,C or G
nnattaaacctgnggctaaatcctgtaaataatttcagccaagaggcgttttccccttctcattcaccaaatttcctttcccgttttaggaagtcacaaaaccacggtaagaatttcagtccccttccttgtctgtaactgtcaatcaaattacagaacggaaaaatgtcaagaggatccaggagacggcaccaggaagcagcagagacctgggcgatccacaaaggagcaggagaggcctgagcaggcagggatggccagaacacagccctgcactcctctaccagtgcactcagcctgcagcaagctcagcaaaggcacagtaaaaaaagtgagccatgccaatttaagtgtgtgccttctgcgtgcaaagcacaccaggggttacaaaaaccctggcgttcttcatggctaggcagctctaccttgttctttcttcccttcatcaaaagtcaacaatatcctcttatgtttttcatatagctggctgcagtatatttttcaaatcaaatctcaaactctaaataaaaatgagttggtagcctttgacatgtatagaaatttacaagggggaaaaaaaa

SEQ ID NO: 11774 - DNA, 560 bp, Homo sapiens
  misc_feature 537, 538, 539, 540, 541, 542, 543, 544, 545, 546, 547, 548,549, 550, 551, 552, 553, 554, 555, 556, 557, 558, 559, 560: n = A,T,C or G
actaatcgttcctgtgggattacttttaaaccaggtgagaaaaattaaattatgtattctaacaaagtaatatgtgagattttgcaaatgattttatagaaatacacaaaataactctttagcttgctctgagcatttttttcttttctgatagcaactttttaacgttgtggatccacagaacttactgctttgctttctcttttggggtcataattcctctccccttggagtgtccactccatgcatgtgcacttaggatgtgtggctgtgtgtgtgtttgggaaccctcacggacacataaggttctatgtcatcaagtagaaaacctatctcattatcattataatgtcttcagatgctttctaaggttcacctcttttttaacattagaagtcagtgaatgcagctttcattataatttttaatactttaaaatgtttttgtattagctgccagaatgctcagcagcaaagttatgactcacttctagcaagtgtggtagttcttgctttaagcatttggtttcatgtagcnnnnnnnnnnnnnnnnnnnnnnnn

SEQ ID NO: 11775 - DNA, 508 bp, Homo sapiens
  misc_feature 506, 507, 508: n = A,T,C or G
acttttttttttttttttttttttgtagagacaggagtctccctatgttgcccaggctgttcttgaactcctgggctcaagcaatcctcctgccttggcctcccaaagtgctgggattgcaggcgtgagccaccataattggaaaaagtaacccctcacgcatccatcttttctactgttcttgataggagttctgtttccctagtcagattcccccattcctcacaacaagtcccccgcttcaaagcaggcctccttccactgccctgagaaaccggcagtgggaacacgctctacttcctgcctcaagcccctaaagccgccctcctccctagctaagaccagtcattctacctgggccctaatctcacgtccccacgtcctgaaggatcgcatccaatcatctgctctcctccactgtgtaggcaaggttcttctctccactggccctgctgggagagatctctcccatctgaaatgccctttgatccttatttctctccagnnn

SEQ ID NO: 11776 - DNA, 335 bp, Homo sapiens
acaaggacaatagggataccctggagctgtcccagtccagctgagaagggcattctccctacttgtgtttcatcttagggactctcactttgaccctgagtgtgataggaaccatggggaagtctcagctgaggttggacgtgaaaggtctcatgttttaacagggtcactctggccccctccactgagaacaggctgaaggtggcagggactgagtggagagacctcttgggagaccactgcagcaagtcaggtgagagctggaggtggcttggcccaatgggtagctgtgaggtcgagagcaatggctggagccaggaaacctctgagtacct

SEQ ID NO: 11777 - DNA, 499 bp, Homo sapiens
  misc_feature 495, 496, 497, 498, 499: n = A,T,C or G
cgtagacaagaggtcctccatcaaccttctcaggtggaagtcttcttttagaaggatgtttgtaaacccttttgcatcaggaatgacagtccaattcttttctgtcagttcttgttccagaacaattagggtgagtcatacggagtaaccttgccataaaaaatggaattcgtatgggaattgtatgaaggccttcttactgaaagtcattgagatcctttagatgatgtgtttgtgtattcttatgatttaaatacatgcagaaatgaaaggatgcaacgcagtgctagaaagcaatttctctctgcgtttcactcagggtttcctgtagccactgcttctctccatccatggacattctccctcttctggtgagtcgttcccctctatatccctcagagaaaattctgaagacagggaatgatttgactgctttagggaattccctctgccttcgtcactgtgttgggcagagactttcatgcctgaacatcnnnnn

SEQ ID NO: 11778 - DNA, 290 bp, Homo sapiens
acatcccactgagaaccactgagacagatcctgtatggccttgtggtcataaatatgattttgttctaagtgtaaggaagaagccagtagagagctataaacagaggaaatggcatattgcctatttctagaaggccatgatctaatttcctatttttttttttttttgaaatggagtcttgctctgtggtccaggctggagtgcaatggtgcgatcttggctcactgcaacctccacctcctgggttcaagtgattcgctgtatcaaaaaaaaaaaaaaaaaagtacct

SEQ ID NO: 11779 - DNA, 744 bp, Homo sapiens
  misc_feature 739, 740, 741, 742, 743, 744: n = A,T,C or G
ccgggcaggtactttttttttttttttgcacctccaaaccagctatggtatgtgggagtgcaaagcctttgacaacacagagcttaggagcatatgccttaccactgttcttggcagccttggcaatgtgtctagtgagaggaagggggacaggagggatggctttcgtcctttgggtaagaactgtgcccagccagaggggaacatcatggcttctgcaagcagagtccaagccccgctgtttatagttcagccataatggtacgtctacacagcagctctcggaatagggagtggggaggcatgagatctagtcctaggctccactgtgccagtcagccagaactggagaagactgtacagataagagagctttgaagctttgctcgaaatgaacttggctctcaatttcctccttgagagttcaataaaataaaaactacaagtatgattatgattattataaaaaccagcaaacatttatcaaatacttactatgtgtcatgcttttccaagcattttacaggtatcatttcattgttgtctttcgacaacacttttcatgtcatctctactttatagatgaggaaactgaggtcctgagaagttaaataacttgtccaaacttgccccattaggaaattggcaaagccaggatttgacctgtggccatgtaactccagagcctggggctcccaaccatgatcccgcgttaattaattctagaagacttctcgannnnnn

SEQ ID NO: 11780 - DNA, 177 bp, Homo sapiens
ccgggcaggtacaatgggtgttcaaaatttctcttgtagggttgaaaattttcaaaataaaaagctggggataagatgatttgggtgggtctggccagaaataataagagcaggattctcagctctccttttttggccactggtgcttctgcagctgggactcaaaaagaagtacct

SEQ ID NO: 11781 - DNA, 554 bp, Homo sapiens
  misc_feature 546, 547, 548, 549, 550, 551, 552, 553, 554: n = A,T,C or G
acttaatgaaacattctcacttatgttatgctacttgagactcagaacaactgtgggagcttgggacagatgacttctcattttccagatgaagaagttcgaatccagagaagtctaggataaataagaggaaaggaagaaggaataggaagtgagaaagagggaaaaagaaaaaagtgtaagagctagtagagaagcagttagagtccttccaaggtcctgagcatgtttagtttaggatggagggaggggagttctcagaagagaaagcagcaactccacaccataggttgaggtgggtgggcagaagaggacatgcaggatatgactcctcctctccagtaagcactgagcgactctactgtcctcttgccttcttctgctcctttgctctgggtcaccagaagtggactcttgttccagcctccccaccctgacaaggagctcgtaatcatctcctccttttccccacgttcagaagtccaatctctgaacaaggtcagaggttttcaaatggtaatgtgtctaaaactcactcggggatcnnnnnnnnn

SEQ ID NO: 11782 - DNA, 540 bp, Homo sapiens
  misc_feature 1, 2, 3, 4, 536, 537, 538, 539, 540: n = A,T,C or G
nnnnccgccgcccgggcaggtacgagctgtattgcttatcagaacacactaacagtctttttgatatattcgcttttcccctttggttcagccgagcctgctgacagatcattcaaattcaattgttttatgtctaagccgaacagctaattaaagtagggatgattaacctgactggcagtgccgctctccctctcgcgctctctctccttctccttttctctctctctccctcctgttccaatcagtctttttctcacacactctctctctccgtctctcctctctctccctctctctctctctctcccccccctctctctcttccccctctctcttcctctctctcagtctctctctccctccctcggttggtgtctctctctctctctctctctctgtctcttgctctactgtttttttttcctctctctctcctaaacgtggtctgcttgctgatggcagaatggcactcggagatttgtgcattgtgtctggtttcctacgggcaggctgacccagtgccttcagggacnnnnn

SEQ ID NO: 11783 - DNA, 493 bp, Homo sapiens
  misc_feature 492, 493: n = A,T,C or G
acgcggcacacttctctgatgcctcttgggcaattgctctgttttctgttgccttggaactatgtatatacctctactatagctatcacattttattgtaactgtttttcctcaccagcctatcgagcggccgaccgggcaggtactgtccggacataccccttacaagaagaagcatctctttggcccaaatgtttgtaattaagggtctaacaaataattcacctgaaatccatgttgtgtgtagtggtgtagccactacagggacaggctggacccatgggcacaaagaagcaaaacagcgcattcgaaccagcactcccctgagggattctctgctggatgtggtggaaagccacggagctgcctcgtggccaggaactggagtcccactggtggtgcaaagagtgtattctttttccagcagagactgcaccaggggtcagcacggggccagctcaggacacacagacccagctggaactccagccnn

SEQ ID NO: 11784 - DNA, 551 bp, Homo sapiens
actgaaaatatgaaaattgcttaggccaaagaatgggcttttcaatagcacactgcaaaactgggcccaagtatttaaaacatctctaaaaaatatctaggttggcaggtttttatccctagttttaacagtctgaaagagggttcgttactgagcactggaagtgatgaagacagagtagctacaacataggggctggtaggcagcagagcctcaccaacagccttaatttgtgtggtgtcttcacagggcaaccctgggaacgatggtcccccaggtcgcgatggtcaacccggacacaagggagagcgcggttaccctggcaatattggtcccgttggtgctgcaggtgcacctggtcctcatggccccgtgggtcctgctggcaaacatggaaaccgtggtgaaactgtaagtttgtgaataccagtccctcagtgcagcattctcgtgggcttcacttctgacttccccacacttggggatggtggaggagtggggaggggtatcttgggcctagctaagttgtgtttttctttttcatttcacag

SEQ ID NO: 11785 - DNA, 511 bp, Homo sapiens
  misc_feature 511: n = A,T,C or G
accaccacacccaaagcctggctcagaatgaattcagcacccattccttgctttttaaacctcaaaagttcccgactcagtgaaaggcttccattttgctatcctcttctctgtctgcattttactctgtaatttattgacatagaagaggcctcgtgcaggctttcattgcattagtccacttggaagtcttttctccaatccatttgacctcaagctgcttttttgctgctgctgcatgtaagctagactgatccagctcaccttatgctgcttttgaaggctgaaaagccctgtgaccaaatgtttagcaggctgttcagacagtggactgatggtttgatctaagtccgtttcctgccttacacacacctccccatcccccaaggcaaaggtggaaaacccagccagttacataagttgttggagcagtccagatggctggctgctagtcccaggcaatctcgctttggagcacttggggatcacagcgctgatctcactccactan

SEQ ID NO: 11786 - DNA, 296 bp, Homo sapiens
  misc_feature 293, 294, 295, 296: n = A,T,C or G
acctgaggcctttctgtgcagcttagcattgccagaaggctatggcctcatagtagtcaaactactaatgcagtggctcagagctccaagtgtaaatgttttagtgaacaaagtggaagttgcatcatcttttattacccagacttgtatacgacttagcaccgcttctgctataatccattactcagagaaatcacagccctcctagattctataattaaggaattttgacttcatcttgttggggaataacaagggcacacttacagagtagcatatgaagctggagatannnn

SEQ ID NO: 11787 - DNA, 567 bp, Homo sapiens
  misc_feature 567: n = A,T,C or G
actaattagatctgcccatccgttacttggcagaggaatgggctggaaatgggaaagggtcaacctttcacctgctggacactcaaggtgagaagaaaaaggaaaggggccaagaactaactgtctggctagacagtaatcatggactcaggctttaggtatttgatcttttagaattccaatttctgaaaaataaaggtgttatatgtaattaaatggttggaagtgggaggaacttcacatttaaatagaaaactataaataagccaatgaaaagaaaacactcataattatccaatataatttttttatagttcatagattaaaatatatatatatatctgctgtcatccttccaaacatattacttttactcttaaaccagcaccactacttattttctataatagtgtattcattttccatgtttctgttcagaaagtgtaggtagaaaatgtatgagcctatccttagggaaaaattccattctctaaaccacatgacaattctcagtgtggatattccagtgttccgacatgagcagtatgcccccagtatgttcatagn

SEQ ID NO: 11788 - DNA, 453 bp, Homo sapiens
  misc_feature 453: n = A,T,C or G
acccactctgtgccaggcaatgaacaacatgggcaaatagcctaccctcatggagcttacattttaatagggagacagtcaataaagcaaacgaacatgcaaatagataatggactgtcagtggtgacaaatgccatagagtaggctaagatgctattttagaagggcttggaaagtcttctgcatagggtaatattggagcagagactaaatggtggaggagaggaatatgggactgttcagaggaagaatatccctggtgagggaacttcaagtataaacacactgaggcaggagcatgccagatacaaggatgacaagaagggcagtgtaactggagcgcaatgagcagggcagagagtggtagatacatgtttatatatctgcatctctagagttcaaggagcaggttggggtggaagatagaaacttgggtgtcatcagattatatan

SEQ ID NO: 11789 - DNA, 382 bp, Homo sapiens
  misc_feature 354, 355, 356, 357, 358, 359, 360, 361, 362, 363, 364, 365,366, 367, 368, 369, 370, 371, 372, 373, 374, 375, 376, 377,378, 379, 380, 381, 382: n = A,T,C or G
actttttttttttttttttttttttctgcgatggagtctcgctctgtcaccaggctggagtgtggtggcgcaatctcggctcgctgcaagctccgcctcccgggttcaagtgattctggataatctgtgctatctgatcaaactgttagctccaagatgtagaaagaagaacctgtggtatgaatattaagtcagccaaacagctttaccctttgtatgggagtgctttttgcttcctgtaaatagccttgtaaatggttgttttacagagaattattcagtaaggagaagccatggaaaaattaagaggaaatgattttttcccaatagcttcttttcttttttcctttttcnnnnnnnnnnnnnnnnnnnnnnnnnnnnn

SEQ ID NO: 11790 - DNA, 317 bp, Homo sapiens
  misc_feature 317: n = A,T,C or G
actatatcagctcatccctggcatgcacaactgctcagtctggccaaggcaccaactcccagaaggataatgtgctgcttcagctcatgcccagggagcatactcttttgggtgggccaggcaccatttccctgtgatgctgggagctgcttcagcttaggtaccactgcactccagcctgtgtgacagtgaaattgtgtctcaaaaaataaataaatgaataaagacacagaatctgcaggatggctcagtcagttggagacccaagaaagccatgctgcatttgcagtctgaaggtctgcatgccagacacctan

SEQ ID NO: 11791 - DNA, 560 bp, Homo sapiens
  misc_feature 560: n = A,T,C or G
acgcggggagagctccagcatttcatctagggggaggtggaagtgtggcttttagagataaaaggacagggttgttttggggtgctctgagaaggggaaaaggagaccagtgataactttgagtagctagaacgggaagatttgagggggctgaatgaattgatgagagtgatttaacttaaaggactggggcattatctgtgggcccgggtatactagcttcacttttgaggaaaagtgaagctgggaaatgtgagatctactcagtgggtccggggaaatgtgagaggagtaaggaaagtgaagacacagatgtgttggaggctccaggcgagcagggtaaagagaaagggtttcctggattctgattacagaatggacctgtgggggtctcagattgaggcctaacagcatttaaaaggagcaactggtagaacagatttggggaaatatttatgggtagaagagaatgataagtgagctacagaaataggtagaggcccatctaaatatcaggttccggaatgaggactacaccatacatgtgcagctgaatgacn

SEQ ID NO: 11792 - DNA, 316 bp, Homo sapiens
  misc_feature 1, 2, 66, 67, 68, 69, 70, 71, 72, 73, 74, 75, 76, 77, 78,79, 80, 81, 82, 83, 84, 85, 86, 87, 88, 89, 90, 91, 92,93: n = A,T,C or G
nnaatcgacatagtatgtgtgctgattggagctccgacgcgcgttatggacatagttgatggctgnnnnnnnnnnnnnnnnnnnnnnnnnnnnccgggcaggtacttattgtatatttctcacattctttcagaaagttattaaaatggctttacagttgcgttgcttttttttaaagagagaagaattgaaatttattttgcagctatacacttggttttggattattcatgtgtataagttatttgagctgctaccacttcctctgacctaaggctgtggctaaaatgggtttggagaagaaattcttgcctgt

SEQ ID NO: 11793 - DNA, 550 bp, Homo sapiens
acgcggggagggattgctccctgcattgtgggtgggagattgggttgggaaatgtaaagctctctttccttaccaagtttgtttaacatggcgcttcccaccccaccccaaccacatcttcgtgctacttcaagctgggaggagccaagttccagaaggtaccgaattttttgcccgtgtggacaaagagacacattcagaggtgagcccagagcgggtaaagtggactggggagaacttcggaggatgttcatgtccaggagcagccccacgccctgtatggtcggtgtctagagcctcacagcaactaagaccaacccagctctcagaagaaggaatgtcaaaatgtcatgttcaattttacattcagtgcctggaatcttttcttcacaattgaaatgaaatgtgctgaaggaggtgaatccatgcattaatcttcagctcacaaaggaaatactacataagaagcaagaccacagactcaagacggacataattggattttttttgccatggcctggaaagaaaggtacctcggccgccaccgcgg

SEQ ID NO: 11794 - DNA, 626 bp, Homo sapiens
  misc_feature 1, 2, 593, 594, 595, 596, 597, 598, 599, 600, 601, 602, 603,604, 605, 606, 607, 608, 609, 610, 611, 612, 613, 614, 615,616, 617, 618, 619, 620, 621, 622, 623, 624, 625, 626: n = A,T,C or G
nnatcgttttttgtttttttcattgaattcactagctccaggtcaaaatgtctccacttgaaaatcggcttttacagaaattgtttactacctggtttctgatttaagaatttttaatagactcttactgaaaatcaaatgagcaggtttttggggttttggttttaagtacaggtagctgttggctaaaacatattccatttacttgtcaggacttacaatttcatttcacgtgcatataaaattagtcatttttcaaattcactattaaaaatcatatccaaggcagcattttccactcaattaacccatgtattattttaaatctacaaaccaacatttcagctacagattttgaaaagccaattgttactattttgtaaaattcacatttctagccacataaattaacaacattcctgaaaaacataagaatcagatataactctgcagtaggcaatcctgggtcctgacactgactttcctacctgaggacaaccacattcaaactgcaaccatttgacaaatggggagtctcaaaaagtacagaagatagcaatccagatcacggcaaaaacatggctttttcttgnnnnnnnnnnnnnnnnnnnnnnnnnnnnnnnnnn

SEQ ID NO: 11795 - DNA, 379 bp, Homo sapiens
  misc_feature 379: n = A,T,C or G
ccgggcaggtacgcgggtcccacagtgccccttgattgagaaccctcttcccagccagaggcaggaagaggacgaggcacatgagcctggttggcatcatgccctaatcatgccctttgcagccttcttactccttcacagcccacatgctcaaggtcgtctgtcttttctgtccctccccacctgttccagttagatttctactaaagtaatagttagcatttttgaaacagtgttggcttgtttaatcctcaccacaaacccatgaggtgggttaagagagatgaaagaacttacaaggtcacacagttttacgcaactgctgccttttcttctcttggcttccaggcttgggttccttctctgtgtgtctggctgn

SEQ ID NO: 11796 - DNA, 453 bp, Homo sapiens
  misc_feature 450, 451, 452, 453: n = A,T,C or G
acctaggaaaggggtgacaggtcggagtttgaaaccgcttgaagggaggagtcacagagcttggaaaatgctagtgctaggccagaaatgactatcactgctacgaagtcagcagttatagtgctggtattgtcagtctagtcagacagccattaaaaataacttaggatttccaggtttccttttcaaaagctatacatttttttaaaaattaaaattattttaaaaactagaatatgtgtcagttccatttctacatctgaatttaaggtaagcctccactatcaattcagcttctaccacggtatatatttactctccctttttcactcactcaaccactctgtttacaggcaggacaaactgtgggggtagccaaagtccttctgtcctcatactgggcaccttctattctatcctccaacttgtccctgtgtctccagcaagccnnnn

SEQ ID NO: 11797 - DNA, 296 bp, Homo sapiens
agctccaccgcggtggcggccgaggtaccttagtagagcagttccaaaaaaccctgccagtcactgctgtgacctgctccacaggactcaacctgaaattggacatcgcctcccaggaaaatggtgctttaatggagcagctccacatacatcttccagtcactcctacagccttccccactatgccagagctaaagcaataactggcatcccagggaaatgatgcattgactgccagagcagttatattcccagtgcctgggctgaagcagtcccctgtctcctgggaaaatagt

SEQ ID NO: 11798 - DNA, 245 bp, Homo sapiens
  misc_feature 119, 245: n = A,T,C or G
actgccctccagggcttacagtctggtgaaggcacaggcaacagtaagatgatgtggtaattactgggagggggcaggaaagagagagagcaaagcagattccaggagaaacaggaggnaaagaagggctgcggggaatagactggcatatgcaaaggtctagaggaggaaagagcaggtttagtcaaagaactcaaaatagttcagcacggtcagactttggagtctggtgagggacaagatgn

SEQ ID NO: 11799 - DNA, 653 bp, Homo sapiens
  misc_feature 653: n = A,T,C or G
accattatcatttttagtgcagtaataaagaaattaaaagtcttaacattgagcattggacaaaaacactctgcttggcctcccaaggtgctgggattacaggcgtgagccaccacacctggcctgggctcctgcactttaattcaagccctgtgacttgcagtgagtgtggccaggcaagcactccctgtcagaatggtatgatccctcttttctggagggccagcctgcctgcagcactgttcacaggcttgcaggtgccactgaagagaccagtggagtttaatgtctggaatgtgttccacgtggaaatataattactctgtcatctggaacaagcgattgtaattgttagagagttcctcagtccactagtttgactttggccatggtcgtacatttaagaacttggttcaagttttttccatgtttagggtaattaggtgtccatagtatatgaggctcagctttcatactctattcaactctggaatggctgccaaagaagctgattaaatcttaccagttctgagcagggtgtttttgcctcttgtgtgccaggtgccaggataggccctaggtgtcccagatggttcctgtcctcatggagtttaccatttagtgatcagattgtacctaaatatagtttgaan

SEQ ID NO: 11800 - DNA, 832 bp, Homo sapiens
  misc_feature 1: n = A,T,C or G
ncgtccggaaatcataaagagcttgcagctgtttgtgatgtgtttgtggaaaactatgtccctggcaaactgtctgcaatgggcctgggatatgaagatatagacgagattgctcctcacatcatctattgttccatcacagggtatggtcagacaggtccaatttctcagcgagctggttatgatgctgttgcctcggctgtttctggtctgatgcacatcacagggcctgaggtggcgtgtttgtctcacatagctgcaaattatcttattggtcaaaaggaagcgaaacgttggggtacctcggccgccaccgcgggtccttaccaggcttttaaaaccaaggatggctatattgtagttggagcaggaaataaccagcagtttgccaccgtctgcaagatcttggatttgcctgagttgattgataattccaagtttaaaactaaccaccttcgggtacacaatagaaaagagcttattaaaatattatctgaacggtttgaagaagaactgaccagcaagtggttatatctttttgaaggcagtggagtcccgtatggcccaatcaacaacatgaagaatgtatttgcagaacctcagaacgctgtctctggcttccaaagcctgctgcattccttggcccatggccccttccttcatcttcaaggatcagcaagggtattacacaatggcctcgttatggagatggagcatccaactgtggggaagatttccgtcccagagcactaacaggagtggtggtaagaggcccataggagaaggcataagagtcagaggggagaaggagaaaaggcccagctgtgagata

SEQ ID NO: 11801 - DNA, 279 bp, Homo sapiens
  misc_feature 279: n = A,T,C or G
acttgccctctctgagcccgccttgcttcctaccctgttgactgagcacattggactgggtcatagtgggtgatggcccctcccggctctgtaattccccacaacagtcctggtgcgagtgtcaggcctggtagaacagggttgtttgagagatggtatctaggcagctatgtttcctctgctccaaccagtcctgtatcagtcgcttcagacaatgtggcacattctgttcattgtatgaagaggaggaaagtgcaaagcatggttgataggaaccan

SEQ ID NO: 11802 - DNA, 458 bp, Homo sapiens
  misc_feature 454, 455, 456, 457, 458: n = A,T,C or G
acgcgggacctttatctttgggtaaatacacaaagaatcaaagattcctttttgttttcatggcagagaatcagttgaaatgaatgttacactccgtgtaaagatagttacaaccttaccgatggaatgaaatttaaaaaaaaaaaaatttgttttccccccattaccttttccatattaatcaatgaagattgttacatttttgaacattgtattaataatataaactaaaatgaaaacaacaaatagacaaatatattctatcagggatggagacatgttgccacttacagaattaagtaggctatatgccaaataatataaaaatgatcgagtatctgaaattgacagtgcatattttcagtatgtatttttaataagcaatgcattatttcatatgacattacttttagttatattttctctataaaaccaattaaaaggaaaagcaagnnnnn

SEQ ID NO: 11803 - DNA, 393 bp, Homo sapiens
accattttaggccaaagctatcccatgactattgcctagaacgggagaggtgaacagaagaggtaggggctgtgaatgctttcgcaaaactgacaagcagggcgaaagggaaactctggaatatgagcttccagactgcacttgcatcttgtttatctcacggttctcaggggccaccaccttacctggcacaccgaatgtgcctgaggaatgcttgatgcactaaaccacaaatcagtgcaatggaattgccatcccccaaaagtccttttttaagataagaacgtattttctgaagtggattctgatagctattagttttggtggtctggagtatgcttttactctttctccctgatactggcaatagaacacataggtccacaggtttgg

SEQ ID NO: 11804 - DNA, 391 bp, Homo sapiens
actcccaggatttatttcatctatagcaagttgaaggaatagcaaagcaccgtggcaacagccccaacttgcaattggctctttttcctgtgaggcattcccctttcaaatgagcatccgcatccaacaatagctttatttcaagcatccaagcccggagtcatgccatcgcctgtgcctaggagacctggcttttggaggtgaagccaatgcaagccagtatttctgcctgctggctcactgcaccaggcattgttctcaaagatgtccaatcatcctccttctgggtaaccctgcttgcgtatgtgtgtgtgtttcccatgatacaatatgtttgtaaccaggcatctctgaatcaatcatctcagctagcatattttacttattgaac

SEQ ID NO: 11805 - DNA, 226 bp, Homo sapiens
ccgggcaggtaccctgagcctcctgtgccattcttgctagctggacagaagacattgctactgagccaagaagacttgatctctcttacaccgaggaagaagggaaggtctgatgcaatgaaacagcacgtttgcttataattctagatcagaaccataatagtaatttgcctactaactatgtaacattgaacaaactactgttttgtgagcctgaaaagttggt

SEQ ID NO: 11806 - DNA, 357 bp, Homo sapiens
ccgggcaggtacgcggggcagagcgggtaaagtggactggggagaacttcggaggatgttcatgtccaggagcagccccacgccctgtatggtcggtgtctagagcctcacagcaactaagaccaacccagctctcagaagaaggaatgtcaaaatgtcatgttcaattttacattcagtgcctggaatcttttcttcacaattgaaatgaaatgtgctgaaggaggtgaatccatgcattaatcttcagctcacaaaggaaatactacataagaagcaagaccacagactcaagacggacataattggattttttttgccatggcctggaaagaaaggtacctcggccgctctaga

SEQ ID NO: 11807 - DNA, 1549 bp, Homo sapiens
  misc_feature 1, 2, 3, 4, 5, 6, 1535, 1536, 1537, 1538, 1539, 1540, 1541,1542, 1543, 1544, 1545, 1546, 1547, 1548, 1549: n = A,T,C or G
nnnnnnataacacagcgaaccgccacacagaagcccacagagggtccgtgcccaaaaggcccccgcggacaaccccgcgaccccggtccacggactgtccgcgttcccagaggcgcccgaccattaagactcctcggggcaatcgtcgccggcgcaccccgggcaccagcgggcgcagtctcatcaccaccaaccgggcacgaatcccatccacgggaacttccaccggggaaatagtcccgtcaaagatggccgtggaactccctcccatcaccaaacaggcttcccgcccccggtcatcacattacccgtgatgcacctctaaacaatggcgtctcatctggcattccccatctgagctacctcatagtcatgcgccctgctcagagccaggacactgcgctggtaagctggacgactttctcagctcaggtctctccggcaggtgctggggcacgggcactttatgcctcagagacaggtcataccttctcatcattcttcgacaccaacccaagcttgccttgaaccctttctctggaatgttcatttcctgggcgatttcgagagctttcagctgcatcgcctcccgggtgatggggtcccctttggcctgcatgtatctgacatattcggccacacgctggtccaccagagcaaacctcccattcttggggcctcggaatgcccgccgcatggcgtgggcgttttgaagctgtggcttcactttgcgccagtctcgaacgtttttttccaatactccaaactgcttggcagcctggcagttgttggtactctcagcatattccactaccatcagcttgaaccctgcgtcgtaactgcggcgcatgccccggctgaactgaaacttcccagctatgtcatcagccgagaggtcataccctgggaagcccatggccatgtagaaggggtacccctcactccactcgggcagctctgtgatatcccgaggcagacggaggccaaagctgtcaaagtgctgaggctgaggaaactgggaggtagcattcattgggtttggccagtctggaggctttacgtcagattcttcattttctgcagaggtgcctccttggagctgccactcgtcagaattctgagactcctcctccccttccaaacgggtgatcatgtctggcttagggaatgggaattccagggacaggacagtttcataattcatcctcatgacttcccggtagagggccttttgttgctccgtcaaaacttcccattcctcatcggaaaaatatatggccacctcatcaaatagggccggtacccatccgccctcagagcagattcgtactttctgcatgtctgccgggccgtcctctagttcccggctctgaatctcttcttcctcttcctcttctttcaggctcaaattgagagggtaggctgtggactccatctctgccgggcggcgagagccggcgccgcccgcctccccggcgggcccgcagcaaaggcggcggcggcggcctctcagtcctcccgtgcgcgcggccccnnnnnnnnnnnnnnn

SEQ ID NO: 11808 - DNA, 453 bp, Homo sapiens
  misc_feature 453: n = A,T,C or G
accccaaaaccaggggctgcagctcctgcaattgggaaggccaagttttcttgcacgctccccagaaaaggggccaagtccatggggctgagcagtgatagactgcagacctcaccaccactgaaccttgtaggataaggcccactagcctgggatgctagtgaggccaccctagtcctcctgagttctccagctgggagcagctctacacttctccggcatgcagcttccaaagagagaggcagtccacctttttgctgtctcgcaaccctccctcctgctgctctcaggcttgggagggtgcacagcaattagggactatcacagaaccccagcacagtgcatctggtgaacttaaaaaaatcaacaagtgataaacaaacaatcccatttaaacgtacctgcccgggcggccgcccgggcaggtacttgcgcttactttgtagccttcan

SEQ ID NO: 11809 - DNA, 230 bp, Homo sapiens
  misc_feature 1, 2, 226, 227, 228, 229, 230: n = A,T,C or G
nntacccaccttacaatgtggacaagattaatttagggaaaacacgtagcacagggcttcacccatggtaagtatttcataaacggtaactatttttaacaatgacaattccagagtaatcctaataaaaaatgattacagaagaggacgcctccacccacaggaaggagccagcacggtggggagctgtatcaccagtggagtgttctcagcagctgacacacgnnnnn

SEQ ID NO: 11810 - DNA, 452 bp, Homo sapiens
  misc_feature 1, 2, 3, 4, 450, 451, 452: n = A,T,C or G
nnnncaggtacagctcagtgcattttacgcaaagtgaacatagcagtgaacccagactacggaccataacattaccagaaggcacgaagtccctggagtcctcttctagtcagtagccctcacgagtaaccaggatccaacgtcatcttgttcggctttgacttttacaggaatggagtcacccagtttgtcttcttttgtgcctgcttcagcttgctgcgggtgctgtagctggcctgccctggtgtggccggggactcccttgcgtgaatataccccatcgtttctcagtcccttgaactgtttccagctggggcgatcgtggatagtgctgctgtgaacaggcttaagcacgtccctttttctcgaattttattgaaatacaacaaagtgcaaacatcacaagtgcacagctcgatgagtttttaccgacgtatacacccgtgtagnnn

SEQ ID NO: 11811 - DNA, 470 bp, Homo sapiens
  misc_feature 444, 445, 446, 447, 448, 449, 450, 451, 452, 453, 454, 455,456, 457, 458, 459, 460, 461, 462, 463, 464, 465, 466, 467,468, 469, 470: n = A,T,C or G
actttcaagctcattgctagtaaagatatcaggctaataacaactcagaaactcaagtttattttctacactatcttaaaaataaagtgaaagccaacaactattgagtagctatgtagcagacaggactttactgacactacttctaaagaaatctacaatctaggctgggcgcggtggctcatgcctgtaattccagcactttgggaggccgaggcgggtggatcacctgaggtcaggagttcgagaccagcctggccaacatgataaaaccgcgtctctactaaaaatacaaaaattagctgggcatggtggcgggtgcctgtaatcccagctactcgggaggctgaggcgggagaatcgcttgaacccgggaggcgaaggttgcagtgagccgagatcgagccactgcactccatcctgggtgacagggcaagactccgnnnnnnnnnnnnnnnnnnnnnnnnnnn

SEQ ID NO: 11812 - DNA, 533 bp, Homo sapiens
  misc_feature 1, 529, 530, 531, 532, 533: n = A,T,C or G
nccaggtacaggcactttcttcaaagctccttcttttggtgacatctggagcttcagaggcagtgggagatggaatgggggtcagatccatggagatcattattggcagcattattggcagcaattcctgagaaactgaaacaattgagagagagatggcttacttagctcacttagcttctaagccatttttcatttgctgaaagtaatggaagccagcagcctattcttaggatttaataggagatttgagtaaaatttcattcaggaaggttctcatttttcatttttaaaagtgtgaattccctgttcatatagagcagagctattcttaacaatattgcatatttaaaaagaatcaagttgtatccttgagatacagatctctatcgcttggtaatcatcagctctagcatcttatttcacttaaaagcagtgctcacagaggcagttagaagatgaggataactgaaaaaacatttacgatataaagcaaccacgtttaagactggaaagtgatgctatcacnnnnn

SEQ ID NO: 11813 - DNA, 412 bp, Homo sapiens
  misc_feature 409, 410, 411, 412: n = A,T,C or G
acttagggcacagagaggttagcacacaatgggtctaaatataccactgtttggggataaatagcttccagggatctggatgcagaataagctaagccagaaagattcaatgcagtcacctcagaaagtcagccacatgcatcttggagaggccttgtggtttcagggccattctaagaacgcagctatactatagtcagtccaagcggtcatcacattaaggaatctcaatttgtgaaaactagtatttcaataaaaaaggagaacacttgttttgttaaaggagtgataacttcacgtggatatttgtcataggttgtatttaaatgaaagctaccctgactacattaaaatatgatttatttaattcaaatgtattttgcacatatacgacttttaaagaacaagnnnn

SEQ ID NO: 11814 - DNA, 556 bp, Homo sapiens
aatagtcagcctcatcctcaacgtgggccccactgatggtcaaggtgactgtggtccgtgaactggagccggagaatcgctcagagatccctgagggccgctcgctgtctttatacatcactaacacaggggcctggcctggcttctgctggaaccaccgagcatctttttttgccagtacctcggccgggaccgagggtttggtgcacctcgatttggaggaagtagggcagggcccttatctggaaagaagtttggaaaccctggggagaaattagttaaaaagaagtggaatcttgatgagctgcctaaatttgagaagaatttttatcaagagcaccctgatttggctaggcgcacagcacaagaggtggaaacatacagaagaagcaaggaaattacagttagaggtcacaactgcccgaagccagttctaaacaattatttttactaaaatgcataattatgtgatagttatacatataccaacctgttatgtgagacaagctgacctgcaagtagtccaaggccagtgaatcaattactgcttgtacct

SEQ ID NO: 11815 - DNA, 524 bp, Homo sapiens
  misc_feature 1, 2, 3, 4, 5, 6, 523, 524: n = A,T,C or G
nnnnnngtaagtctttgacattatgaatgaacacaggattatgaaattgtaaaggttactttctgctctctaattcctttactcgtaattttagttttcttaacggtataacttgatgcaaatatatacacagtagatactaactttcactgaagtgttttcgggagggaggggcactttacaagatgtgttgcctttagtttttccggtaaggagacaggaagacacagacagaggctcttagggcacatggaaagcgcctgcccctgtgccaagaacttaagagagagccggggatggaccctccttgctgtggctcctgaacagtgcagcctctcttctgatgcactcaccctggcgaggagaaccgcttgtgtggcgactgcttggcccaagagcgagtaggattgttgactcaactctcttcgtgtctcctcagaggggaggaacacctggcttcacctgtttacataactcttgttgattcttgtccctaagctcttccagaatgctcttttgggcnn

SEQ ID NO: 11816 - DNA, 1026 bp, Homo sapiens
  misc_feature 1023, 1024, 1025, 1026: n = A,T,C or G
acgcgttcggtctaggaatactgcatgagagcctggaaaggcagtgggatggacatgtacatgcggtttctttgggcaggaacaccctcccttctaccatggtctgtaggaattgaaccttccgtgccgttttcaaatgctgtctgtgctcggaaaatacataatatcaagtcccttactgaaccccctacagattgtgttcataaggtgcttcactgctgttggtctacctggcctactgttgtactcctgcctcatttactgtggccttcattcaagtagtaatgattatttacctattaagagtatagggtgggcgtggtggctcatgtaatcccagcactttgggaagccaagatgggtggatcacttgaagtcaggagtttgagaccagcctgggcaacatgatgaaaccccatctctactaaaaatacaaaagttagctggatgtggtggcagcctcctgtaatcccaactactcggcaggctgaggcaggagaatcgcttgaacccaggaggtggaggttacagtgagctgagatcatgctacagcaccccagcctggcgacagaagagagacactgtctcaaaaaaaaaaaaaaaaggtgtagggggggcagaaattcttattctttataacccatttgaaactttaaacagcctttaagggagagaccctcctaggggttttgcggaatccaaggcgaggaaggcattttttccgggttacgggaatttgtgcccagacaagtatgaagatgggggtcctaagatcgggatacccgaggaggttttaactatggggaccctgtggcttgcacaagtatttcacggcctggtaaatagtggcagtgtgtgctttggggtccagtacgctgtggaggatagtgggacaggggggacacgccattggagtggggcgaaggggggaacacatttggcgcggggggagaaccccttgagggggagggaacaacaggggggcgcacaattgggggcggcgttggatttgccggacaaaannnn

SEQ ID NO: 11817 - DNA, 624 bp, Homo sapiens
  misc_feature 624: n = A,T,C or G
actgtggcatgtcacactacaaggagcagaaagaacagctcctctaatatagaattgccagggtacactggcaggtcatcataagctgccctggctctatagagctccagcattcagactaggaaccaatgcacgcgtgcagccatgcttgtcagtaataaacttccctggacttatactaaaaccgtattttattgatatgtccagtatgttttaagaaaacagtctcaaactcgggtctatctaatattaccagccacttaacactatgtgataactttttatgctttcagccctggatattctttgaagaatattttctataaggagttctaaaatccttcgatcctcatattgatacaaaaaaattaaacacatgaacaaaatctctgtgcttcacacaaaggtgagatccaacctgtggccccatacagtcaccagtgtcatcaaataggccactacagtgtagggggatgcaggggcagcttcaagccatgaatgagacagcattacactctgtatacacagtgccctagaatatctgtgtgaaacaggtggaggaaaaaaagatgactaatttgtgtgtgtgtgtgtgtgggtgtgtgagaaagagagagagagagn

SEQ ID NO: 11818 - DNA, 477 bp, Homo sapiens
  misc_feature 442, 443, 445, 476, 477: n = A,T,C or G
acgcgggatggcccaatattaaattgggccaatgaatgtcttctttttcagtgctaagggaaaaataattttgggaggaagaggtaaatacttaaatacttaaaacatttttcattaaaatgaacttttattgcatttttttctttttttagattcttataattatttttagagacaagctctcaccatgttgcccaggctggtctcgaactcctaagttcaagtgatccacccaccttggcctcccaaagtgctgggattacagtcctaagctactgctcctggccgagacatacatttttataatgttaagagttatttaaaaaaaaaatttaaggcacgtaatgaagggtggttggtattcattacataagtgtttattctctacaagcgtagagaaatgaacaccatcatgaaatgaaataaaagtaaaagtttgaannanaaaaaaaaaaaaaaaagtacgcggggaagcnn

SEQ ID NO: 11819 - DNA, 550 bp, Homo sapiens
  misc_feature 506, 549, 550: n = A,T,C or G
acaacttttgatacagtcaatgtttctctccagtttccgcaaattgttaacttttatcatgaaacatgagatttgagggtgtttatcctttcttgcatagagcacatgaacaggtgtcaatgctgatcatagctagaagtagagtgggtcccatgtgtaactccggatggctaaagaaagtgttctacttacaagaggatgcttcatttgactaggattggctctcaacaaggcccgtgcaccttagaagaaaaaagtcacttctgtcacataagagctcaactgattcactcaacttcaaaagggcactgagaatgccatgctttgaaaaacatacaaaacagtaagaggagcagagaaaagcttgatgtgtttttctcaaatgacacaaaacaatttgtctctacaggtttaaggaaaatcaattaaaacataatctgtagatcaggagtggtagctacttaaataccaaaaaaggaaaataaccccaaatagaaaagacaaanaaagacatatcaaggtatgagaagagtagacctattcaaaccnn

SEQ ID NO: 11820 - DNA, 2552 bp, Homo sapiens
  misc_feature 1, 2551, 2552: n = A,T,C or G
ncgacccacgctgctgttaccgggagcgcggtggccacggaacgctgcccggagccgcgcgagggaggacccgacgcgcggcgtttacccagcgcagcgttccaccgctcgggtttggctggaatagctctccagacccccagctggccatgtggtgagttcagggcccaaatcaagtagtaccagcaatcagggaactcctatctgttttgaatggattcacaccagccacaagcctggaaagatggtgtcacaatctacagtcaggcaggattctcctgtggagccctgggaagggatcagcgatcactctggcattattgatggttcgcccagactcctgaacactgaccatcctccttgccaattagacatcaggctcatgaggcacaaagctgtctggattaacccccaggatgtgcagcaacagccgcaggacttgcaatctcaggtgccagcagcagggaacagtgggacccattttgtgacagatgctgcctctccctcaggcccttcaccttcgtgcctcggggactccctggcagagacaacgttgtctgaggataccacagactccgttggcagcgcttctccccatggctcgagtgaaaagagtagcagcttctctctgtcctcaacagaggtacacatggtccgcccaggatactctcatcgggtgtctctgcccacaagccctgggattttggccacctccccatatcctgagactgacagtgctttttttgagccttcccatctgacatctgctgctgatgaaggtgctgttcaagtcagtagaagaaccatttcttcgaattccttctcaccagaggtatttgtgctgcctgttgatgtagaaaaggaaaatgcccacttttatgttgcagatatgattatatcagcaatggagaaaatgaagtgtaacattctgagtcaacagcagacagagagctggagtaaagaagtcagtgggttacttgggagtgatcagcctgactctgaaatgacttttgataccaacataaagcaagagtctgggtcttctacttcttcatacagtggctatgaaggttgtgctgtgttacaggtcagcccagtgactgaaacacgtacttaccatgatgtgaaagagatttgcaaatgcgatgttgatgaatttgttattttagagcttggagattttaatgatatcacagaaacctgtagctgttcctgcagctcctctaagagtgtcacttatgagccagacttcaattctgcagaactattagccaaagagctgtaccgcgtgttccagaagtgctggatactgtcagtagttaattctcagctggcaggttccctgagtgcagctggctcgatagtcgtaaatgaagagtgtgtccgaaaagactttgaatccagtatgaatgtagtacaggaaattaaatttaagtctaggatcagagggactgaagactgggctcctcctagatttcaaatcatatttaatattcatccaccactcaagagggaccttgtggtggcagcccagaattttttctgtgccggctgtggaactccagtagagcctaagtttgtgaagcggctccggtactgcgaatacctagggaagtatttctgtgactgctgccactcatatgcagagtcgtgcatccctgcccgaatcctgatgatgtgggacttcaagaagtactacgtcagcaatttctccaaacagctgctcgacagcatatggcaccagcccattttcaatttgctgagcatcggccaaagcctgtatgcgaaagccaaggagctggacagagtgaaggaaattcaggagcagtcttccatatcaagaagctgttgaagacctgtaggtttgtaacagtgcttaaaggagaagggctttatttgtgaattttgccagaatacgactgtcatcttcccatttcagacagcaacatgtagaagatgttcagcgtgcagggcttgctttcacaaacagtgcttccagtcctccgagtgcccccggtgtgcgaggatcacagcgaggagaaaacttctggaaagtgtggcctctgcagcaacatgatgcccctgagtactgtgaaaaagactgttcaacatgccttatgataacaccgatttgtgtctattattggtgacattgttttagatattgggtattgtatattaaggaaaaagatggtctatattctctttattgcatatacttaatgtttcaaaagaatgcagattctgtgtttaagcacagggctgatagttgtggttttgtttacaaatgttctgttttggctgctattggttttttaaagaggttttttatacttttgtatttgaatagttatgtttcactgatgctgagccagtttgtatgtgtgtgcatatatgtgaactgtaactgacaagatgaattactcagtttctctttctctaaagcttgtttgatgaaactggttggtcctttcagtgaacaaaaatatgaccccaaaaaaaaaaaaaaaaaaagatctttaattaaagcggccgcaagtcttattcccann

SEQ ID NO: 11821 - DNA, 414 bp, Homo sapiens
actgcctgaaagggctgtagggacttacctgtgtcacccagtgtcagcacataggggctgagtgatgctggaaacatagaatagagagcttcctctggactgctctctggctgcctgggacccaggcagacctcctgtttgatctctgctggggttgctgggagcaggaaacacctacctcgggggctttctcttgctaaggggaaggaagtagaggttctgaaacctacgaaagtctcctgcccctgggtagaggattacaagacaccagggctatagaagccactggtgctgttacctggtaggggacaggcctccctgcagttgctggtgatgtgggcggaccaggcctatagcttctgctgagtatggagtggacaacaggaaggcccttatgggctgcattgacactgt

SEQ ID NO: 11822 - DNA, 544 bp, Homo sapiens
acgcggggatgggtgtgagtgtgctctgccatgagagattgtcctgttcagggctggttcccacctcactccgtgagctgctgggatggtctctggccacccatggccatgaactggaaataagcaggtatggacaaggttctgacccttattattggaactcaaatccagatggagtttgttgggacttcacatcattggaaggtgaatagaaaagtatgtcttaagaatttcaccatgttttggaagaattgcagcaagaaaaaaagaactcctttgtttccaccccatttcttttaaggaaaacctggaatatctgagggtgcaagctgagaaaagtctgcttatctgttccctactctggcaatcaaaaaggatccaagtctactgttctcttctcctggcactcttaacttgcacacattgcaaccttttatggcaaagtaatggtcaagctatcctaacaaggacgagcccttattaaataattcactgtggttgggaaatggtgaagaagccatcttcttttggcttcttttctctg

SEQ ID NO: 11823 - DNA, 519 bp, Homo sapiens
ccgggcaggtacgcggggggataggcaattaatttcatggagagtaggaggtgtgggttcagctgctgcttttttttttttcagtgaggcattatctgaatgatgctcattctctcttgagtctggacttcgtgcaacaagcagcaactggatattattttaaaataagcataagccacccaaagatactgatctgggtccttcttttggaagaagagttgattgagaagtgcctcttggttaaggattaaccacagggaaaaatccagcagaaacagaagaactgtgggtttcttaccccagccctcaaggaagctatgccgtgaaaggggtactgatacactgacatacagcaagttggacggggcatcagttcttcatttgtggagtggagaaaagaagaggaaatctctcatttggggcatttgaaggatggcttccctgtttcatcagcttcagatcctggtctggaaaaattggctaggtgtaaaaaggcagccgctttggacacttgtcttg

SEQ ID NO: 11824 - DNA, 551 bp, Homo sapiens
  misc_feature 550, 551: n = A,T,C or G
acgcggggaatgcaagaatcaagtgtgtaatctctgtggatttaaccctacaccacatttgagtgagattcaagaatggctttgtttaaattgccaaacccagagagcaatatcaggacagcttggagacatacgcaaaatgccacctgcaccatcaggacccaaagcatctcctatgcctgttcctacagaatcatcatctcagaaaacagcagtgcctccccaagtaaaattagtgaaaaagcaagaacaagaagtaaaaacggaagctgaaaaagtcattctggaaaaagtaaaggaaacactatcaatggaaaaaattcctcctatggtaaccacagatcaaaaacaagaagagagtaaactagagaaagacaaagcttcagctcttcaagaaaaaaagccactccctgaagaaaaaaaactaatccctgaagaagaaaagatacgttctgcagaaaccaatccctttccaactctgaaaggcttttactgcaactgaaagcaacatctagcaatgcctactacacaccgggcactgaatattacnn

SEQ ID NO: 11825 - DNA, 278 bp, Homo sapiens
aggtactgtgtcagctttttacattgagctagtgccattgggggtggggggtaaaagctattcttatttttaaactcttcaacattttttaaagtcttcaacatgatctttatcatgttgtgatgtgaccgcctagatttccattttgaggctctcatataatttacttgaccagtccctactggttgacaggagaccatcatggttcctatgatttctcaaagtgtgacccccaacaaacacctgtcctagaaacacctgtcccagaaacacccagt

SEQ ID NO: 11826 - DNA, 388 bp, Homo sapiens
  misc_feature 383, 384, 385, 386, 387, 388: n = A,T,C or G
actgctgagagcacaaaatcatcaatcaaaccgcggagaatgcagcaggctgctcctacagatcctgacttaccaccaggttatgtgcagagtctgattagacgagttgtaaataatgtaaacattgtgataaataatctcatactaaaatatgttgaagatgatatcgtcctttccgtcaatatcacttctgcagaatgttatacagtaggtgaattatgggatcgtgcattcatggatatttctgcaactgatttggtgctgagaaaggttatcaatttttctgactgcacctgcccggcggccgcccgggcaggtacacactagctgataagacactgttgcccataatgtctattttattggatcagcaatttataagnnnnnn

SEQ ID NO: 11827 - DNA, 432 bp, Homo sapiens
  misc_feature 1, 2, 3, 4, 5, 6, 432: n = A,T,C or G
nnnnnncgcggccgcccgggcaggtaccgagcttcagtagcagtctaacaggttcctttctgtctcttccaaaaagcggggacttatcctcatggcttcaaggtcacctgcagtccttagctgtcccgatagacttctctctccaaaagtccctatttttagctgttttcacaggggcacccagaggcaaatattatacagaaactgccacatgtagactgtgataacccacacctgctggacgggaagttaacctttgtataaagaagagggttggctgagtcaatttatgacaagaacaatttggaaaaggtaatgctggaactactcaagtcctttcttaagcatcctccagcatttcagaagcacctaccaattaatatgttaattacaaaccattctcacctgttcaggaaagggcccctgaggtcn

SEQ ID NO: 11828 - DNA, 577 bp, Homo sapiens
  misc_feature 571, 572, 573, 574, 575, 576, 577: n = A,T,C or G
acagtgtggcctaaaacagaagaatgtttaactgcatgaaggcagggtgctttgtattgctgggcttggtgtatatttctttgctatctagtttaatatattgagctttacatctgtgccagccttgcatgtccatatacctttggcaggcatttctagtcaggtggcatggggcaaggggtgtgctacgttttaagtccctcatttctccagcctgtccaggtagtgtctacgtctccaactcactcaggaaggcaggagacttccagattcactccactggtatcaagagttaggttctggtgagagagctggcagaagcttcaaaggaccttgcgtcttagcctcctctttttttcctgtcctttacagcaagttgttgcctctaattttcagaaaatcgcagcacattttcaggagacctgaaatgcggtggactgcttcaacattaaattattttggcagacagggatagtatttagtgtaacgtcacctatatgcttatcaaaatagggtaagggagtcataattattttaatgtctaatattaacgggtctttaataaattacnnnnnnn

SEQ ID NO: 11829 - DNA, 439 bp, Homo sapiens
gggagaatctcctgagcttgggaagttgaggtgcagtgagctgagatcgcactgctgcattccagccagggtgatgggagtgagaccgtgtcttaaacaaataataataatttgggggtgatgtagacagaaataaggacagaggtatgaaaaggaataattatttagcattttactagccagagatttgggcagtcccaaaaagcagcttttctaatctccctctcctttcccaaaaaactttaatcagatcctttagtatcctatcatctttgggttatttacatactactttttggaggggggattgtggaaagctatcgagatctttgaaagcattgatgattagcaagatgattattcctgtaagaagccttaataggagaaatgcaagtgtaagttaacactggcttcttaaattggtcagtgaaagttggat

SEQ ID NO: 11830 - DNA, 528 bp, Homo sapiens
  misc_feature 525, 526, 527, 528: n = A,T,C or G
acgcggggatggtagggactcggttgccgcttctctcttctactgtcccagctgtctctgttttttaggcaactttctgtggctttttcaagagtggagatttggctggagcaggattaggaagcctcctgctacacgctttccctgaaaaaacctcctctctggaaggggcctgaggtgaaaatgattcacaaggcagctgaggagttctggaaagagccccaaagaccaggctctgaggcctccctgggccacttactaactaaatgggagaagattacttgagaaaaagcctataacagtgcccaccatgataccccgttgtgaatgaccatgtggaggtagtccgtccccacctggagtggatcagagacaacagaggccaacggggaaaaagtttgagctttgccaggctgatattggctgctgaataagggtgattttctcttgtaaaatggcttgaaccccaaagctatagcacaagcaagcagggtcatcagaagccactccattcttctggaagcnnnn

SEQ ID NO: 11831 - DNA, 293 bp, Homo sapiens
  misc_feature 293: n = A,T,C or G
actttgaatgcttcctcctggaagtgagctactcacattttatgagtcaaagcaagtctcttagccccacttcactttaatagggcaggtatcactagccctaatgaccacttcaaggggtagaatatgaggctgttaatattaaggaaacaactctgaagtctaacattattgaaaccagcattctggtaaacacagacaaactatcaaagacaataataataggatcataaaagtttcagaaagcacagacacggctgaaacactaacacccaactggcaatggaatcatn

SEQ ID NO: 11832 - DNA, 692 bp, Homo sapiens
  misc_feature 1, 2, 3, 689, 690, 691, 692: n = A,T,C or G
nnnacctctagcattcctcatagtccttgctgacgagggcagctgtgatatagaaaaataacatccctttatggctatctttgccaaaatagcttctcactctgcaggcccagtctgatccaaacctcagaatctcctggactaacaacaactcaggccattgtgatttagaagtatctcagtactagagaagacaccaggatggccaggagacaatggcagcattagaaggccctagttgaacagaatatataatttcatttaacagctgccgaagctcattacgctggcatgaatgattctttacaaccacaaaaagaaagaaaaacagacagcagcctatttacagatgcagtgagagctgtcccttgctttccagctttcaagggaagcaaaacatgtctgcataataactttaacctataattcaacgctatttaaaagtgtagcttgccataagcttacagggatatttttatactacattttcaaaacctccacaatctctcagcagtttctgactgtattgcttccaggcttgctgctacctgctgcggggccaatcaagcagcaatctacccagcacaggccatctttatggcacacaccctcctggcactcaaacatttttatccaaacatactttgcatatcttcatgttttcaacctgaggaaagtataactcaaannnn

SEQ ID NO: 11833 - DNA, 591 bp, Homo sapiens
  misc_feature 1, 586, 587, 588, 589, 590, 591: n = A,T,C or G
nagacagggctgggtcgaaaggagttcaggcaggaaaggtgggagtgcaggtaccaacggctcccttcagttttgcccaagggccgtgccttggccctgcgcgaatgcacaaagcagtgtttgatagagaaacccttttgagtaccagccagttttgagatatacctggtttgctttaatgttattaaattgttttggtgagttttgcaaatggacaattgaactttgttctgccaaattcttttttattgcatttaaacttcagggttttttatttccggcttattatgaatggattagtcattttgtgaatataactcttcattgagtttagggagaaataggacgttagatccgaagatgctatttgtttaatcaccagaatggacaaaattatacttcatttactatcagggaggcatggggagaatagaggcctaggggtgcgtcttgtggctcttactgtttttgtgtatctggtttttttttttttttgagagggcttcccattatgttgcccgtgctggaccccaactcctgatttactggctctagagatcttctcgcctcagtctcccaaggaccnnnnnn

SEQ ID NO: 11834 - DNA, 382 bp, Homo sapiens
  misc_feature 380, 381, 382: n = A,T,C or G
acactcagtgccttacacgtgttgtttcatttcatcttcacaatagccttaggagataggtgccatcatttctactttatatatgaggaaactgatgtgaggggacaatgtgtgcccaggccacccgatcagtgattggtagggctagaactaaacccaaggcctgtgactccaaatcccaccttttcacaaaccagagtgcctcgacagccaagtcttcaatactaatttactcacggtgtttgtaataaaatatgagggtaagagaggtcaatgttttttttttgaacattgagattcttcagaaccacacaactgtctagagctatgctgtttgatgtggtaaccattagccaccgatggctacattcatttaaagnnn

SEQ ID NO: 11835 - DNA, 2307 bp, Homo sapiens
  misc_feature 1, 2, 2283, 2284, 2285, 2286, 2287, 2288, 2289, 2290, 2291,2292, 2293, 2294, 2295, 2296, 2297, 2298, 2299, 2300, 2301,2302, 2303, 2304, 2305, 2306, 2307: n = A,T,C or G
nncgtccgctgacgcgtggctcggtcctcgctcagcggcccggcaggccgcacaactgtaaccgctgccccggccgccgcccgctccttctcgggccggcgggcacagagcgcagcgcggcggggccggcggcatggctgtgtcctggaggagctggctcgccaacgaaggggttaaacacctctgcctgttcatctggctctccatgaatgtcctgcttttctggaaaaccttcttgctgtataaccaagggccagagtatcactacctccaccagatgttggggctaggattgtgtctaagcagagcctcagcatctgttcttaacctcaactgcagccttatccttttacccatgtgccgaacactcttggcttacctccgaggatcacagaaggttccaagcaggagaaccaggagattgttggataaaagcagaacattccatattacctgtggtgttactatctgtattttctcaggcgtgcatgtggctgcccatctggtgaatgccctcaacttctcagtgaattacagtgaagactttgttgaactgaatgcagcaagataccgagatgaggatcctagaaaacttctcttcacaactgttcctggcctgacaggggtctgcatggtggtggtgctattcctcatgatcacagcctctacatatgcaataagagtttctaactatgatatcttctggtatactcataacctcttctttgtcttctacatgctgctgacgttgcatgtttcaggagggctgctgaagtatcaaactaatttagatacccaccctcccggctgcatcagtcttaaccgaaccagctctcagaatatttccttaccagagtatttctcagaacattttcatgaacctttccctgaaggattttcaaaaccggcagagtttacccagcacaaatttgtgaagatttgtatggaagagcccagattccaagctaattttccacagacttggctttggatttctggacctttgtgcctgtactgtgccgaaagactttacaggtatatccggagcaataagccagtcaccatcatttcggtcataagtcatccctcagatgtcatggaaatccgaatggtcaaagaaaattttaaagcaagacctggtcagtatattactctacattgtcccagtgtatctgcattagaaaatcatccatttaccctcacaatgtgtccaactgaaaccaaagcaacatttggggttcatcttaaaatagtaggagactggacagaacgatttcgagatttactactgcctccatctagtcaagactccgaaattctgcccttcattcaatctagaaattatcccaagctgtatattgatggtccttttggaagtccatttgaggaatcactgaactatgaggtcagcctctgcgtggctggaggcattggagtaactccatttgcatcaatactcaacaccctgttggatgactggaaaccatacaagcttagaagactatactttatttgggtatgcagagatatccagtccttccgttggtttgcagatttactctgtatgttgcataacaagttttggcaagagaacagacctgactatgtcaacatccagctgtacctcagtcaaacagatgggatacagaagataattggagaaaaatatcatgcactgaattcaagactgtttataggacgtcctcggtggaaacttttgtttgatgaaatagcaaaatataacagaggaaaaacagttggtgttttctgttgtggacccaattcactatccaagactcttcataaactgagtaaccagaacaactcatatgggacaagatttgaatacaataaagagtctttcagctgaaaacttttgccatgaagcaggactctaaagaaggaatgagtgcaatttctaagactttgaaactcagcggaatcaatcagctgtgttatgccaaagaatagtaaggttttcttatttatgattatttaaaatggaaatgtgagaatgtggcaagatgaccgtcacattacatgtttaatctggaaaccaaagagaccctgaagaatatttgatgtgatgattcacttttcagttctcaaattaaaagaaaactgttagatgcacactgttgattttcatggtggattcaagaactccctagtgaggagctgaacttgctcaatctaaggctgattgtcgtgttcctctttaaattgtttttggttgaacaaatgcaagattgaacaaaattaaaaattcattgaagcaccaannnnnnnnnnnnnnnnnnnnnnnnn

SEQ ID NO: 11836 - DNA, 382 bp, Homo sapiens
  misc_feature 1: n = A,T,C or G
nctgcaccgcggtggcggccgaggtacttttttttttatcttttattttgaacttctgtttagaccaagaggaagaagccaaaggccttcagaaaccccaaaagttaacacaacctcatctggctgctctaaatgcagaagcatttctaagaagtagcattagggggttccccagatgaatcttgaagacacatcagggccttctcacccctcacttggccaaagatgtgccgtgctttcgcaacattctgccaattcttatttctctttcactttctgagaaatggggggaaaacacaacccaaacaaaccaacaaaagtagaaatctagctaggccagatgtccacaagcttgaaagccacaggctcgtcatacccgcgt

SEQ ID NO: 11837 - DNA, 512 bp, Homo sapiens
  misc_feature 511, 512: n = A,T,C or G
acgcggggtgtttttgaaagggtctgataggaattgcaatggtgtaggttaagtgagataaagtcacatttactgagtgggctctttggggacagcatacatcagagcatatagtcttcttggtctagcaaagaataatggttatgaaaattaaccatttagggctagagaaggtcttggaaattgtatagccaagcctcttcattgtgtcagtgaggggattgattctccagctgatttaggtctaaatctgtgacaatgatttatatacctattcatgaccacttaactggtattattaatggcgattaatatgagccaagcagtggttgaaatgctttgcatatattaacccattactccacaacagctccataggtaggtgtattattatcccgcttgtaaagatgaagaaactaaggtaagagagtgtagttcactcagctaagatcacatatttcagcctatttgtcaaatctgttcaattttctctatcaccacaatccctacnn

SEQ ID NO: 11838 - DNA, 267 bp, Homo sapiens
  misc_feature 1, 2, 3: n = A,T,C or G
nnnagaccgctcgatagagcgcctgcgcgcgcgcacgacctgacgcacgaacgccagaacaccgtggatcaactgtgggagagcttgtctcagataaggtcacatctgagatactgggggtcaggattctacatgtgagtctgggaagacactgttcaccccttaacatccctgttctccagggtcttgaaatatagttttgggtgcaaggaaaggcagctaagtaccaagttaattatgagaaggaccagttttgaggatttcagg

SEQ ID NO: 11839 - DNA, 582 bp, Homo sapiens
acgcgggggaagtctctgtggtgacagaaccagtttgtaacaggcttgtctttcacggtcctgtctcagggttgctggcaggcttgcgagaagatctgacaagagtggcagcagaggcgtctcagtgaaagacggaaaggcaagaaacaggaggcttaaacaggcagggcacattgactgctctgctgctgcaatgggttggctggaagaactaaactggcagcttcacattttcttgctcattcttctctctatgcacacaaggtcttgaaacatggattttttcctaataattgaagacggttcaagaaaatatcttctacaagaaaatatgcaactaggagtcctgcaatgaacgttgtttgctttcttcaatatcaattataataatattttatctttaaaatcagaattttaccgaaacagttttgtcattttattatttaactgatgagaaaaactatacgtgatttagagttgccatgagtcctgattcaaatcagattacttttcttttgctaaaaacttagcgcagtagcccacctgcaatcctgcttgcttaaggggaaatggtacctgccc

SEQ ID NO: 11840 - DNA, 518 bp, Homo sapiens
  misc_feature 514, 515, 516, 517, 518: n = A,T,C or G
actggggagaactcagagaagaaaggggatgcactgctgggcctcatgagttggcttatacttcaccttgagctaagcatactaatacccagtccaggcagcattgaacagctccgcgcagatctcaccctccaaaaaacaggaagaaaaagccctctcactgcaagcaagatccaaagagagaagagcaagggaggggctgatgtgagcatgcccagatccatcccccacccatattcgccaccaagggcggagacaggcaaagagggcccctgtcctggaaatccctccatgaggaagcagtgaaggatgcagggcccactctgtcagtgtctagtgttccaccgatcctacatagtaattttgaaagacgatagcatgatgttcctgaaaggaaaaaaaaagtttcctctatgaggtcattaacatatatcttgagtgactttattggcttctggttcattttgacatttttgtaaattctatagatcttttatttactcctgggatatannnnn

SEQ ID NO: 11841 - DNA, 444 bp, Homo sapiens
  misc_feature 441, 442, 443, 444: n = A,T,C or G
accattctccttcaggctggctctatgttcttcatgggcagcgtctccacggtcatgcaccatgccgctggcttctggaccccgaaggtgctatggagcccagctccattccactgagtccaaaactcacgaatacagaggccaccagcactactgaaatgccagcagggtgtgtcggcatttggagggccttccagcaaagctttgaacatgctataattgctccaatataacaagtgatgttccaattaataagataatttacagcaatccacagtctctgccacaggtggttctttctccaagagggctggcccgggacagaactggacaatgcttgaagcctctatctgtccctctgcccataataactcctgtctcataggaaatacaattaagaaataaccattgtgctctgaggggaaggagggaacaaacacnnnn

SEQ ID NO: 11842 - DNA, 508 bp, Homo sapiens
  misc_feature 507, 508: n = A,T,C or G
actcacagaggagatgggcacgagctcaaagcctagcatctttgatcttactgttcacctggtaatgttaagaaattgcccctttgtgctaatcctcagcagcagagagagctatgcaggttcaattactaaaaaattctcccaattaattttttgggcattagtctcaaaactggttactccgtgtgttgttctaatggtgtttcttctttttccacaaggatttcctgagattggcatagtcccctaattaattgaaaaggacctaaaagaataattggaaatatgcttttgatggttgttgtatacaaatgttctcagaagcttagggaaatgggtgtgatttcagattttcacatacataaaaggtgcaaggtcttctgagggaatggtttgcatgagctttaatgtatatagttcaaaggacttacagatgaatgaatttggttagtcaagtaacccatactaattggacagatggagcaagacatggatgaggaacaccann

SEQ ID NO: 11843 - DNA, 323 bp, Homo sapiens
tcgagcggccgcccgggcaggtaccatatcctgggctggttaaaaacataccatccctgtgatggtgatgaccattgacttcactcttcacaagaatttatgtcaacgtgtcctagacatttggtagtagaggtatagctgtagtccaaacctctaccaagctatggtttctgagagccctgtatgttaagtgcctacggaatgctcagcatagtcaaagacaccttagattcacattatacgaggagccacactgcagttattcaagattaagcactggctggagaaactggctgtatgaactccagccttgggtgcgctgt

SEQ ID NO: 11844 - DNA, 489 bp, Homo sapiens
  misc_feature 481, 482, 483, 484, 485, 486, 487, 488, 489: n = A,T,C or G
acgtcaagacacttttaaactatacatgacagttccttggggatctttctccaactccctaaccttaattatgtcactcccagatatgctctcaaagtatcctgtacttttttttttgagatatggggagatggcaaggaacaaaaagagaggaaaatggacagaaatgaaaaggtgaggtcacccaaggcgaacttagtcagcttgccaattttacctggggttcagacctcactcgattctttccatttccatgtcgtggatggggggaggtgcaggaaaggggacactcatctgggactgggtaactgtcaagcccaatctaatcaaaaccaccctaaagcacacaaggactggagaaaaacactaaaaatttagaacaagatatttagacaagatgcttcctaaattctgtgaaattttcatgaaataagattccaaaccaaagtcattatctctctcttttccttaaatagactannnnnnnnn

SEQ ID NO: 11845 - DNA, 635 bp, Homo sapiens
ctcaccgcggtggcggccgaggtactacgaagccatcttggctctgtggaaccagctctacatcaacatgaagagcctggtgtcctggcactactgcatgattgacatagagaagatcagggccatgacaatcgccaaggtatgtcctcagggccacttaggctgcctggagggagggcagcgctgccccccgcagtgcctgtgtccaacagttcaaccttcttgctgtgtagcagtgcttttgtgtctcgtcaagcaagtcagctcagccctccttagaggttctggtctgtccaatagagaacgggagggattagcatatggctgattatgagagaaagaagcaatactaattcaggtggcctgacaagcaagccagaagtgcctgtggaaaagttatgcactcctgtaagattctggaccctatgctcctttgatgtaatggaaagttaggtcataaaggattaactgggtatcacaaaagtaaaaggtgggatagaattcttggaagagcacccaaagcattacttactctaaatcagttgttttcagatcatggtctgaagaatcctagcaggagagggagatcctttaggagtgacagggatggaagtgaggagaggggcacagaaagt

SEQ ID NO: 11846 - DNA, 610 bp, Homo sapiens
  misc_feature 607, 608, 609, 610: n = A,T,C or G
ggagtcgacccacgcgtccgattccagaaacacatcgctttcttcctctgtactggagtgtagcaacacaaagacacagccaacaatttcacttggtggtctgatgaactctcataaatgccttgtttacagcataagaatgtaagtacatatttatatatctctctctgacaaaatatcctttccatatatctgatggccattaatttggacttaactagttttgtccaaaaatgaaattccaagggccagggaagaataaaatgtacttgaaaaatttcttctaactggtataaatattaaattaaacttatatgctaattggaacaataatggccctttggatgattctacattacaagcgtcaactgaaataaggtccccaattgtcactgagaacatcaaagggatcttactttgaggaataaatatgtgattatagtgattatgtgtgaattggggttatattcttcaataaagaaacatgctgggatttacaactctcctctgagacttagtcaaataaattaacacatattgaacacccacaggattcctgcagcagaataaacaaattattttaccaacctgcaaaacatcagctagnnnn

SEQ ID NO: 11847 - DNA, 646 bp, Homo sapiens
  misc_feature 632, 633, 634, 635, 636, 637, 638, 639, 640, 641, 642, 643,644, 645, 646: n = A,T,C or G
tatagggagtcgacccacgcgtccgttctaagcctgcccgcctggggctctgtaactatggctcctaacgtggggagcccacaatctagctatatcatgttagcgagagctctttgtatactgaaacaataaacttaccatcttgatgagttttacatgtagaatggcttaggttataaggtactgccacctcattccactgttgagaattgtctaatgcaaagctcactttttaaacatggataattggacagtcatgagtggatcatcgaagggataagcaaaatatatgtcaaactgagaattaatatctatcaaaacacttgctattatttggtagatgggaggttattttatttttaagaagtagattggctgaatggaaaagcaaaatgtggcataaaataaaatgggatattgttcagcagtgaaaggaataaagtactgatatggactacaacatggatgaaccttgaaaacattatggcaaagtgaaagaagccagttacaaggccgggcaccatggctcatgcttgtaatctcagcactttgggagaccgaggtgggtgaatcacttgaggtcaggagttcgagaccagtctggacaacatggtgaaacccccgtctctacnnnnnnnnnnnnnnn

SEQ ID NO: 11848 - DNA, 588 bp, Homo sapiens
  misc_feature 587, 588: n = A,T,C or G
tagggagtcgacccacgcgtccgcagtcaccagggaaacaagcaacatcatcatggcacaggtgagcagggacctagagggtaaaccaaagcccaacatgcagagccatcataaagatcttcacccagagggaaagactctgaaatctgaacatctatctataagcaaccgccttttcagtcctttaaagaaaggaattaataacaaatgttttcaagacatccacaattaaaaccactcatgcaccacacacacagcaaccaccctgcacacactgtctcattaaacccagacactgagaaatcactcaaggccttctctgcagttcagtaaggctcatgatgatgatgagatctgttttagaaagtaaactcttcaggagccaaactatattttctttgcacacttcagttgtgtgagtaaatgtgcagcccaactacagtatgattacaaagacaaccaatgaaacacaaagtctgtaaagcgaagagaccacctggagaatttctttcaatcaccagagattattagcctacattcttagaaatgtgactttaccatagacaatattttctccaagatgacann

SEQ ID NO: 11849 - DNA, 634 bp, Homo sapiens
  misc_feature 632, 633, 634: n = A,T,C or G
gagtcgacctacgcgtccgcggacgcgtgggtaaagaatgggcagccaagccaggcgtggtggcacacacttttaatcccagcacttgggaggcagaggcagacggatttctgagttcgaggccagcctggtctacagtgagttccaggacagccaaggctacacagagaaaccctgtctcggaaaaaaaaaaaaaaagaatgggctgccaatccacagccaccctgacaacggggggtgggggtggggtagctaaagccaatttgaagaaagcccctatgaaagggcgctttttccttcaaggtacagaccagtccaaaatgtacagacacccctcactatgaacacaaacaatcctggtgtaaattacctaactacagttggaaatctaactggctttaaaaggaaaagagagcctgccggctctttgtggttgccattttatatagatgatatatattgagctttggtctggtatgctttggaatgcttagtgcaagccctggttgccccaaagacccaagtgatgttatgtgaccttgaccctaagttacttctggttggtgaataaagatgcctgcagtcgatagctgggcaggagagaccaaggtggggtttagggttcctgagcnnn

SEQ ID NO: 11850 - DNA, 463 bp, Homo sapiens
  misc_feature 461, 462, 463: n = A,T,C or G
actacagacccatttaaaaggtgaagaaactaatggacataagtttcacagactcaaagtcttacggagagtttggtaaacccagatctcaactcagattttccagttctgctaattttccccattcccctctggtgctgccttttcaacttgggttgtcaacaggcaaatgggaccagtggaagcattcagagagaagattgatggttttcagatgtttctttctctccctgacatgatgtcttaggcacaaccacagtatttcaagtggttgaaaatcaagctgagctaatgggggctggagtgagggtggaagggcagacccagagactcaatctaccagatgctcattctcttccagcacccaccctaccccatcaattgttctggcacccaccacaaagccctaagagccttggtggaaaagtctggaaaatactgtggtaggggcccatcaaagnnn

SEQ ID NO: 11851 - DNA, 505 bp, Homo sapiens
  misc_feature 504, 505: n = A,T,C or G
tatagggagtcgacccacgcgtccggccaccacatatgtggtaatgtgttatagcagcaataggaaattaaaacaattaggaaactgtgatagggacaacccatgtgagaagtgacagtggataaagagaaattgttgaactgcagaagtttcaagaagatagaattgctgggcacatcagggtacgcttaagtaaataaaaaaataaaataaaaagaattgttgagtgtgctggctcacatctgtaatcccaacactttgggaggctgaggtgggcggatcgcttgaggccaggagttcaagaccagcctgggcaacacggcgaaatcccatctctacaaaaaattcaaaaattagccaggcatggtggtgcacgcttgtagtcccagctactcaggagctgaggtgggaagatcgcttgagcctggaggtcaaggctgcagtgagctgtgattgtgccactgcactccagccttttttttgacacagagtgagactccatcnn

SEQ ID NO: 11852 - DNA, 691 bp, Homo sapiens
  misc_feature 686, 687, 688, 689, 690, 691: n = A,T,C or G
tatagggagtcgacccacgcgtccgctcaattccatgtcctaaaagggaggtcagagagttttctgacaagtcttataggttgtcagcacaattgtgtcaaggtactcaacagttcttgagcatttacttaaacgaacttatgaaagactgacccataagataaatgggttatatccacttacaatgagagatacctttccagtgacctgaagaagtgtctagagtaccaagtgtccattaggaatgatgagaggcaatactgagattagtctgtgaaaaaattaagtaactaaaatactaggaatatatgatatgtacatacatcttcatatatgtttagtttacaaatatatgtggtatataacaggggactgatttagttagatttcaagtttgaaggaaacctaaaggataagctgaagggaaagatagagaaaatagaggcctaaactaagcccggtagtgggagttaaaaagaaaggatgaatacaaaatttctgcattaaaatgagtggtaccgtttgtccctcagtatctgcagagaattagttccaggacccccatttaccaaaacctggggatgctcaagtcccttatagttgagcctctgtacctgcaaatccctgcaggtacagaggaccaacagtatttggacagcagtgaataaagaatctgggcaagggcnnnnnn

SEQ ID NO: 11853 - DNA, 2068 bp, Homo sapiens
  misc_feature 1, 2068: n = A,T,C or G
ncgcgtccgtgattctttcccattttgtgggagggcccatgtcaaccagctcagagtcctccttgattattaaacaactaactctaaagttgatgcagcactcttggtcaagtctctgctctgacactggatcctgctaagcttctggaagaatttccacgttggctggaaaaactctctgctcgtcatcaaggcagcatcatcatcgttattgattctatagatcaagttcagcaagttgaaaaacacatgaaatggctgatagatccactgccagtgaatgtaagagtaattgtttctgtgaatgtagaaacatgccctccagcatggaggttgtggcctacacttcatcttgatcccttaagtccaaaagatgcaaaatctatttataattgcagaatgccactctgtagacattacattgagtaaagagcaggagaagaagctagaacgacactgtcgttctgctacaacctgcaatgccctttatgtcacccttttcggcaaaattgatcgcgcgtgctgggagagcaggcaatttagataaaatccttcatcagtgtttccagtgtcaagatactctttcattatatagacttgttctgcactctatccgggagtccatggcaaatgatgtggataaagagctaatgaagcagatcctctgccttgtcaatgttagtcacaatggtgtgagtgaatcagaactgatggaactctatcctgagatgtcctggactttcttgacctcccttattcacagtttatacaaaatgtgtttgttgacttatggatgtggcttgcttaggtttcaacatctgcaggcttgggaaacagtgagattggagtacctggaaggccccactgttacttcttcatacaggcaaaagctaatcaactatttcaccttgcagctaagtcaggacagagtgacttggagaagtgcagatgaactcccgtggctttttcagcagcagggaagtaaacagaagctgcatgattgccttcttaatctctttgtgtctcaaaacctttataaaaggggacactttgctgagttgctgagttattggcagtttgttggcaaagacaaaagtgcaatggcaacagaatacttcgattcattgaagcagtatgagaaaaactgcgaaggcgaggacaacatgagttgcttagctgatctttatgaaaccttggggcgatttctcaaggatctaggccttctcagtcaggccatagtacctttgcagaggtctttagagattcgagaaacagctttagatcccgatcacccaagagtagcccagtccctccaccaactagcaagtgtatacgtgcagtggaagaagtttggcaatgcagaacaactgtataaacaggcgttggaaatctcagaaaatgcttatggtgcggaccatccatatactgctcgtgaacttgaagcacttgcaactttgtaccagaaacaaaataaatatgaacaagctgaacattttaggaaaaaatcctttaaaattcatcagaaagctataaaagaaaaaaggcaacttgtacggatttgcccttttacgtagacgggctttacagttagaagagcttacattaggtaaggacacacctgataatgctcggaccctcaatgaactgggtgttctctactatcttcaaaataacctggaaacagctgaccagtttctgaagcgttccttaaaatgagggagcgagtcctaggaccagatcagcctgagtgtgtcagtcttgtgaataatctgggcagtctatgcatggacacgaaccgtatgataagcgaagaacttatgagagagcttagatatcgagacgggcatttggtcggatcaccttttggtctacggggaagcattgccagctgttagaccagggcactggcaccgcggacctgtgatggtgctgacacgcggaacctgggcccagcaccatggatatcgcggtgaaaggcctcaccacaaacgcgaacgccatacacgcacaataggggcaccctgcaccacgggtgaccctataagcgagaaggcgccccccactcgan

SEQ ID NO: 11854 - DNA, 253 bp, Homo sapiens
  misc_feature 248, 249, 250, 251, 252, 253: n = A,T,C or G
accatgctgacattctgcaaagtctgcattcgcaaagcctgaaatgattccaactgctgctgaaggactttcaatgctgattgtggttggatttgattttctgattctgctatgcagccatattttagcattcagagaagcaacggagcatagcgtggtggtgaagacaggcagtccggagccgccctgctgaatgcccgctccattcctgtgctgactgtgtgaccttagggagttaacctatctgnnnnnn

SEQ ID NO: 11855 - DNA, 375 bp, Homo sapiens
  misc_feature 375: n = A,T,C or G
acaaacgaactctgaagagtcggccaagcagatcacatgactcattgagctttaatgcctgcactggagcataagcaggcctatttcctaaatgtggaagcatccagtatcgctgaaaccctcagagccgagacagtcactctgtggagagagaacagagggctgggaacccagccacggccagggaactggactctaaggacagcagcagagtctgcctttgcagcacgttatacagtttgcacgtattaccttatttgatttgatctcatgaaaaccagaaagacgacagtgactaagttcctaaaccatgagcacaagactttctggaggaaaaaggaaagccccaggaagaagcggaatttgtcaccaggn

SEQ ID NO: 11856 - DNA, 335 bp, Homo sapiens
accccaagcggggacggtaaagtcagaaaagacaaggctgggggtaatcacagagaaatctaaaaacccgctcggcctcgctactcttctccttcctctgaggtgcagaggcgcggtgggacgacaaggagttgcgagaaagggcagagctcactgaggaggcaacagagaaagtccgctaacaatttttgaaggccgcaagttaaacatgttaaaaactgtagctactcactcagccgacatctagtaaaaaagatgcggcaagatcaacaaggcatatagcttgcgcccgccagaagttccgcggcctccacacccatcccccccgcgtacct

SEQ ID NO: 11857 - DNA, 391 bp, Homo sapiens
acagtgcagcagaaggctggtaggatagtttcttccacatccatgtgaacctcagagtcatctgaccattggccttgttctcttccaggttctagctggccagagacttttttggcctcatactaactgcaaaattgcacacagttggcgaatacaccactggaagccactgtggctgcattgtcacagttcaccaattgtgcatgttatttcctgcagtgggcccaagatcactgacaggatgccgtcggggttgggctgaaggtggaaacagcacactagcttgctgtttgtggcctctttacaactgccggccccatctgagatccggaaccaacacgtgctaacctcagcccattggggccagtggggcagccggcagtggaaccat

SEQ ID NO: 11858 - DNA, 502 bp, Homo sapiens
  misc_feature 495, 496, 497, 498, 499, 500, 501, 502: n = A,T,C or G
actgcctttttggagctcctcacgcatcaccatttctctctacctatgattccttcagcttttgttaatgcaattggctcgctttttgttttgttgagtcttgatttaatttccaggctttgctcttccagctttgtccagagacacatcctgtcctgtccttaaggacttctgcaaatcagtaatcacagatgttgcgtgcagttcactgatatctactctcctcgtattttggggtggcttactgcatacccacgagtaagaacttcttgcaatcaacaggcaatttgctggggtgctggggtttgttccattatcaaacaaactgggattcctaccccagttccatcacttacaggttgtgtgtgacctcggatgaattgcttaacctcctgagcctagttttctctgctgaaatatagaaatcgcagcattcacaatttttaaactcttactactggtatcactcaattatgactggggcctggggtaccnnnnnnnn

SEQ ID NO: 11859 - DNA, 378 bp, Homo sapiens
acactccagcaatccattctttaggtcctgcttcctcaggagctttatatgagatcttctctttgagaagtgtgtcttaattacaaagtctccttattctttatgccttgagtcttggtgctggttttgatttttcctctgcctattctcctcttctcctgactgttggcctgctctaggccttgaggtctagctgtgccatgattgatagcttcactctgagccctgacacttcacatggttgctgggatccaccaactctcccaggcactaaggactagcactttctggaaaacaacagcatgcaagacttttaaaccatggctttatctagaccttatatacaggtgtgaggcctgacttctgactattttgact

SEQ ID NO: 11860 - DNA, 478 bp, Homo sapiens
  misc_feature 468, 469, 470, 471, 472, 473, 474, 475, 476, 477, 478: n = A,T,C or G
acattattattactcacatgctgtcatggaaacagaagccacagtggttgggtcctgtccaaggttaatggaggaagaagtagggaagctaggattcagattcagatttcactatgtaaagacctgtttccattatgccacattacccctcaggttttctgaggtctaggttgcttcctatcttttcctgtgtgttctatcttccttccatcctcatgggcactcatgggatacccccctctctgtataggcatcagagtccattcaagtttccaatggtcctgtggtctccacaacctggaggtgcagatccattagagaaaggagtgcagttctgattggacataagtaacaggcccagaatcacatccccaaatgttcagatccagcccagaatccccagggctttccagccttgagccatgggtaggaaactctctgagaagctagaacttaaccagcaactgnnnnnnnnnnn

SEQ ID NO: 11861 - DNA, 526 bp, Homo sapiens
  misc_feature 523, 524, 525, 526: n = A,T,C or G
cacatcttcctccatgagtggatcaagaaatattgagatggctaagctggaaattacaaaaatgttggcatactattatagcatatggttatgaaaatcaatgaatatttatatttagtattatgctttaagtatatatccaagctgatcaattaattacactttcactgatgagatgtcaattctacatttagctgaactctcatctgaactgtgtggcttctcaatgacaggacatattaaagaacatgatgaatgtttgtaatgtaatgatataaattattataatgtgttgcattaaagacatatggtgtagcattctacgttcagcttttgcatttattttctcagtgtcatgatttgctcctgtgattccagatcagttttctccttatcagtcagcatatacatattggtattaacactttttgcaaaaatcatatataaatggttgtagaatgttgttgtcattctacagcaactgtttagtttttggtcagccgatagcttgtttttcattaannnn

SEQ ID NO: 11862 - DNA, 1206 bp, Homo sapiens
  misc_feature 1, 2, 1202, 1203, 1204, 1205, 1206: n = A,T,C or G
nnactcaagctccggagcccgccaccgcccgagcgacggcagccttaccaataagcgcttggaacattggggaccgacagcactattaaccaatcaaccagaggcgtctagagcgacgttgatttgaccaataggtctgtgcaatgtcactgatggacggtagagcgcaccaaccgaaagccattgaataatgagtgacatgtgcatcagccaattggagggaggcaaagtcccgcccgctgggtggttgatgtacagcaacaggaagctggaaggggaggggcttagccgaagagtgcttttgtattggtcgaggttgaccttccacccacctctaacccagaggatgaatgatagatctgccctgaagccaatcagaagtccttagggtgaggcccacaaatgccccagaaatagcatatacattgcgccctaagtccagtctcgcccaggtgtggcaggagcttttacctgctcttcggcagtagccggctgccactcaaccccatgcctggtgagtggaaagccatcaaccttttatttagtccctctctcgttgtcgcctggggaggggcgactttgtacagtgaggcactggggtccggcaccatagtgggagttggggttgtttacccgacacttctaaggggattttcacaatcggttaagcccccgttaatcctcacatggttattgcggcgacccccatagcccacggtcccaaacgtgtgcatctgaatcatccgaagctctttctaaaggcaggctcccctggccgcctctcctaatccgactcggtacttcacggggcgtgcctagaatctgcattttagcaagggcctcgcgtggacagaattgcacgcttgagtttgagaagtactgcttggcctctgccccacttacccttaccttcttgagatgaggtaaagcacttggtaggcactaggcgggtaggtttatctttgctcccaagtctcttccgagaacttgggaaggctgcctagcttagtgagggaatccattctggtcttcagaccagtctgggtttgaaacctacacatcccactaacttaggcagggtaccgaaactccctgagcttcatgtcctcatcagtaaaacgaggttaatcacacctacaccttagcgcgatggttaaaaaaaaacaaacaacaaacaaaaaaaacttgtccatcagagaaannnnn

SEQ ID NO: 11863 - DNA, 449 bp, Homo sapiens
  misc_feature 1, 2, 449: n = A,T,C or G
nntaccctcttttcctcctttcatgcccgacatatgccttttttcctacttattgtgtaaagttcttcatttgtcatggccatcgtgagaaaaatctggggcttccctttcatcataaatgacaggttttttttctgcttccaaaatctagaattttcatatttgtaacacctggaggtaagggtcatggtgttaattataaagagagcagagagagtaggcatctgtaggaaacatcttgggtttttttaattatttgctggattcatttattcaacagttgtatatgaaatggtttttacacatgaggtcctgctaagggtagtgcttgccaccttcgtggagcttacatttggcaggaagctgtcttacactagatgaatcctatgtggatgtgcaactcaaaagaaagggttgtggactgagaatcataagtttgggggttatcn

SEQ ID NO: 11864 - DNA, 528 bp, Homo sapiens
  misc_feature 514, 515, 516, 517, 518, 519, 520, 521, 522, 523, 524, 525,526, 527, 528: n = A,T,C or G
actgcaaccgtaagtggggtatatggtttcaccgagaatgtgacatcagagcaaacactaacatcagcaaaggagtatctcagaaaagagcattttaggcacaggaaggaagaaatacaaagggctatgggcctgtagctggcgttttcaagggaccacagagtgaggggagaaggagggaccaggtggtggtgagagaactggtatcagaggaagtaggaatctgtgggttactcaaaggacctcggcctttacaatgagtaacatggcaaagtttttttaatattgtttaagcccaagaaagatactaatttacacagtaagatttatactaaaaaaaaacaaactatgacagttactataaaagagtagctcaccagttcaagttgaaatgaattaaaaggggctgggcacagtggtagaaaataataaacaaaacataaaaattcctgccaaaaagaagtttatgttatagtgggaagacagcaaatacatatacacacaaacacacaannnnnnnnnnnnnnn

SEQ ID NO: 11865 - DNA, 639 bp, Homo sapiens
acatgtgcacaacgtgcaggtttgttacatatgtatacatgtgccatgttggtgtgctattttttgactacgggaaagggatgtgttggtaaagaacatcttttttgtgttcatgttttccatgattgctaagtattgtctcctcccttgagagtttcagtggtgtgtttgctacattacttcagtcagtatttgcagcaaataacaggaataagctgagagagagagtcaccttcatctcagggttattaataaaaacatgaaaattgaccttatttgggatgtttttacttcagctgaaggtgagttgaaagatactgcaaagaatacacatcttagaaatcatgttagagcaagtagcttttaataagccgtccactataaaccccaaaagagaactgatctttctgggaaaatcaaagaatggcctacaaaggacttcaacttcctgaacaaaatgtatgtgctaattttcgtcgatcttcttcctatattcatgcctgacaagattgtcatagtattctattgacagaaaaatgatgattttgaagtctatttctttcccataatttcttttgttgatagtgtttgttttccagtcatagcaacttgagaccctgtgagtgtggaggccatagt

SEQ ID NO: 11866 - DNA, 473 bp, Homo sapiens
  misc_feature 466, 467, 468, 469, 470, 471, 472, 473: n = A,T,C or G
gggaggatcacctgaacccaagaggttgaggctgcagtgagctgtgtctgtgccactgaactccagcctaggtgacagagtgagaccccatctcaaaaaaataatactaatagtaataaccacagcacttaataaaaataatagcagctagtatatatctagccacatactctacactacacactgttctaaacacgtctcaaatatcaacttactgaatcctcaaagcaaccctccggttctcattcccatcttatagccgacaaactgatgcacagaaagcttgagatgcttatgaataaggagtgaggttgggattctcacccaggaggcgggctgcagtgtctaagctcttcaatgcagggccctaaaaaagtgcccaagaatatccactgagagacaccccagagctgctcgacccttttagggcctcaaggtgcctgagttgatttctgttgcttgcaannnnnnnn

SEQ ID NO: 11867 - DNA, 618 bp, Homo sapiens
  misc_feature 1, 2, 3: n = A,T,C or G
nnnactcaatctgtgaagtgtgttctcacagtgtcccacacctccccgaggggctcacctgcccacagcagtgctctctgctcttcagtccacctagatactctcttctctttgatcttgaagcctccttatcctgacccatcattcttggaaccactaacctataaagtaattgcaaatcagactcctgtttcagggtctgtttctgaggatcctcaacttcagacactgtaaatttttttcatggtaatggtaaggaaaatgcattattttatctgaaatattcattttgtaatcttttcattaattatccaattgttgaacagaaaaaaattgcttattactttaaaaaatgcacacacatattaatatctgtttagaatcatagatttctggcaagtcagcgtatccataatgtaaacagatttttctaacaaaaaaaaatagctttagagtttccctcaaccttattcatccttatatttcatacattttaatacaacttttttgttatctggctcccaagcccactgcaactaggagcttcaaattagaattgaagagaaagtgtgctagtactaaaaagccaaaaaaaaaaaaaaaaaaaaaaaaaaaagt

SEQ ID NO: 11868 - DNA, 488 bp, Homo sapiens
  misc_feature 483, 484, 485, 486, 487, 488: n = A,T,C or G
accttccagctcagtggatcaatatgactttatgaagcaaagtaagggaaagaggtcactaaaaacaacgattttatacatgagaaggtgaaaattcaaaaactcccattttttcaacataaatggctcatgtcatgtgctacgaaacataaaaccctagactatcttccataaatgaaaagactaaggcacaattctgtcgtcatgtaattcagtctactaaaagagacagacccaaaaaacaaagagcaatgctactgagtgataagagcagtaaggaaatgtgctctcacggttgcagctgctatgggaacataggagaggaaggcatttttctcaagaacagtgggtaggataatcatacaaaattacaaagaaagtgacatttgaaattctcctagaatacagcgcttgatatggagcagggaatcacaggaaaagcaagttacaagagcacagcacttcatgaacaaagaaggcaannnnnn

SEQ ID NO: 11869 - DNA, 432 bp, Homo sapiens
  misc_feature 432: n = A,T,C or G
cgacccacgcgtccggagaggtgggttaaggaagtaatttctaaggtcaagacatgcaggctaaggagacgctgccagctgagtgggagagattgattgttggcctcatactcagggaagcaaggccccagggcaggtcggaggaggggaaccaaggatgctcatggagtcagccctggagattgtcagcagacattgtttctttggggtaaacaggaaaaggagagcagtgggtggcactatggagagatggggtagaatggaggacagaaaaaggtgttcacatggaaggcaaagactatctaagaagctaagaggaacagaagtggggaagacagaaaaatttgccgtgtactgcaagggcaacataataatgacatttggaggtaaagaaaagaattgctggctgggcacagtgactcatgcctgtan

SEQ ID NO: 11870 - DNA, 354 bp, Homo sapiens
  misc_feature 1, 2: n = A,T,C or G
nnctgagaaaggaaaacaaggtgagtcctattaatgcttcccagactggccagattttctcactgcagccagccctatctcacatgtattaatgttataatttcacatactgtatgatgctatcctttgattagcgtttagtttgatgggaactccaaaccattaaagaaaattcaggccagccgtggtggcgccgtgcctgtggacccagctactcaggaggctgaaatgggaggatggctcaaactcgagcagtcaagtgagccgttattgtgccactgcactccagcctgggctgtaacagagcaagacccccatctctaaagcaggaaaaaaaaaaaaaaaaaaaaaagt

SEQ ID NO: 11871 - DNA, 525 bp, Homo sapiens
  misc_feature 525: n = A,T,C or G
acgcgggtgacatacttttgggccacattcttacaataattaactggaaggaatttaaagaattcatagtattctattccattttaaaaaataatctaaacagacaaacatattcagttaaaaggtgacactgagttaaaaggctacctaataatttaggaattatttatccttctcttctttggcctacttttgacatatctctaagaatcatgagttagaattttgaaattacatacaagtaaatgtgtattgattaaaggtgaacaagtgatttatctttgactattgaattaagtattagaaaacttcatggctacaatgccaaaaaactaaatactggccaagaatttggaaatacaggtggccctggaacagcatgtgtttgaactgtgctggtctggttattcatggaataaacatgaattgaaaatacggaattcgtgggtcccacatatactggatgccaacttttcattttacatggattctggcaagccaactgtgggacttgagtatgtgaan

SEQ ID NO: 11872 - DNA, 456 bp, Homo sapiens
  misc_feature 446, 447, 448, 449, 450, 451, 452, 453, 454, 455, 456: n = A,T,C or G
acaaggagaccctgggcaagcagctagcagccccctttcacaaccctgcagagcgtcctggaggtcccagcagccactgttcttcctcctaagcttgcctgccatggcagcatccactccacccttcagtgcttgaagccaagtggttgtcgccccggaaggctctgcccttctggttttagactgctgtggaggagggagccacttggagatacaaagcccacctctctagaatcttccagggtccccacaaattataaaactatggtcacaccaggaaaccaaggcattttcaataacaacctttcctactgatttccagcttcatcttccagaattccagtgcactgccattcataccattcattaactgtgctcctttcactagaccacgagcaggtatacagccacaccgaggaacccatctaatgagttaactactggannnnnnnnnnn

SEQ ID NO: 11873 - DNA, 220 bp, Homo sapiens
actgagtagaataggacgtgagacaagtgctctacttgaaataagcacagacgtggaagaagggatgtgtagttttgtctggggattcggcacagtttttatggaggatgtggtctgtgaaatggctgatttgaaacatgaaggaggctgcttatgggatgggttattctgggaagcaagcaagtgcgagggctccagaaggtatgaagggccttggagt

SEQ ID NO: 11874 - DNA, 378 bp, Homo sapiens
accctagggccttggcctgagcagatgtgtggccctcttggaatgaactgctacatgacatgctggtggtgtatttggtcataccttttaccatgttcaggctgtttgtttatttgagaatatttttctttaagttaatatgagacttttaatttcataatatgctatgtttcatagactgactgatgataaacatagactgataatcattttgcagataaacgcagtcaacaattgtaatttagttttttataaaagttattatttagtcagtaattcaaggcttggacaaaatagttctcactatgtgtgtgtgcccctcagggtgtaacatacttttggactcagtctttttattggtttgtttttgtaagtaga

SEQ ID NO: 11875 - DNA, 231 bp, Homo sapiens
  misc_feature 230, 231: n = A,T,C or G
accaggaagcccagctgtgctgtagttcctgctcttagatttctgtgggattcctcagagtatttttacaacatcgcctcatcttgggtttgcctgatctgggctgtgtcccctctaccatataagctgtaacgaacatactacagtaggcagatctctctgctgcttaaaataataaaacaatggaggtgacaaaaaaataagaaaaaaaaaagtaaagtacctgcccnn

SEQ ID NO: 11876 - DNA, 236 bp, Homo sapiens
ccgggcaggtacaggagacaggtcagcagctgcggtcagcagaggcacacacgccagcccctggagatgggtggcttgtcctgagccaaagctgggctggtttataaacagcacctatgccttttccatttgaatttttacagctaccacttcctccacgagatgacttgctctctggattggaggtgtgtctgcatttcaggaacaagcaacttttctctgtggctacaggctgt

SEQ ID NO: 11877 - DNA, 3436 bp, Homo sapiens
  misc_feature 1, 2, 3, 4, 5, 3370, 3401, 3430, 3435, 3436: n = A,T,C or G
nnnnnctcttccctgccatatatatagtttataactttctatattatttcaactgtaagatacaaactcgtttttacaaaacgaaaaacgcaacttaaaaaatggttaaactattaggctgagcacggtggcgcatgcctgtaatcccagcaccttgggaggctgaggagggcggatcacgaggtcaggagtttgagaccagcctggccaaaatattgaaacctgtctctaccaaaaatataaaaaattagccaggtatggcggtctgtgcccatagtctcagcctcctgaataggtgggatttctctacacccagccaacttaatgttttataatgtctcttattttcttatttaacctcgttattgggatgttgatttacagtgaagaatccattgcattagtaagggtgatatcttagtattttgcttcctgggtgagctagctttgcttatttctgtttgttaactaggccttttgatatttttatagacaatctgcttcatcctgattctgcggcattccaaactgtggtatccttgggggttctcttaacattgctatggtgcagaagatttaaaatcagctgatgttcacaaggaatagagtcacgtgatgtatgaagggaaacatatacacttctctgaggttgacaataagcccttgtgctcatatagccccaaactgtgcaagcagaggcgactcaacggctacgccttctgtatcagacacgttctggaggacaagactgcccccttcaagcaatgtgaatatgtggccaagtataacagccaacgctgcgccaaccccatccccaaatcagaggatcgtaggtactgcaacagccacttgcaggtacttggctttatcccgaaaaaagagaggaagaaaaagaatgatcctatagatgaggtgaaggtcaggcaccagatggataccatggcctttagcctgacagtgcccacgttggccttgaagatgcccaacggactggatggaatgtccctctctccacctggggcaagggtccctctccactacctggaaactgaattggaagacccatttgctttcaatgaggaagatgatgacctaaagaaaggggcaactgtgagaaagaagttgcagagcaagttggcccagaatcggcagcgccagagagagacagagattttaaaagttcgacaagagcactttagtccccctcctgcaccttcacagcagcagcctccgcagcagcactcccacctgtcacctttatctacttctttaaaacctccagcgccaccgcagggttcagtctgcaagtcacctcaacctcagaacaccagcctaccaatgcagggagtggcacccaccacacacactatagcacaagcacggcagttgtctcacaagaggcctctgcccctcctgccatccagtagggctcccactgtggacccacccaggactgaccggatcctcatgaaagccacagccttctctccacacttctcatgtataagccgactgcagagactggtgaaactgtgcacccagaaacatcagttggacactgatctgtttccccatttaggtttggactggtctgaagagagcggagaggaaccagaggactcagagcaggcctcgccctaccaggttgcatggtccatccgggaaaccctcagatatcaaagacatgtgtcagatgatgatgatgcggagagtaggagctccagggtgactcaactttgcacttactttcagcagaaatataagcacctctgccgcctggagcgggcagaatctcgtcaaaagaaatgccggcatacgtttaggaaagctttgctgcaggcggccagtaaagaaccagaatgcactggtcagttaatacaagaactgcggagagctgcatgcagtcgaaccagcataagccggaccaagctgagggaggtggaaccagcagcatgcagtggaaccgtgaagggtgaacagtgcgctaacaaagcccttccattcaccagacattgtttccaacatatcctcttgaaccactctcagcagctcttctcaagttgcacagccaagtttgcagatggacagcagtgctctgtgccagtttttgacattacacatcagacacctctgtgtgaagaacatgccaaaaaaatggataatttcttgagaggagataactcccgtaaagttcagcaccagcagcagaggaaacccaggaaaaaaaccaagcctcctgcactaaccaaaaaacacaagaagaagagaaggcgtggacctcgtcgaccccaaaaacccattccacctgcagtcccccaagggaacctcagcatgcctgccagcgtctcactgccagtggaggcctctcacatccggagcccatccacgccagagctgagtgctgatgagttgccggatgacattgccaatgagatcactgacattccacatgacttggaattgaaccaggaggacttttcagatgtcctgccacggctacctgatgacttacaagattttgatttttttgaagggaagaatggagacctcctcccaactaccgaagaggctgaggagcttgaacgggccttgcaggctgtaacttctctcgagtgcctgagtaccattggggtccttgcccagtcagatggtgtgccagtccaggagttgtcagatagaggaataggggtgttctccacaggtactggagcttcaggaatacaatccttgagccgagaggtgaacacagacctaggggagctattgaatgggcgtatagtacatgataatttttctagtctagagctggatgagaacctgctccgttctgctaccttgtcaaacccacctacacccctggcagggcagatccaggggcagttctctgccccagccaacgttggccttacttctgccactctgatcagccagagtgcacttggggagagagccttcccaggacagtttcatggacttcatgacggcagccatgcctcccagaggccacatcctgcccagctgctgagcaaggcagatgacctaatcacctcacgacagcaatacagcagtgatcactcacacttcttaccccatggaagccattatgatagtgagcatatgccgtctccctacagtgaccatatcacctctccccacacaacatcgtactctggtgataatatggcagctaccttttcagcagagatgcccatcatggcgcagacttgctcccaacccaacttgaggtgccacttggaggcgtggtaaaccccagaactcactggggcaatctccctgtcaaccttgggagacccctctccatttaggcaaccttcttcggcgcagatgggacatcttcttttccactttncctattccacgggcacccaccatttcggaanttaggaggaccacacaggcctggcctttnggcann

SEQ ID NO: 11878 - DNA, 968 bp, Homo sapiens
acgcgggaagaacttgtttttctcatccctgttcctggaatccattccttctgggctcttcctggccttgtatataaagttatcttaatcctagcacggccttggagtgagtcagcctggaacaggcaggaacttaggtttttctctttttaatttctgctttagtaggccagggttctgattttcactgctgagaaagtaaagtgtgttcaggctgcccatggttctgggcccccccgggtctctgaggagggctgtcccctccatcacagagaatatcaggacactagcttgttctagttatacttacacactcctctcatgttgtctatggagtggtggatgctgcagggagggtgacatcctagttagtcctaagagccagactgcctgaagctcactataacaagtcctgccttggggaagaaggaagtgtgtctctgtgaacctcccacctgggccgaagggaggccactctctctgctgcctctccccaaccttggccttctgtgctcctagtgaacctctcaccccctgcctacaggcctcgaatctcaagaccatgatgacctctcatcacccctgaatccagagctttccctttacaaaggggaaactgagacctggagcagggctgatgttcagccagcgcacaagggaatggctgaattggtggtaaaatactgaaatagttccagtgtggatggaaaggggccgctgccctgagcatctctactgcccacctcatcccttcctccaggaccctgggtcagcaccaggagcatcaaagtggccaggattggccggagcccatgctaatggctctgccagcccttctccccaccagagagggcagggggattcaggccctctagaggtagcattgtgaccgtgtctgcagtagtcaatccttgtgtgccacagtccctgactttgttgataagggcatcagcctacatccctctggt

SEQ ID NO: 11879 - DNA, 205 bp, Homo sapiens
ggggccattgagactgccatggaagacttgaaaggtcacgtagctgagacttctggagagaccattcaaggcttctggctcttgacaaaaacggatccattaagccagcaccaaggagaacatcttgacactttatggaatttcaaaaagtatgatatgatggcaataaagtggctcttcagccagaaatgaatgaaagacaccg

SEQ ID NO: 11880 - DNA, 530 bp, Homo sapiens
acgcgggggtggtcgcgagggagccggaaagatggtggttaccagatctgcacgagctaaggccagcatccaagccgcgtcggctgaaagttccgggcaaaagagttttgctgctaatgggattcaagcgcatccagaaagtagtacctcggccgcccgggcaggtacgcgggattcctggctttttaacttttccaaatgtaacctcccaggtgctgagagaaaggaaaatttaagacagtttatgaaagggaggagaatcaacaaatggcacaggtcacccaaatgccaaccagaaagtgctcattttctaggctaaaaattgaacctgaactcaggccaccattgtgaaaagacaaagccttaactgctaagctacagcattgggcagtttccactgcttttcccagaaggagcccagagcagtaaattttgagcttgcaaaggcttttaactgctcaagataatttgtagagctaactactaccccaaaatccctgttgcctggaaggcagagacaaagagaaagt

SEQ ID NO: 11881 - DNA, 646 bp, Homo sapiens
  misc_feature 1, 2, 3, 4, 645, 646: n = A,T,C or G
nnnncccatgacctggagcctgtgactgcattgcctccactccacggggcctgggcaggtgtggctaagactggactgtagaacagggagagtatctggggttgtccagtgggctcaatatagtcacagtcagggaatgttctctggccggaggcaggagagacatggcagaagactagaggctgagactgcccaacccaccattgctggagggggccacttggaaagcatgagaaggaagggggacccagtcctacagctgcaaggaataattgagccaactgtgcataagcttgaaggcctccagggtgaacccagcacctcagacactggccccatgagactgagcagaggacccagctgggcctggctgaactcaggcatctgacttagagaattgtgagataatcagtggtatttaaactgccaagcctgtggtgatttgttgtcatggaagcaatagaaaactaatacaacagggctgggcgcgcctgtaatcctagcactttgggaggtgggcggatcaccttatgtcaggagttcaagatcagcctggccaacatggtgaaacctagtctctactaaaaatacaaaattacaaaatacaaaaatcagccgggcgtggtggcaagtgcctacccgcgnn

SEQ ID NO: 11882 - DNA, 511 bp, Homo sapiens
  misc_feature 1, 80, 100: n = A,T,C or G
nataacatttggaatgagggtgtgagcaactgcaaattcccatctcccttctcattccagcctcattgtaacacacattntacgcccagcctggctttcntgctctccctcatctcattgtttcagcggaggccaaatctgaagtcctttccagggagtggctctgttcatcttattcgccagccaaagtaggaacagcgtaagaggagagagacacattcagcagccaaaggactcggtggaaagagcagaacaccatagacagtgagttatttgattacctgaaaccctaaagagacagagggaatgtgtgtatgtctgtgtgtgtgtgaaagggctggagggggcaatggggaatgtcactgaacttagtcttgagcagacctcccaaataaccgtggaattctgatgaaggagacgccaagatgagcagatgatatgaaaaagtcacgcatatgagaaaggaagattccacatcaggggtgaaagaggccaaagggtagggccaagt

SEQ ID NO: 11883 - DNA, 294 bp, Homo sapiens
  misc_feature 1, 2, 3, 4, 5, 6, 7, 8, 9, 10, 11, 12, 13: n = A,T,C or G
nnnnnnnnnnnnncgaggtaccgcagtaaaatgcaaaaatcgtgtgaaaatcaacgtggaacaggaaatgaggtgcgggtgtcaactggttacaaagggtcagaagttgtctggtgcctgacaaggacacacatctcattcataacatatggtggtaatttaaaaatgaaatgatgttattttttccttcgaattcatatgtattttttttcaggtggccacttagttgtaaggacataaatactcattaagttgtttggacctatttaataaatggacatgttaggtatttct

SEQ ID NO: 11884 - DNA, 352 bp, Homo sapiens
  misc_feature 1, 2: n = A,T,C or G
nngtacacagcgtggtaggaaaagtccaaaactttggaaagaaagaaaaatcctccatcatttactaattgggtgagttacttgcggttagcagttgagctgaacacaattcccccatctctggcaactactcccaatacacacgatacccggtgggccccgatgccaaggccaaagggggattcttaacccagactgagccagccagatcttcttgtgcgcccaagtatgcatatgcccgtgttcgtgtgtgtgcgcgcccgtgtttgttcgcgtatgtgcctgttcgcgtgtgtgcacgagcgtctgtgtatgcgcgcatgttcgtgtgtgtgtgcgcgcgcgcattggt

SEQ ID NO: 11885 - DNA, 515 bp, Homo sapiens
acagagggtgccaggcactgtggtgcacacctgtagtcccagctacttgggaggcttgaggcgggcggatgcttgaggccaggagtttgaggctgcagtgtgctgtgattgctcctgtgagtagccactgcacttcagccctggcaacatagcaagaccctgactctaaatataaaaaaaagtatagcgggcacaaatggggcgaagccagggtgggatgcagagtctagagggagatgaagctggagaggcaggcagtggtcaacatgtggccatggaaaatagtttaggtttgattctgatggcactgggctgccattagagggtttgaagcaggtcagtgatgtgatacaactaaagtcttcaacagatcattctggagacagtgctaacatggactggtgggcaaaagagtgagaagccgaagccttaatccagaaggaaatgaaatatgtctgaattcaggcagggcagtaaggctggagagcagggcatggttaaacaggacagcaagt

SEQ ID NO: 11886 - DNA, 355 bp, Homo sapiens
atactatgagtgtgctagttggagctccaccgcggtggccgggcaggtacgcgggggagaacttcggaggatgttcatgtccaggagcagccccacgccctgtatggtcggtgtctagagcctcacagcaactaagaccaacccagctctcagaagaaggaatgtcaaaatgtcatgttcaattttacattcagtgcctggaatcttttcttcacaattgaaatgaaatgtgctgaaggaggtgaatccatgcattaatcttcagctcacaaaggaaatactacataagaagcaagaccacagactcaagacggacataattggattttttttgccatggcctggaaagaaaggt

SEQ ID NO: 11887 - DNA, 516 bp, Homo sapiens
  misc_feature 1, 2, 9, 12, 16, 24, 26, 29, 513, 514, 515, 516: n = A,T,C or G
nncgacccnccnttcncatcgaancnccnttgtctcgggacgcgcgccattgtgttggtacccgggaattcggccattatggccggggatattcaacaactctagaggaatgacacatctccagttaaaaatgaagggtgcacatgggttactcaacatgtgagtcatcaagaaatgcaatactgtgcaatgactggtgaatcacagtctctaaaggaagctttttgagatttttacacagatggctatgcaaagcataaataagtgtgaggaggaagggaaaagaaaggagggaaaaaataaatgtgtgggaggacaggcaactgcaactttcattgttctttattttcttgaccattgaactaactacttagataaaccctacaactcttctcttcaatttgccattacatgtccacatagccttttaaaaactctaaatttcacctcattcgatttagaattttttttttaactttacaccttgtaagtgatttgccgtggtttctgtgnnnn

SEQ ID NO: 11888 - DNA, 493 bp, Homo sapiens
acgcggggagatgtagtgaatctctgcctgtgtggacaaagagacacattcagaggtgagcccagagcgggtaaagtggactggggagaacttcggaggatgttcatgtccaggagcagccccacgccctgtatggtcggtgtctagagcctcacagcaactaagaccaacccagctctcagaagaaggaatgtcaaaatgtcatgttcaattttacattcagtgcctggaatcttttcttcacaattgaaatgaaatgtgctgaaggaggtgaatccatgcattaatcttcagctcacaaaggaaatactacataagaagcaagaccacagactcaagacggacataattggattttttttgccatggcccggaaagaaaggtacacacagttaaccacaaaacaggcctctctgaaaaagccattgccatggactgccagacagacaatgacaagacacaaatacctttttgtgtgtgagcccccgggaca

SEQ ID NO: 11889 - DNA, 214 bp, Homo sapiens
  misc_feature 1: n = A,T,C or G
nagcgcataccctgctctgccagacttgctaattagaacttatcacttcggtacacgctccaagaggagcccagctctctaactccgtgaatatagagagggtgatcgacgctcagcgcatcagtgtatttctggtacctgaccataatagtaatttgcctactaactatgtaacattgaacaaactactgttttgtgagcctgaaaagttggt

SEQ ID NO: 11890 - DNA, 350 bp, Homo sapiens
  misc_feature 350: n = A,T,C or G
acacattccctctcctggaggttgtccctcagcatgacgctgactgatgttcatcaagacttactgtcacactggctagtgctgccaagccatctagactacaacttattctagattcaccctggagagatcttagagggcatatcttcttcacccagagaaggcatttatgccttattgaggcctcactttacccagaggaaacagctctttcctatgaccctgagaggtagctggtgctactcaaggcacctgtgttctggtgcacctggccctttaactaaaagataatggggcaaaggatagggtggggagcaagtgtaaatacctcattgtggagcagaggcagn

SEQ ID NO: 11891 - DNA, 448 bp, Homo sapiens
  misc_feature 1, 2: n = A,T,C or G
nnagtaatctagtatagttagtgataactattcacttcataacatgttcttaatatttatatgaataaaatatagctccttttcaaaactgttttcaaaatataacttgtgcatttcttccaaatttttaacaaactgtattccaagtgataatatcttcagagttaaattgaaatattttgataaatatgataagcttatattttagctagacaccagagaatattcatgaataacttttctaaggaaagatcttaccctagagggaatattttgttaagaaagtgtcctctggctggtcgtggtggctcacacctgtaatcccagcactttaggaggccgaggcgggcggatcacctgaggtcaggagttcgagaccagcctggccaacatggtgaaaccccatctctactgaaaatacaaaaattagccaggtgtggtggcaggt

SEQ ID NO: 11892 - DNA, 278 bp, Homo sapiens
ccgggcaggtacccgagaacctatgttggttgttactggtggcctgatatcttgggcctcaaggcggcttgctacggatgccagtagtggcaggggtagaggggttctcaggctcctagatagctgctgtggcatgggcaatagcagtagccatggcaagatgatttctctgggtcctaatctgtgtgcattgatattggcagtagctgtgatgggctgggcgggcctgtctccaggtccacagttggtgcttgcaggtatataccagctgaggaggt

SEQ ID NO: 11893 - DNA, 500 bp, Homo sapiens
  misc_feature 492, 493, 494, 495, 496, 497, 498, 499, 500: n = A,T,C or G
acctaaccccgagtgttagcttcctttgcatactactgttctgagatgtgttggttgaattattagtaaggatttgaaggctatgatgcattcaacactcagtgcggattatagatccaagaacacagactttcttaaagtatgaggcttacaggactttttgtttggctaattaaagtgatagtctgttttagaattctaattatttattcagagatggggtcttattatgttgcccaggctggagtgcagtggctattcacaggcataatctgagctcactgcagcctcaaactcctgggctcaagcaatccccctgcctcagcctcctgagtagctggggctgtttcaaaattttaacattggtgctgtaacatacgcactgtttattgattagttgtgactggggagaaaattgtagagtctctaaaaaacttaactttaggagcataagtgcattcaaaactaaatccctattgactagcacagcgnnnnnnnnn

SEQ ID NO: 11894 - DNA, 2496 bp, Homo sapiens
gccatggaagaactgtaatatgagtaatttattaatctcaatttattatatgacagtattcaaaaataaagggaaaaatatactgaagttcttctagtattctagtccccaaaggaaaaatataatccaatctacaccaggcttccttcctttcccccaatctttgctgatttcatcagctttgattctttctaagacatttccttctgctcttttctgtgcttttgaacagaggcccacaacagcttccctatggggcccatgggagtataattaatcaagtaatcagctagccaacactgttaaaatgttttaatatcaatgtaaaatgagatgagagttttacaagcagatttcagaacaccaacactgatttccaatatgatttctctccctttcagaagcctaaagatgaacatatacaaatcttaggggtttttacaaaaagcatgttttttttctattttcatacatatacagttgacaaacatgcaaaataactaatttccaaatcaaaggtctctagcagaaacatccaaattaaaaatgaagcatttaaatttacttactggccatgaaatccagcaagaaaccaccctttcccccacacttcagaaaaaccaccaattccttcctagaggattgatggcattaacagtacttggctctcccttgtcagcatccagacatccccggttcaatcttgtaaattaatgttacagttccaattactaaaaatgccccaccatcttcttcactgcattacagcttagcaaggcacctaccaacaatgcagtttgggaaatgagccatgaaaaacataatggcctgagagttaaccatacatcctaggtctgccaattgaatgaggacattaatgggaatgtaaaattccaggagacattcttttattctcctctccaagttactagcatgtccagtatcagaaagaaaacagtagaggaatgtggcaatagccacatatgtgaaaccttagtagagctaaaaccaaactaaacaaaatgcaaactacagtgggacaaagaactgactctcatttgagttttatttgtggcttcaagcaacctccaaactaagaggctcataaattaggaaataattttaatgcactgagggttcagtaatttgcattagaatattattaaaatttatgttttgtaagagttgcatatacttcattgttgaattcggtgccaacagtaaacaaataactaaatgagatataacctcaaatatacccacttccaaaactaaaaagcattttaacacatttttctctgccaccctcaagtgaatcagtaaaacaaatagaaaatcaaaacatgattgtaatattacataagacaattattttacttaaataacttagtctgttccaaagtatttctgtccaaaatgtgtaggtgcaacaggatgaacttcagtagttaaaattgtgatctctggaaactcctgaatgattgatttggcaccatgaggagtggagaacagactgagtaggatgataacactgggttgaactccatgttctataagaacctttacagcttcaattacagtatttccagtgctgagaattggatacatcagaaggacttttctccggtaaatgtctggggggaatttggcataatatactttggctctttgtgtctcctcatcactctgaatcaggatctttccaattcgtatggatcgacagcagtctcgtaaaccttgttccattgcctcaccgcttctcattatgctgaccccacaatttcccttctcaaatttcactccttcatacttgtaccctgttggagtggtcaccatgcattctttatatggcagctgattcaatccctcttccacaacaagtctgatcaaacgatccgcagaaaacatgaagtcacctctactggctgtcttgtcccggatgatggtctgtagctcccgtatctgatcattcataggcagcagcttaagctgcgccccgatctgccgggagagttcgcagtcctctaggaaggagttgccagctggtgcgtcatagctgctactgtcaccactaccactgttgccctctgagttgaggctggagccgccgcaggccccagagtccagctcggccggcaggctagaatgggcgtaccccgtgaggagaatcaccttggccctggaggctctgtttccccctgcgtggtccaggatcagatcgccaggtcgcagctgctcgggacttggggttgaggcagagtttacttgctggttgtgacagggcatggagtccggacactgtaactccgtggccatacaccgggccccgggctatccccgctgctactgaacactaaagataaagaggaacgggtagaaaggacagatgctcacgtgctctctcggttgctcccgcctcctcagaacatctaaccctggctgtcctttcacccctaggccgctgttggtttcctcggacgcggggcggacgcgtgg

SEQ ID NO: 11895 - DNA, 970 bp, Homo sapiens
  misc_feature 942, 943, 944, 945, 946, 947, 948, 949, 950, 951, 952, 953,954, 955, 956, 957, 958, 959, 960, 961, 962, 963, 964, 965,966, 967, 968, 969, 970: n = A,T,C or G
acccaaccttgcaaatgggagctggccagtgggttggggtgaccaatcaatgaacaagagaggtctgagacctccctgtccgtcgggtctgaagggctgcgtgggggcatgtggcctcacctgttctctaaggtagaactgctccataaagggccaggtgtgcagatcctggtcctgggatgtgagtgctgctgagccaaggtgcacggagcattagttcatccttcttgaaacctgcggtggcaatggttcttgacaggtattgggttaagaattgaggactcagtgacagctgtggaccttcttcccagagaagcacacatactgaaaccatctgcatttgtgtgtggggagaagtttgcagatgtggggagtcacaggtcatttgaaattccaagattaagaaaccctgttacctttaagataaagtctgactccatggtatgacaaataaatcccttcccagtctggtcttaacccagacctcatttgccacatgtgcccactccccatccccctgcaggccattcctcagccaccatggcctttggccttgcttattaggttcttcccaaggacctcctcaccaggcctgagggtacactcatcgttgtcacccagtgcctatcacagtgcacactggtgggcttagaacacacttggggagttacaatacatcaaggcaccagaaagttcctgttaagcccctgttacagatttaacacatgacaattcacagttaccttgattccagtgtgttgatgcagtttcttcactttgcaggttgagttctgtactttaaaaatcaggggattcagccaggtgtggtgactcatgcctgtaatcccagtgctttgggaggcaaaggtgggaggatcacttgagccaatgagttcaagaccagcctgggcaacatagtgaaaccctgtctctacaaaaatnnnnnnnnnnnnnnnnnnnnnnnnnnnnn

SEQ ID NO: 11896 - DNA, 416 bp, Homo sapiens
  misc_feature 1, 2, 105: n = A,T,C or G
nncagacacacatcttttctctttccttcagcgacaagaggtcgattttgccatcacataaccatgattgaagcaagcgaggggcaccaggtgaaccggcccggncggccgctcgactcccccagtagatcctaaggccttctccttgtctcttgtccagggacatcccagggaaggtgaacttgcccaggcagatgcgatagacagcgctcagaggaatccgctgcagctgcacacaactcagcatgatgaagtcgtatttgcagatcaagagagtcttgtctgtgaccagtagaattctctccttctcattgttccagtggtctatctttgtcaagagccagaagccttgaatggtctctccagaagtctcagctacgtgacctttcaagtcttccatggcagtctcaatggcc

SEQ ID NO: 11897 - DNA, 730 bp, Homo sapiens
  misc_feature 730: n = A,T,C or G
agggagtcgacccacgcgtccggcgacgcgcggtggggctggggtggcaatggcggtttggtccctcttatccgcccgggccgtgaccgcgttccttctgttgttcctccctcgcttcttacaggcccagaccttctctttccctttccagcagccggagaagtgcgacaacaaccagtactttgatatctccgccctctcgtgtgttccttgtggagctaaccagaggcaagatgcccgaggaacttcatgtgtatgtctaccaggatttcagatgatctctaataatggaggacctgctattatttgtaaaaagtgcccagaaaacatgaaaggtgttacagaagatggctggaactgcatttcttgccctagtgacttaactgccgaaggaaaatgtcactgtcccattggccatattttagtggaaagagacattaatggaacattgttgtctcaagcaacttgtgagctctgtgatggaaatgaaaactcttttatggtagtaaatgctttaggagacagacagggggattatgtttcagcagcacagggaattttcctctacgtagaatttcagctgcacgttatggagaagttggcatgtctttaacttcagaatggtttgcaaagtatttgcaatcatcagcagctgcatgttgggtatatgccaatctaacatcttgtcaagctcttggaaatatgtgtgtgatgaacatgaattcttacn

SEQ ID NO: 11898 - DNA, 381 bp, Homo sapiens
acaacttgtcataaatggcagtgtgggacatttacattcttttggtctacagttctgagactatcttttatgcatgtatgtatttattcagtaaacatttatcctatgctgcacgtcaggcactatgccagacccgataggagagaacccagggtgagtgtgacccggtctctgcttggaacgagatgggtgtctatagccaggccaggtgcttaccatgtgcctggtgtggtgtccatgacacctagcaaggcagacctatgcatgctggtggtgcagatctcgtgaggggacgtgacagacaacataccatgactcctagaaagtgcaacatgtgccacgaggaagcagaattccaggacaggaaggtcagggaatacc

SEQ ID NO: 11899 - DNA, 438 bp, Homo sapiens
  misc_feature 1, 2, 3: n = A,T,C or G
nnnatgtgatgggatttattatagcagaggcaatatagtatgggagaggtagagaggtcttgggcaaagtgtggagactagctaattgaacatgagctgactcttcctcagtactgtgtttctccacctgacctagaaaaccttgattcctgaaaagcctcaccctaactttgccacaacctggcgatccatccatactgttcacagccctcaggagagactggataattatgaacacaccttgctttcttccatcatttcccttttccccaagggaacatagctgcactgagaacaccaatctctcaaccacaccctatcccaacccctgtggaaaatatagtagctacctcaccaatgggagttgagggaatgaagactcatgtcttctgggatctgggtcaagcccaggtcagccattcttcagacttgcacagt

SEQ ID NO: 11900 - DNA, 438 bp, Homo sapiens
  misc_feature 1, 2, 3, 4, 5, 6, 438: n = A,T,C or G
nnnnnnaattctctcgtgctgtagttacaaatgcatttttaagtacacggagaattttaaatgggcagaagagaatttaaaggtgttatttacataaatgtaaaagcccctaaagtggagaaatctctcataaggaatttcaaacatttgcttgactctggaggcctggcatactaaggaattaggattcctcctaagaattacacatctgaaggctgtcctgaaagactttccatactcgatgatgctcttttgggtaccactacctagatgcacatttagcttattttcttcctcactatccactaactcctgtggtctgcttagggctctgccaaaaccggtggttctcaaaggtagccatggattggaatgacctgggtagcttttaagaactcactgttcagatcacacctcaaaccaaataaatcaagatcn

SEQ ID NO: 11901 - DNA, 1948 bp, Homo sapiens
aggagtcgacccacgcgtccgcgctgccagctctcgcactctgttcttccgccgctccgccgtcgcgtttctctgccggtcgcaatggaagaagagatcgccgcgctggtcattgacaatggctccggcatgtgcaaagctggttttgctggggacgacgctccccgagccgtgtttccttccatcgtcgggcgccccagacaccagggcgtcatggtgggcatgggccagaaggactcctacgtgggcgacgaggcccagagcaagcgtggcatcctgaccctgaagtaccccattgagcatggcatcgtcaccaactgggacgacatggagaagatctggcaccacaccttctacaacgagctgcgcgtggccccggaggagcacccagtgctgctgaccgaggcccccctgaaccccaaggccaacagagagaagatgactcagattatgtttgagaccttcaacaccccggccatgtacgtggccatccaggccgtgctgtccctctacgcctctgggcgcaccactggcattgtcatggactctggagacggggtcacccacacggtgcccatctacgagggctacgccctcccccacgccatcctgcgtctggacctggctggccgggacctgaccgactacctcatgaagatcctcactgagcgtggctacagcttcaccaccacggccgagcgggaaatcgtgcgcgacatcaaggagaagctgtgctacgtcgccctggacttcgagcaggagatggccaccgccgcatcctcctcttctctggagaagagctacgagctgcccgatggccaggtcatcaccattggcaatgagcggttccggtgtccggaggcgctgttccagccttccttcctgggtatggaatcttgcggcatccacgagaccaccttcaactccatcatgaagtgtgacgtggacatccgcaaagacctgtacgccaacacggtgctgtcgggcggcaccaccatgtatccgggcattgccgacaggatgcagaaggagatcaccgccctggcgcccagcaccatgaagatcaagatcatcgcacccccagagcgcaagtactcggtgtggatcggtggctccatcctggcctcactgtccaccttccagcagatgtggattagcaagcaggagtacgacgagtcgggcccctccatcgtccaccgcaaatgcttctaaacggactcagcagatgcgtagcatttgctgcatgggttaattgagaatagaaatttgcccctggcaaatgcacacacctcatgctagcctcacgaaactggaataagccttcgaaaagaaattgtccttgaagcttgtatctgatatcagcactggattgtagaacttgttgctgattttgaccttgtattgaagttaactgttccccttggtatttgtttaataccctgtacatatctttgagttcaacctttagtacgtgtggcttggtcacttcgtggctaaggtaagaacgtgcttgtggaagacaagtctgtggcttggtgagtctgtgtggccagcagcctctgatctgtgcagggtattaacgtgtcagggctgagtgttctgggatttctctagaggctggcaagaaccagttgttttgtcttgcgggtctgtcagggttggaaagtccaagccgtaggacccagtttcctttcttagctgatgtctttggccagaacaccgtgggctgttacttgctttgagttggaagcggtttgcatttacgcctgtaaatgtattcattcttaatttatgtaaggttttttttgtacgcaattctcgattctttgaagagatgacaacaaattttggttttctactgttatgtgagaacattaggccccagcaacacgtcattgtgtaaggaaaaataaaagtgctgccgtaaccaaaaaaaaaaaaaaaaaaa

SEQ ID NO: 11902 - DNA, 834 bp, Homo sapiens
agcttttgtttcagcaatttgaaggaaagaaaaaattagtgggcttgggggaaacatctgccatcaagttgtttatctgtaatgataagctttgttccgggaccaaataccttgatttttttgcccccccgcgtacctgcccgggtcgagcggccgcccgggcaggtacttgttgttgctttgtttggagggtgtggtggtctccactcccgccttgacggggctgctatctgccttccaggccactgtcacggctcccgggtagaagtcacttatgagacacaccagtgtggccttgttggcttgaagctcctcagaggagggcgggaacagagtgaccgagggggcagccttgggctgacctaggacggtcagcttggtccctccgccgaacacccaaatgccactacccatatacagcacacagtaataatcagattcatcatctgcctgggcccccgtgatggtgagggcagctttgttcccaaggatggagccagagaagcgatcagggaccccagaagagcgagtgtttgtgctgaaaatgagtgtgcgtggagcctggcctggggtctgctggtaccagctggggtagtaagtagtagagactgagccagagctcaagccacaagtgagtgtgactgtccctccaggggacactgagaacgatggctcctgggtcaccacagtctgagaatccactcctgatccataagcaaggagtccgaggagaagcatcatccaggccatggtggggacactcatgaaggctaagtgttctcaggcttcccagctggggtttgttttcctcagggccttttcccccgcgtacct

SEQ ID NO: 11903 - DNA, 880 bp, Homo sapiens
  misc_feature 1, 2, 3, 4, 5, 869, 870, 871, 872, 873, 874, 875, 876, 877,878, 879, 880: n = A,T,C or G
nnnnnacagactgtttcctcgatcgacagtctttgttgtttttcattgaatgtcatctcatgtcaatagctagatccatccacattgtcctttttaaagtgtgcatgcttttccatcccatggtgtattatagtgtgttcagcaaatcccatgctatcacatatctcaattgcttccaatcttcctccctccctttctctcttccattctcctccctttctccctttccttcctctaatacaatcaatactgtgatgaacatccaagtgtttgatattccttttaacaaaattactacaagtggtcctgatagatttctggcaaacaaagtatgctgatttaaaattctgatctatattgccaaatagatgcctcaaaagatacagcaatttacatcaaagtactcactagcctacacctatgcaatgtgatatagaaagatagagtttcattttcattcaaatttatattccttttctcaatagtgatgttgaaattcacataatatgcttatcggagatacgtatttttcatttttgagctgtattgactcagttttagtgacataactcaattttttcaaaaaacaattttaaacacatagtaaattgaatcataaaacctataagtattactagccttttaacattgtttgatttccccatgcttgcttgtgggtggagcagttaaattttcaacatgagcacaaaggatacgttagaaaattctactttaaaaatattattcaaggccgggcacagtggctcatgcctgtaatcccagcactttgggaggtcgaggcaggtggatcacttgaggtcaggagtttgagaccagcccggccaacatggtgaaaccctatctgtccnnnnnnnnnnnn

SEQ ID NO: 11904 - DNA, 329 bp, Homo sapiens
acgcgggggcgggtaaagtggactggggagaacttcggaggatgttcatgtccaggagcagccccacgccctgtatggtcggtgtctagagcctcacagcaactaagaccaacccagctctcagaagaaggaatgtcaaaatgtcatgttcaattttacattcagtgcctggaatcttttcttcacaattgaaatgaaatgtgctgaaggaggtgaatccatgcattaatcttcagctcacaaaggaaatactacataagaagcaagaccacagactcaagacggacataattggattttttttgccatggcctggaaagaaaggtaca

SEQ ID NO: 11905 - DNA, 399 bp, Homo sapiens
aggtacgggaggtgatatgagcaaatttaagtatgcctcttactcatgtttccctgtcctccaattttcttcctcagaggcaacctctctaacacatttttgtgtttaaatatattttttgcatgaacaaatatacatgtgtatttgtatatatgcatatatattttctgacttttttccttctttcaaagaattattagtgatattctaagctccagtaacacacagggaaaggtggcttgctaatagtttttttgtgtaattttttgagactggggcttgctctgttgcccaggctggagtgcagtggcacgatcacagctcactgcagcctctatcttacgggctacagtcagcctcccaccttggcctcccgagaagctgggactacaggcatgt

SEQ ID NO: 11906 - DNA, 231 bp, Homo sapiens
  misc_feature 1, 2, 3, 4, 5: n = A,T,C or G
nnnnncaggtactttacttttttttttcttatttttttgtcacctccattgttttattattttaagcagcagagagatctgcctactgtagtatgttcgttacagcttatatggtagaggggacacatcccagatcaggcaaacccaagatgaggcgatgttgtaaaaatactctgaggaatcccacagaaatctaagagcaggaactacagcacagctgggcttcctggt

SEQ ID NO: 11907 - DNA, 1049 bp, Homo sapiens
  misc_feature 1, 2, 3, 4, 5, 6, 1048, 1049: n = A,T,C or G
nnnnnngggcctgatgaagggtgtctggccctacctaaacgagccttggaaggtttcacttcaattccaacttaatctttaattgactgtcccggacagattgagaactgaaatccatcagaacgaagcatgaggctgaatttctcctgagagctcagctcacttttacaagtaaattacttacatcttccttgaggcagtaaaagcgcatttgtttggttgtggtgtggggaggccacggggactgtaactctgtgaaaatcagtgtttaaaatgtgcgacaaaaagcaataaaatcatgttgatcggcatacaagagatcaacgtggaatgtgccctggtagcagaaacagggtggaggaaagttggaattcacaaacatgtttatagatctctggttttctaagtccagttagaagatattcaacccatgtcacattcctggaccataacattgctctgatgttgatctagaacctgccatctattgtacagttgaatccgtctatggtaactaggctaatcaatcaaggaggaaaatcaagacagggagcttgtgagagtggatgtggtttctggtcacaaggcttccaggtcagcgctgtacctctgaccctccccaaccaaacaagggttctgtttatccagaccagggggccaccaggtcagatttgcagtcggttattcccactgaggagaggggtttgtgctttcctgtttaattgcttgtctggccaagccatgagttgcagggtccacctctttgttggccttttccaggaggcggtagtgggaactcagtgcgatgacataaatcctctttccagactattactcaaggtttgaagggagataaagttaaatttaacctcccgcttcagctattttcacaggaaaaataaaaatttaaagcagatttcctggtgattccatcatctttcttatcggagatttacaaataattctaaaagttgagaatttctgcaaagtctggatacccttgaacctttttcctgagagataagatgatgtatttatgcacatacann

SEQ ID NO: 11908 - DNA, 4437 bp, Homo sapiens
  misc_feature 1, 2, 4436, 4437: n = A,T,C or G
nngaatgaggttgatcagatcaaaaagtggtgttgcaaaaccaagtggccttagacataactgctgcccaaggagccacctgtgcccttttaggaacacaatgttgtaccttatccctgacaatcagcagaacataacaccagccctgcaaaggggtcttccaggagattaaggtgactgagaagcctcactgtcaaccccctgcagagatggtgagcatccctaggttctggcgtacattgggccctaatagtcataagtatcatagctgagatcctagtagtgagctgttgctctctgtattgttgttgtgggttatggactcagggctccgccatataggcatgtgtccctgcctggaggacgccctcagcctagggggtgtagtgtaagggaaatggctgtgctttagtcaggagtaggctgaggcagccttctggtgcagcatgactcagtgggtttggagtgcaagcacacaaccttgctcgttatgtaaccacaccacatgaggcacattaggtaacaactcacatgagctcgtgtttggctcagagccactattgtctgtaaaacaactaccttgctgatgctgtacatatggctcacttgtgcccagagagagaataaagccatgtcgaaactatctacgattccttgagtgtttttccagctacctgccacttgcccacccactcccctcagatctcagttagaacatgacaattgggctcatgaacaggatcctgagtggttgcaggtgaacaagcagttggcacaagggcaaagtgatcacatcctgattgagtggctatggacagccatacagactgtgtggaacaacgctggtgaaatacccaaaccatttagaagcagtaatgcctcacttgcctgggactgggatggtgtggctgagactgccttactggcagccaggtgcgctattcagcagccacaagccctacaagtaattaaccaggggcacctgtttgagctggaggtgcatgtggccacagacggttttggttgaggcttgtggcaatgcacagagcgcctaagaatgccagtaggcttttggtcccaactatggaaaggagctgaactccggtattcattgatagagaaacagctagcagctgtatatgctggccttcgggctcatgagagcatgacaggacaggctgcagtcatcatatggacaacttacccaataacaggatggatgcgtctatgtgtaatgaccacctggagtgggatagcacagatgtccactttggcaaaatggggcgactccttgcagcagtggagtaagctgagtacaagtcccatagcagcagagttgcaagaggtcttgggacgtgtagtcctaatgcaagataaggccatgcggcctgaggcacccctagatcctgagtcttcaccatttaaggaagggcatcccaggattcctgagggggcatggtacacagtagatgaggtgctactgctgcctggaccactgttgcagtccaacctagtactgacaccatatggtttgaaactgggtgcggacaaagtagccaatgggctgaactcagagcagtgtggatggtaatcaccaaggaggtgacacctgtggtaatctgtactgatagctgggcagtctactgaggcttaaccttgtggttaactacttggaaaatacagaattggctagtgagccacagacccatttgaggccaagccatatggcaagacctttgggaaataggtcatcaaaaagaggtaactatttatcatgtgtcaggccatatgcctttggccacccctagtaatgatgaggcagatgccttggctaaggtcagatggtcagagtcagcaccaacacaagatgtgaccttgtggctacaccggaaactgggacatgcagggggtaaactgatgtaacaattcaataagtgttggggtctgtcccttcccaagcaagacatttgtgaggcttgtcagaaatgcctggcatgtgttcagacatatcctaaaaagaggcagctgcccggtgttatacaacaagtaacaatagggtgagtgcccttgaccaggtgggaagtagactacatcgggccgccgccaaagtcgcgagggtatacgcatgcactaacggctgtagacatggccacaggcctgttgttcacctacccttgcagggtggccaaccaacagaacaccatccaggccctgcaacacttatgttccctgtatggttgtcctctggccattgagagtgataggggaacacatttcactggacaacaggtacaatgatgggcacagcaaatggacataaagtggggattccatgtgccatacagcccacaagctgaggtattattgaatgatataatgggatcttgaagaatggattacgcttgcatgtcaaacccctgtctttgcggagctggagttccaggctggacctggtgctccaaaccttaaatgaatggccacagaaaggtggcccggccccagtggaggctttgtttcactaggccaccacccccattcaattggagatacataccaaggatgacctcctccgatcaggtatggggacaaatggtaacctgttgttgcctgccccaacaaccctgaaggcaggggaacagaaaacctggctgtggccatggaccctccaagctctccactgctggtggttggccatcatagctccctgtggggagggcctacagtatgacttgcatgtcactttttgagtgttcaatacatggcttccaaggttgactgtttgtagaggaacagccagggaaggaaccctcctctgagggacatatgtactatctgatgggcctattatgagctacgctgtgactttggcatggatacaggattctaaggaaccatggagatttgagaaggtgtggtaccatcacccagggcaaaagcccttggtggctgcattgttatccagggatggaaagttagcctatattttgcctgagggatgtgatttacctctgttagtacctgtgcctgctctgtcatttcaaccgtaggttaacatgctccaattgcattgtggactgaccccacacctatgctgaggtgaccaatgtttccaactgttggacctgcactgcctttccagcagcagctgcagacagcttgccccgacacatacatcccgtgtctgcagagaactggacatgcctggagacttgagatcccatggctgatgcctggaacacaatgtggcaagctttggacaaaggacacagcaagacccatggctggaccgtagcattcgtgatgagtggggctggctagtaggggaacatgtagtagcccaagcccaggcattgcagtgcacagagcaacattggggtaacaggatgggtacctgtcacggcctgtgcaaacataacatgtgtcaccacactgaaggtatggtagaacaagtggcctcaccaaggtcggaccccaatggactttttgcctcttgggagcttatgggtctatgaggacacagtagcctttcctatcagcaaactggagtggatgttgtatctgggggtggccttatgtacctgctactgttctccccacattgcccagatgcctgtataactgggaggcactgtgctctcagtttttgcgaatgtgatgagccccctggtgtttctaccctttggcaatgactatccctggagcaggtgtcaaaactgtagaagcacaatttactgctcttgcggagcacaccgctcaggctctgaattacacctgagtgtccctcctcctgttaatgaatgaggttgatcagatcaaaaagtggtgttgcaaaaccaagtggccttagacataactgctgcccaaggagccacctgtgcccttttaggaacacaatgttgtaccttatccctgacaatcagcagaacataacagcagccctgcaaaggggtcttccaggagattaaggtgactgagagcctcactgtcaaccccctgcagagatggtgagcatccctaggttctggcgtacattgggccctaatagtcataagtatcatagctgagatcctagtagtgagctgttgctctctgtattgttgttgtgggttatggactcagggctccgccatataggcatgtgtccctgcctggaggacgccctcagcctagggggtgtagtgtaagggaaatggctgtgctttagtcaggagtaggctgaggcagccttctggtgcagcatgactcagtgggtttggagtgcaagcacacaaccttgctcgttatgtaaccacaccacatgaggcccattaggtaacaactcacatgagctcgtgtttggctcagagccactattgtctgtaaaaggtataccttgctgatgctgcacatatggctcgcttgtgcccagagagagagtaaagccatgttgaaactgnn

SEQ ID NO: 11909 - DNA, 418 bp, Homo sapiens
  misc_feature 418: n = A,T,C or G
actgttctggttcccactcagagatctctcgtaagatgcaatctatcaggcaatgtctaccacacacacacatgcgcgagtgcgcgcgcacacacgcacacacacgcagaggaagacagacagatacctcagaccagattactatcacagctaaagtcagacttagaaaaactcagaggaaacacacagatactttctcatattctaactaccaacttctcccaaggtcaacattcacaggagtctagccaactccagagactcactggcatcctgtggtatatttgggttaaacagcaagcatgatgctcctctctccaacttctaaccaacagaaattaaccaatgaccccttcctgcaacacatgatttacacagccaacaaaaggagcacacatggacaatatggagcaggaan

SEQ ID NO: 11910 - DNA, 1269 bp, Homo sapiens
  misc_feature 343, 1269: n = A,T,C or G
acagtggtgcagtcatagctcattgcaaccttgaacttcaggctcaagagatccttttgccttactcagcctcccaagtagctgggactacaggcatgtgccaccatgcccagctaattttcatttaattttttgtagagacggagttttgctatgatgcccgggttgatcttgaactcctggcttcaagtgatccttctgccttggcctcccaaagtgctagcattataggcatgagtcactgtgcctggccttgaatatttttacattgcgttgtcacaagtgagctgtgtcattttggtatattttaattaaaaggcaaggtttctactttgatattatntaaatccacacccttgtatcttacatcaaaatttaagaatcagtcagctttaaattatttgcttttattcttctctaggagctgctgttttgaggattcctattctgtatggggaagttgaaaagctcgaagaaagtgctgtgactgttatgttgataaagtgcagttcagcaacaagtcagcaaacatggatcactggcagcagaggttccccacacatgtcaaagatgtggccactgtgtgccggcagctagcagagaagagaatgctggatccatcaattaagggaacctttcactggtctggcaatgaacagatgactaagtatgaaatggcatgtgcaattgcagatgccttcaactccccagcagtcacttaagacctattactgacagccctgtcctaggagcacaacgtccgagaaatgtcagtttgatgctccaaatttgagacctgggggcaatgggcaaagaacaccatttcgaatgggaatcaaagaatcacttgggctttcctcatgacaagagattggagacaaagggtctttcattagtttactggtggtgggtactttttttttaatgaaaagtatagtatggtgacatttttaaaggaacaagggaaatagtttggtatgagtactttacttgtgactctaggaatcttaggagtaaatgagtgctcttgcactagttgaaattgtctacagaaataaggggaagtcattgccgttgttggagaattctctttaataatttgtgtggctggataacttgagttgagttagaaatagacttaaatttggaatatgaatacacatttgtgtaactttcaaataatgtcattctgaaccaattttagaattgagaggggcctagtgacattacgggggaagttaaacatgggtatatgtgttgagcaataan

SEQ ID NO: 11911 - DNA, 722 bp, Homo sapiens
  misc_feature 1, 2, 722: n = A,T,C or G
nnatgaaatgtctgtaagacctgtactaggagctacaaagaaaactgaaataagttagcccaaggcattttttgtgaaggcaaagaaacattttaattccaaataaatattattaggtagaagagagctacaaagtgtttctgagggtcccaaggaggcagaagatggcagtgtctgagctggataggcatactttcaaccggcaagggtgtggcaagagtaaaatcaaggctggtaaaagaacacagcacgtttcaagcctaagcagcttaagtgcaaagtggctccgggtggaaatgatgagagagcaagagcacaaagaggaccctctaaaacagagccagtgaccatgtgagctgagggggagggcttctcacagggctaacggtacagaaagacgcgaagacacaaagcatcatgacccatccagggagctgcatgtgatcccacttggctaaagtgaagggtacatgtgggaaagaagcagatgatgctaaataaacaggcagaggcctgactgtgaaggaccttgtgtgccaaagtaaagtacgtgaacattattccaaaggcaacagggaactgaggcatttttaagaaaagaaatgacaaacagactagctttaagaaaaaattactctggcactccaatggtttccatctccacaaggataaatccaagtcttctatgcttaacctatcttgtgtatcgtatttgaatatcn

SEQ ID NO: 11912 - DNA, 258 bp, Homo sapiens
acatcgaataggcaagaacacaggcagtagggcagctttgacagcctcagtaatttccaagggtattttttgacagaagtatcacaagtcttaaagtgattgcatcgaaaatttctgattcattttgggtaagtagattatcttttccattttgccaagggaccctgttgtatgtattagtggtagaaaccaatttgtatactttataaggggagatatgaggtagaaacgtaagaacttctttggggagccgacagt

SEQ ID NO: 11913 - DNA, 595 bp, Homo sapiens
aagtccagttacctcaggggcaataaagtaggaatccggtactaaagcagactgacaggagtattgcccggtactgggtggttatccagtgatctgagagtttcattcaaatcacctaaggatgcataaacaaattgtgcctcctgacgtcagtctgcagaatccaaatctctgtttactttcaatgtctgtcagtgcaaaggtaaagttctgtccaacttgattctgagacaccctttcaatgtcaaagggaaaacagaactttggcacactctgtagtatttcctggtctccaaagtcctctgggaatttccacaataccacaggatcttcattttcagaggcatgacatttcactttcaacaccaagtcaaaggttctgtctggatttgccctctgaccagtttctgcttgttctcccttatctttgttcctcaatctgccagacattgtagaacttaaaacagtccttggagttcagaacaaagaataattgaagcagagtgtcaccaacagatggtaatcagtggagtcaaattttcttcagagattctttgaggattctcctttggacttcaagaaagagtccccgcgt

SEQ ID NO: 11914 - DNA, 392 bp, Homo sapiens
  misc_feature 1, 2: n = A,T,C or G
nncaccagggactctccaaaggtgtcctctctccaagtcacaaagaactctgatgaagatgtcctttaaaggctgtagcacatttgcagatctccatataaactgatttttaattttaatgaaatacatgcatgattgctactgctattaacatctgcctacttacacttttgcaatgtttaagcatttgtttacaatcttcagtgggtctcaaaaagtgttatttatatttcactgaattctaccattgctataagtaacctgcaatatagcttaaaatatggaaattaacgctgcacacatgcctaaataaggatttaaatgtaagtgaaaacctgatacgattttatctagcaaaggtttgagaagggcaaaggtttgtacctgcccgg

SEQ ID NO: 11915 - DNA, 1294 bp, Homo sapiens
  misc_feature 1, 2, 3, 4, 5, 6: n = A,T,C or G
nnnnnnatagagagccgcgaggcccacggcgccggccgccctgactgtcccccccccaaagggtcccggaaaaaaagaggggaagaccctaaagcgtggtccacaaggcgccgtggggaaaattggcttacgcaggcggcccgggatccacgcaaagagagtgccgttgcgtaaccaacctaagataataaaattgatcacgaaacaatgtaggagttaaaccactcgtagagaaatatagactactagttaacagataataagggccttctcgttgtactgcaacatgaataatgcttgaaagtcaacattcctgtccttacaacaacaaaaagctgaacaactaaaaatcagcaacttattggatccatcagagaactgaggctgacaagtaaactactaccctgaaatctgaagagacagacgaatccagggagtcactgctgagatctgcttgtctgaggcagaagctgctagaatcataaactggtaggaacacttaaacagtgattttaacaaattgccagaggctgagtgcgcactagcttgaaagtgagaaactcctggtggccatagtcttgtctggagcttcatttttgtggactttatcttcaggaatcccaccaggttctcatagagccaagaaagacctcttagttgctctcatttctgaaaagtcatgggccactggcaagttaggaaacgaaagtgaaatcagctgatagtgacatcagtcagaacaaatgtaccaagttcagagagctgtttactaggcacgactgcgaaggcaagggggcaccagctcaggactgcatctgcctgccatttcccttccactcctcctttctggagtctgacattagaaagccagcgagaaggaagattcaaacaaccaaccctgatttcctgcttctccttttcatgagtgttcctgtggtctctgcacctcctttctgtaagtaccgatcctgcaagcatcacctgcaagcatcacagcttacgcagacgtctactaccttgtaagacaattttgttttcttctcagatatttcatgttctggcaatccacataggggaactcactggttgttcagtatctgtgaccctccctcgctcatgtctgtataatctacataatctaccccctttactctctgctctccttccttccactcttcggcatcaacatgtgtagctctggcctcaaagatgatgaaagtaaggccagtataactggttagaaacgatgcagggctgactgcacacagcagagtcttgcacgcagtgtgtacct

SEQ ID NO: 11916 - DNA, 530 bp, Homo sapiens
  misc_feature 1, 2, 3, 530: n = A,T,C or G
nnnataggtggacagatgatgggatggtaagggagggatctttaaaaacttgcctaagaggttaaaatgtagggactgaagttggcacacaagccatctggttctagagtccctgtatcatcttcggtatccttcaccaaggcaaggatggtctctttcagtcttagttttctgacactttgttggtatttttaagttttagatgaacagttgttgaatgttatcagatgcttttcaaacatctgttggaatgaccctgtcattttcctttggtctgttaatatagtaattagcagtatcttttctcattttgaactgtgcttattttaggctaaatacttgctagcattcacactttggttttgttttcaaatctatttagacttttctctaaccatactacaaaaaaatgttaaaggcagtttttcaggcccaaggaaaatgataccagatggaaatacggatctatacaaaggaattaaaagctctagaaatggtaaccacacactgaaaataatgaaataataagn

SEQ ID NO: 11917 - DNA, 1025 bp, Homo sapiens
  misc_feature 1022, 1023, 1024, 1025: n = A,T,C or G
agaaatggggtctcactatgttgcccagactgttctcattctcctgggctcaagcagccctcctggctcagcctctcaaagtattcagctaggaattgtgaggaattgcacctggcccagactcttattaaagtaaaacaggatggaataggtaaaaaatgccagcagataatcaaaatattagcctaagagcccatgtgtaataccacaattcctagcaataatttgagttgagctttctcatattttcctttccatgtaaaagatactcatctcttccccttgtttaccatatccagccccactagctgaatattaggtttttgattaccacttaggatctggtatgcgaaattccttctgcctaaaaagcctttctccccagtcatcacattggtgtctccttgttgttcttttgttatagaacttaaccgtcattttttcagagaggttttctctcactaccctatccaaagtgctcagtgaatgttaattgctgtcatttattaaatgagatgtcccttgttattctttgtctgagcagcctgtatttccttcatagcattgaccacattttgtaatttcttttgtttattgtctgtctctacagctagattttaagttttgtgagtccggaaaccttgtctcttattcacacctgtattcccatcatttagtaggcagtcttgtacatggtaggtgcataggtgtttaatacatatttgttaaatgaaagaatgacttgtatgtctcagtatttgtggagcagataggaataggagcagctgggtagcaatatttgattgttttactgataccagctgaacttctgccaatttagggattggtttgaattaatgactgttaggctgttatcacaattttatacttaatttttttgaaaatacagttaaggatactatccataacttaaataaaggttatatttcttaattaattctagaagtactctcgagggggggcccggcacccatcatgtggttccccttattcccgggtgnnnn

SEQ ID NO: 11918 - DNA, 418 bp, Homo sapiens
ctcactcatgatgtgaacatgggttttgcatctcagttgatctagcgtcggccgaattggactggagtagctgcagcaactgcgacctggcagcaagtaaccggacgaaatggacagatggccgtggaggagaagcctgacctgactgagggagaggactgatccgaccaggaggggagtccccctgagcctctgggggggcttaggaggtgtcccctcccgggtttcggcaccaatgaaaggcaatggaagggcaccatggatcaataaggctgagaggtgagaaaaagagggcaaaaatcttctttattgagccctcgggcgaggttcactggtccgcagggggagggccagggaagtcgcgctgtgccaaaggtgcagcatgcttttatggatgctgggtgaggagtccccgcgt

SEQ ID NO: 11919 - DNA, 453 bp, Homo sapiens
  misc_feature 405, 421, 422, 423: n = A,T,C or G
acttttgctctctgtctttgccaatatttacttttgatctttgtttttgcctttatttgcttttgctctgtttaaaacaggctattcagaaaggcaataaggaagctgcaagaatacatgctgaaaatgcaatccaccagaaaaatcaagcaattgatttcttaagaatgagtgctagagttggtgccgtggcagtcagaggtcaaaatgcagtaacaatgggcaggacttctgccttgatggacaaattcaaacaccagtttgaaacactggatattcaaacacaacaaatggaagataaaatgagtagctctacaaccctaataacaccacaacacctaacatgtggttagtcaaatgaaaagagaacttgttattactactttggatgctaatatggaaaanaaaaaaaaaaaaaaannntttccctccccggggggccctttaaaaaaa

SEQ ID NO: 11920 - DNA, 348 bp, Homo sapiens
acgcggggacacattcagaggtgagcccagagcgggtaaagtggactggggagaacttcggaggatgttcatgtccaggagcagccccacgccctgtatggtcggtgtctagagcctcacagcaactaagaccaacccagctctcagaagaaggaatgtcaaaatgtcatgttcaattttacattcagtgcctggaatcttttcttcacaattgaaatgaaatgtgctgaaggaggtgaatccatgcattaatcttcagctcacaaaggaaatactacataagaagcaagaccacagactcaagacggacataattggatttttttgccatggcctggaaagaaaggt

SEQ ID NO: 11921 - DNA, 576 bp, Homo sapiens
  misc_feature 1, 2, 3, 4, 5, 6, 7, 8, 9, 10, 11, 576: n = A,T,C or G
nnnnnnnnnnnccgaggtacagatacagtttttaaacctaaagttactggtgaaacaagcttgctattactgagatgtataatgaatgtcttaaagctataaatccactcatcgttgtgtttaaggaggaactgaagcacaattgttaagaacaagtgaattaggtgaatatacattgacaaaaggttgataataaagttgtcagaatttcaaaaataatttagtgtgacttgaaatcttaaaatcatgttatattaaattaagtaacactttactgatttaatatttgagtcatttctaaggaaaatactgaaatatcaattgcttaacagaagtttaaaatatacgtaatttggcatcttggtttcacatgttatggaaaagctaaacatatttgggcctgttaattaaaggcataaaaattattttatgagatggtgttcatctgcaaaatactaacatgatgcacttcaaaatgcttactaattttcactagaaattaaggttactaagagttaattaaaattaatattagagtaatttaaactagaaataatgaagggaaacaaatctgtn

SEQ ID NO: 11922 - DNA, 674 bp, Homo sapiens
  misc_feature 396, 397, 398, 399, 400, 401, 402, 403, 404, 405, 406, 407,408, 409, 410, 411, 412, 413, 414, 415, 416, 417: n = A,T,C or G
acgcgggtgacggtgtgtaacaggttcaaataaagattaaaaagtcaaacgtgcaccaaggctctcctctgaggccaggcacagagctaggaacaaagggcaagtcatgagctggccaatctgcaatatcgtgaataccctaatcatcctggtttatttacagggtggagctgtatgatctgtaaattcgcttctacatttacatttctgtgattgatcattcagctaattagagtttgttggaatgtcaaaatgttatgggaaaagacatcaggagccaggaaccatgggactgggagtctaagccacagaatctgctcataggccactatacaaccaaacaggaggatattatgagggattttctgtgtccaacttacattcactccacaactnnnnnnnnnnnnnnnnnnnnnnagacggagtctctctgtcgcccaggctggagtacagtggtgtgatctcagctcactacaaccactgcctccagggcccaagcaattctccatgtcagtctcccaagtagcagggattacaggcacccgccaccatactccactaattttgtttttttttttttttttttacgtagagatggtttcaccatgttggccagtctggtcttgaactcctgacctcaaatgatctgcctgcctcagcctcccaacggacgc

SEQ ID NO: 11923 - DNA, 573 bp, Homo sapiens
accattctccaggcacatacaacatgaaatatcatacagctgtgaaagatctggtggaaagctggaatattgaggaagaaacattttttgaaaattatttctctctctaagtcagtaaatgtttgatataattctgagtgcatggctgtagtctgaaagtttatgtgcccctaaaattaatatgtcaaaatcctaacacccatggtgatgatatcaggaggtagggcctttgggaaagtaattaggtcattaaattaataaggaaatcgtatccttttttttttttgagacgtagtctcgctctgttgtccaggctggagtgcagtggcacaatcttggctcactgcaacctccgcctcctaggttcaagcgattctgctgtctcaggctcctgagtagttgggattacaggagcctgccaccacgcccagctaagttttgtatttttagtagagactgggtttcaccatgttggccagcctggtcttgaactccagacttcaagtgatccacccgcctcaggcttccaaagtgctggcattacaggcgtgagccaccgcgcccggccatcgt

SEQ ID NO: 11924 - DNA, 741 bp, Homo sapiens
actggattcacagaagcatagagtttccaatataacacattctgctaagtcagaaacaactatgttttattttattttattttttattttggagacagggtcttgctctgccacacaggctggagtgcagtgacatgatcatggctcactgcaaccccgaacttccaggctcaaccaatcctctcacctcaacctcctgagctgccgggaccacaggcctgcatcaccatgcacacccaattttttttttaattttttgtaaagacatggtttcgttatgttgcccgggctggtctcaaactcctaggctcaagcaatctccctgcctcggcctcccagagagttgggatcacaaacatgagccccagagccagccatgccagaaataatgataaagttgtccagcatgtttgcttatatttcagaaccattaggcacctattctatggccggatctgttgttttaacataccgactgttaccttctccatacacagctctttatgacttctaaagtaagagcttgaccattccaccaaagtcagtttccaggaagaaagcagtataatgtctcaaatcagcctattctgtatattcatgctctttgagaataaatggccaggacattcattatctcctagttattcatttactcttactcttgagcaataaattattaattccttataaacctgtttccctatctccactgcagacagtaagagttcctaggactgttgt

SEQ ID NO: 11925 - DNA, 415 bp, Homo sapiens
accaggttgggctaagagatgaaaaaccaggctcaagttgggccagagatggacaatgagccacttccaccagaattcccagccacatatgcccacctctgggtcagaagagccaaacgtatttatcgcttttgctcagggccaacatagacacttgattctctctcagggctgtgttttcccccaaatgtatcaatacatccctattttcttccccctttgttttcctttccctggtgacctgctaccccacaccccagcacactgatggtgttccctccaccacaccgagaccccgccacaagctctcagccctcgtagagcacaggccccaccctgaaagttggcagagcaccgggctatcaagctgtgtcatgtggagccagcaagcccggcacaaccgtggatcccgggt

SEQ ID NO: 11926 - DNA, 463 bp, Homo sapiens
  misc_feature 461, 462, 463: n = A,T,C or G
acctgtctttgggctttatgtcatgtaatactcaccccagtgacctttaggggagatgtcaccgtcgtcgtcgtcatcatcatcgtcatcatcccgacgtcatcgttcctattgagaaatgagaccactgaggtttggggaggtgaactgacttcccaagttcttacaatgaacagcaacagggctgggtgggacataaatccatttcacttacagtgaaagccaaattctttattatgctccacatgatcctgtccctgcatctcctgacctctgcccccatccccctcccgatcactcactccagccacactggcttggctgttcctcaaacacaccaggcagccttcaactccagggcctttgcagaggtcattccttctgcctggaacactttcccccaaacgaccgcatggcttacttcaagaatgtgcttaaatgtcattctttttcaggaatcnnn

SEQ ID NO: 11927 - DNA, 815 bp, Homo sapiens
  misc_feature 1, 2, 3, 4, 5, 6: n = A,T,C or G
nnnnnnactttaaaattgctgcactgagagtggaagaaagacagaagcaacagggctgtggataggggaaagggaatgtattgggaagagagacgcaccatggagtcacgtccccacaaatacacagcacatttccagaaagaaaggcaggcaggcactggccaaccaaaacgagtttgaggaaaaatctataaaaggttctgtgccacacaggaaagactgcctgacaaattagctaatgaggacaaggcatctgtccttggaggtctcctccagatgcaaattggcccaaatttgaggccaactgacctctatggaaaaagcaaaaccaaagtcagattcctgtcatccggagaacaactgtcaccttgatcacactccaaaatcaagataaaagcttggctttccaagggtcacaatgggcttacaataaatgagcccatgtaggaagaaataaatatgtgaagcacctcttccacttgacatttggggcaaaggagacgggcagccactacaggatgtctctcagccccgataggcagatttctcccggttggcaccgcacagtgttgcagctcgacccatttcgcttgagtgagcccacggagggacagcatggactgagagttctctctcaggctgtgtgaactgatgtcactcacagcagcaacaaatcttctaaaagtcttctaaaagttccggtgttgatcagtgcaaaaaacctacagcccatgctactgcataagctaacctttgacctatcggctcagtccaaaagagtctgtggcaaagactgtggctaatcaatccccagt

SEQ ID NO: 11928 - DNA, 2346 bp, Homo sapiens
  misc_feature 2343, 2344, 2345, 2346: n = A,T,C or G
atagggagtcgacccacgcgtccggcggggaggtcgctcgactcgccgggcggccgcccgggcaggtacgcggggagactttccctgccggcacatggacctggcccaaccctcacagccagtagacgagctggagctctcggtgctcgagcggcagccagaagagaacacgcctctcaatggtgccgacaaggtcttcccttctttggacgaggaggtccccccggccgaggctaacaaggaaagcccctggagctcctgtaataagaatgtggttggaagatgcaaactgtggatgatcatcacctccattttcctaggtgtcattacagtgatcatcataggcttatgtcttgctgcagtaacttatgttgatgaagatgaaaatgaaatacttgaattatcatcaaacaaaacattcttcatcatgctgaagattccagaggagtgtgttgctgaagaggaattgcctcacctgctcaccgaaaggctcacagatgtgtacagtacatcgccctctctgagtcgttattttacttcagttgaaatagtggacttcagtggtgaaaatgccacagtaacgtatgacctgcaatttggggttccatcagatgatgaaaattttatgaagtatatgatgagtgaggagttggtgctgggcattttgctacaggatttccgtgatcagaatatacctggttgtgagagtctggggcttgatccaacatccctcttgctctatgaatgaagtgatggaggctggtctctgtctgaaagcagtgctctaccaagtcctggagatgaagggaattcactctgttttgcagaaaagattctgtggattaatacagaagcaccagcaacaccagaggggtggagactcctttctctcccgattctacagtctggctctaagcccagtaaaacagctcccgagcactgcttcagctgggtccagtcttgacaaaggcaggaagccagctagggtgggggcgatagggtcagcgggtatgtcccactgttggaggtcactggtattctgtttgtttttgttttgtttcgttttgttttttgagacagggtctcgttctgtcgcttagctggagtgcggtggcgtgatcatggcactgctattcttgaagcactccacccacctgggctactttttctttagtgcagaggtgcactgtcttcttttaggtgggatcgcgtaagcatgagctggtagagcacggagaggcaggcagccaggttacgaagactaagccaattattcactgaagtcatcctcctctcccccaccattcgatttgatctacctctaagccaggctgtgaagaaaaggaaggcactttagaagacctcagcagtgtggttctgtgtctacttccatgacctgtacctgagtatcttagccagccagccttaggaacaccaccaaggttactttgaaatctatgtatatagctagttacagacgggagctatgtgtttcttcattattttgcagctcctcgttgttcctgtgattcctgaacacctttttggaaatatgggtctctgtgagttttgagcacactactatcactttggatagtcactccatttatatttttataaacttccattagagaatcattaaggctgtttaatatctgctctggatattacgcattggctttttgttgcctagtgctacaaaccttcctgtgggactcagtgtcttcaggcaatgattgtgtatcctgttacagatggttgtgatacaagaagaaccactcttctttgaaaataaactcttggaagcttttgccagctatctggggggtaggaggaatattagcaactgtattggttgtctacagatacagaattgcctgttgtgagggaactgattgttttgttgggaaaagaaatttaccaggagaaagagttttgtgctgtattgtgagagatctcgcctctcagttaaatgagccctgggttaaagtcagtgtgaagggcagctgtgtgcgggcacgagccagagtgtctgcctcagactagatttgacttgagttctttatgacccaggactctggataatgtgaatttgctttcctatttaactagaagatacatgtactatagatcattgtctcattttagtgattgttccttaaactagtgaaactagtggatttctcttcttcctctttattttttgcatgttaaatgtgaaccttagtgtatttgtattttgtagaaaataatgaaaaattttaatggagaatgatttaaaaacatttacaatacattatttttgcatctgtgttgttgcattccgctctgagtaaaaaaccnnnn

SEQ ID NO: 11929 - DNA, 409 bp, Homo sapiens
acagacggggtttcacccgttggccaggttgttctcaaactcctgacctcaagtaggccgttcggctcggcctcccaaagtgctgggactacaggcgtaagccactgagcctggccagactgaacattttaaccatgtctactcctcccaaatgaacttatagatctaatacactctgggcatgaatcaggtttgaattcaaggatcacattccttaagacattgacaacctaactcaaatagcagcctgctcttccagccagcgctcattctcctcttcccctgttttattttttatagcatgtctcatcatctgaaattacctttttgttctttcgtctccagtttccccggtagaattttgtaaatgccatcagggctggtgtgcccttttctgagtattcccagt

SEQ ID NO: 11930 - DNA, 313 bp, Homo sapiens
  misc_feature 313: n = A,T,C or G
acagctgtgattccagaactaaaatccccatttccttgccagttgtcagctgagagcccgtcccagcttctaggcactgctcacattctttgccttgtggttccctttctatttcttttgttttcaaagcctgcaatagctggtcagtttcttctcatgctttgaatctctcctgcctcttgttctgttttgcatctccccaacaaaaccttctgccttccttttgcactttttgtttgtttgtttgtttttttgagacggagtctcgctctgtcgcccaggctggattgcggtggaaccatataagcttacn

SEQ ID NO: 11931 - DNA, 465 bp, Homo sapiens
  misc_feature 450, 451, 452, 453, 454, 455, 456, 457, 458, 459, 460, 461,462, 463, 464, 465: n = A,T,C or G
actttttttttttttttttttttttttttttttgtgggcttgggttcgatttagtttgttttttttgtaaagacagaatctccctctgttgcccaggctgatttcacactcctgggctcaggggctcctcccacctcaacctcctgaaagtgctgggattacaggggtgagtcactgtgcctggcaagaagatgaaattttcatccctcaactgacagctatgccctggaggcccagcatgggcttcaggctgcctctgcccctgctcaaagggcattctatttagttcagctctcacccattgtggataaaggagattcacttcacattttatgttttacaattttagtataagcaccaatgtttaaatgataacaaggaagagctccccaaatactctggaccatcttgatttctgggattatattttattctgggtaaaacaaggannnnnnnnnnnnnnnn

SEQ ID NO: 11932 - DNA, 657 bp, Homo sapiens
  misc_feature 1, 2, 3: n = A,T,C or G
nnnatgaagctcaggacaacttcaggcttcaagaacaaaccctaagtttcagcacccctgaggtatgcgtgtattccctcactgacagccgtgtccacgttcacctttacaaacccaaaagtcctggctttctcagcctttcccacaccaacacccatctgccctctgctctcattatgtcaggacattttcttatccgctaaacttatcacaagtgaatgaggcaactcagcccacaactaccatatgaagattaattctatttaacaatgaagacacttagcaatctgtgtaccagcaagccctgggggccgagagttctgcctggtcccacctgatcactctgtcatgacctcagttcatgtgaacctttcgcccaccttcgtctcaaacccagccctgagcccctccatgctgggatgtgtgcagggaccccgtgcaggcttcccagagcaggggagcactcaactatgcagaacatgtcaactccacagatacacagcaggtcgtgactgaaatgacttcccaagggaactgtccttgtcatcctttttaaaaacattaaatgtcagaaagacgatatgagagctcagactgcgcccacgtggggaactgagagagagaggcccagtacgtcggccgccaccgcgcgtggag

SEQ ID NO: 11933 - DNA, 547 bp, Homo sapiens
  misc_feature 1, 2, 3, 4, 5, 6, 7, 547: n = A,T,C or G
nnnnnnnacaatgatcctattttcctgaacagaaccctggctgaacggtattaaaattcaggttccaaaatgagccagtggtaaagaagaaatagagtggaaatttaacacatccatttattatacactgcaaaatgcaacagggacagatgccccatgatatttctcctcagctgtgatcactttctctacaatgttgaactagtggctcttgctctagggactatctggacaattacctgcagcttggagtcattacggagatgatcgtcaaggaactggctcatttgggttacactcactgctctgttcctaacttcctgtgtaaacaactctggagcttaaacttttcttatctatattataaaaatatgcaaataatttctaatatttagaaaagttatataattttaattctaaatgtaactgacagatggcggaatttctcccttttttggcaacactgtttttaaagtttagaatagagattttggtcatctcattcactgcctcttctctaaccctgggtttcacatgtttaagtcan

SEQ ID NO: 11934 - DNA, 575 bp, Homo sapiens
  misc_feature 574, 575: n = A,T,C or G
acgcgggagggaagagtggccttatggctactcaagccacgtgtttacctaaaatgtgctcctagtcgcatagcttctcagaatagtcaaagaagaaaggaaaagaaagctggatgtcccgggtttattttttctgcatctttgcaaatatgagacacaactctgttccaggagctttcgatgcgcttctacaggtatttcttttttctttgtgtcaaggataaatgtgaagatagctgtggaattgtccgaacatttttgccttgaaattaagcaatgttttatgcctaatttcccaaaggacaagttatttatgccagtattaaaagcagcaacttatatattctacgcaaaacagaaaaccagaaagatctaaattttgacaagtccctagtttgatgaattgaaagacaggaagatgactacatcacagcagataaaagagatattttcataaactaagctctgggaaacagaataccaaaattacccatgtacaaccaactactgctcatgggttccccagaggacttgtgtgcggattatacgagtcattgcccagttgtgatagtcnn

SEQ ID NO: 11935 - DNA, 485 bp, Homo sapiens
  misc_feature 485: n = A,T,C or G
acgcgggggaaaacaaagaggagattaaatgtgtgggtggcatgggaagggtgagttggtatgggttgggaaaggcagcaacaacttcatttccctgagcagtttccattgtaatcaatgtattgggtcagcaccaacctctacctgaggtaaaatatttaacgcatgtttctgtcagccttggaatatgctttgccctcttaggtttatatttgtgagtttggggtctgggttaggcccaaaactagtggcctagccttaggccaacctcttccatgaggtgtgtctttttttttttcttttgactgagtctcctctgttgcccaggctggaatgcaatggtgcaatctcagctcactgcaacctctgcctaccgggttcaagcgattctcctgcctcagcctcctgagtagctggaattacaggcacgcgccaccatgcccagctaatttttttgtatttttaatagagatgtcatttcatcn

SEQ ID NO: 11936 - DNA, 491 bp, Homo sapiens
  misc_feature 488, 489, 490, 491: n = A,T,C or G
actgtgctttcaatcatttggcaatactgctgagcctttaaccaaatggaacttagaacccattaaaattgacgtttcaattcaatctagtcaaattggggaaagacaaaatcaagagaattaaaacaattttttcttaaagtgtcattcttccataaaatttcttttattatttatttatgcatttttaaaacagagtcttgctctgtcgcccaggctggagtgcagtggtgcgatctcagctcactgcaacctctgcctcccaggttcaagctatttttgtgcctgagcctcctgagtagttgggattacaggggctatgatgttgtcaacatgatggaataatcacgcaactatgaaaaaaaacgaagactatgaggaaacatttaaaggcatatcagaactaaaggcttcatgaggtggtggctcaagcctataatcccaacactttggaaggccaacatggaagatcacttgaggtcaggagnnnn

SEQ ID NO: 11937 - DNA, 546 bp, Homo sapiens
  misc_feature 471, 546: n = A,T,C or G
acgcgggatagcattcagctcccaacagaacccttcattttctttttatgtaattttctctttaaagaacaactggtcaggtctagtgtatggagagcccttgtgaggacagagccctaatatctggatgatgtttctgaatttagttgacattgtccacttggatgtctagtggtcattttaggcaaacatgtccaaactgaactcctgtcttccctggaccctgcctcctgtggcctggctgtcttagtcagtgtcagccctccatgagcttaggcaaaaagtcctggggttatctctgacttctctctactttccacaaaccatatcaagctctcagcaagtcctattggctctgccttcaagtgtagatagaatctgccctctgcttatccactgcgttgctgttactcggcacaagttgttacctcctactggatcacaagaacttccacattggactcctgcttncacctgccccttcagtctgttttctgtgcagcacccagagctggcctgttaaagcataaatcagatcacatcacn

SEQ ID NO: 11938 - DNA, 494 bp, Homo sapiens
  misc_feature 493, 494: n = A,T,C or G
acttatctcatagagtaattgtgagaacgaatgctttgagcacagtgcctgccacagagttagagctataagcttctctttggtctatgtgggagttttcttcccaggtgaattaccagatccttagggccagagaattcctgaattctctgtgagtatatagtgtagtaacttgcctctagaaaataccaacatatatttattaaattattaaagattagattgttttagagtaggtcaggggaaataaacagaacttgggtcatgagaataaaacatttcttgatattgattgattaatgcacattgtggtggatgagtctttttgtgaatgttgtgaacatttacttagatcatttctaaaagggtgctagagaatctgccggttcaccctaattgatgccccctctaagtagcaaagcagaagaaccaaaattcagtctcagcactttaaaggttttgattcctaaacttggtgttggtcccactgccnn

SEQ ID NO: 11939 - DNA, 542 bp, Homo sapiens
  misc_feature 542: n = A,T,C or G
acaaactttgaatggagtaatggagcagtaatgtctgttttaatcgccctggcccctctttgccttatggaggcaccaggatgaaggaggtgaaaggctgacttaagagtcaggtaaactacctcctgctgtgttttaatactaatgcattgtgaccttgaacaagaacttgaacaagagttcacatctgcataagagaggtcttatctactggtctccaaaggatctggggatatggagcaggatccagccatcaccctgtaaattacctgccattcttaaaaacccacccttacacgtagcttgggaatcagcaatctgatttcatgcgggagatgctggaaacatctgctgaaattaattctccagtaatttggaaagatcaaaactcaaaccttttctgaccctaagaaagagggtcctaagctccctacagctggacttccagataagaaggatctagtagtgaggaaaaaaaactctaaaaatacaatttgggacttgggacccaagtggcagttcaggaatcagggctggaacan

SEQ ID NO: 11940 - DNA, 569 bp, Homo sapiens
  misc_feature 568, 569: n = A,T,C or G
acgcggggacacaattttagtaataagcttcaaaacccatcactccactgaatccagggatgccagaattgagagtccataggacccgtttaacggatcccacattcagtagacggttttttgtatgcttcgagggaaggaaggtattttcaaatgcaacttcttttttttttcttgctctagttagggctgattttaccactgggcaaattgcatacatttggatccatgccacgctaaatactgtttattttggagatctgtcagaggcaagcacatggaagacaaggggattctggtttgaaaaggcaattctcatccagacagattcagatggagaggagcggtgtggattaaaatgcgccgaagtgacagcgtctcaccctgtcacgtaggctggagtgcagtggtgagatcacggctcactgcagcctcgacttcatgggctcaagcgattctcctgcctcagcctcctaagtagtcgggatcataggcacttgccaccacatccggctaatttttttgtagagacaggatttcaccacattacacaggctggtttcaaacnn

SEQ ID NO: 11941 - DNA, 3008 bp, Homo sapiens
cccacgcgtccgctggcgggaggtggggccgggggcgggttcctggcggagggtggggcagacgtgggttaccgggtgtgccaaccaaaccctgaacagaggaggtggcggtggtggccctcgcctgtggcccccgtgctgcttgcactcgaactcgtcgccatggaggagctccaggagcctctgagaggacagctccggctctgcttcacgcaagctgcccggactagcctcttactgctcaggctcaacgacgctgccctgcgggcgctgcaagagtgtcagcggcaacaggtacggccggtgattgctttccaaggccaccgagggtatctgagactcccaggccctggttggtcctgcctcttctccttcatagtgtcccagtgttgtcaggagggcgctggtggtagcttggaccttgtgtgccaacgcttcctcaggtctgggcctaacagcctccactgcctgggctcactcagggagcgcctcattatttgggcagccatggattctatcccagccccatcatcagttcagggacacaacctgactgaagatgccagacatcctgagagttggcagaacacaggaggctattctgaaggagatgcagtatcacagccacagatggcactagaggaggtgtcagtgtcagatccactggcaagcaaccaaggacagtcactcccaggatcctcaagggagcacatggcacagtgggaagtgagaagccagacccatgttccaaacagagaacctgttcaggcactgccttcctctgccagccggaaacgtctggacaagaaacgttcagtgcctgtagccactgtagaactggaagaaaagaggttcagaactctgcctttagtgccaagccccctacaaggcctgaccaatcaggatttacaagagggagaagattgggagcaagaagatgaggacatggaccccagattagaacacagttcctcagttcaagaagattctgaatccccaagtcctgaagatataccagactacctcctgcaatacagggccatccacagtgcagaacagcaacatgcctatgagcaggactttgagacagattatgctgaataccgcatcctgcatgcccgtgttgggactgcaagccaaaggttcatagagctgggagcagagattaaaagagttcggcgaggaactccagaatacaaggtcctggaagacaagataatccaggaatataaaaagttcaggaagcagtacccaagttacagagaagaaaagcgtcgctgtgagtaccttcaccagaaattgtcccacattaaaggtctcatcctggagtttgaggaaaagaacaggggcagctgaagttatcaagggaatttttgagcctctgcttagtgaaacacaaaggaacaaagcagctataaactaaatagaatgcaactatctgcttttcttatgctgaccactggagtccatggtggcaagtagagagctgctctaggttcttgaggtttggttttcattattaatttttagggtatgggcactgtgcaaagactccatagctgtgcctaggagtctaggaaaagtgacagaggcttggcttttttacctttagttcagccaagtcattttcaagtcctgagaaatgacatcatcttcaggataaaataatgaggacattagacaaaccaaactaagtgaattttagcctggtagcctctctaaggaaacagtaataataacttctgataagagttaaaagaacttgtagcatacctggatataatgggaaagggcctgggtgttacccatgtactgaaaatgaacttttaccaacatggctaaaaaattaaaactgactgcttctgtgtcctttgtacaagtttatatgtttcccttaaatcttccaaggcagatggttcttaaccctggctttacatctgagccacttttggggctctctaaacaattagatccccgggccccagcccagatgttatgagttacaagattatggtttagacatcttttactttttccaagctttgtgtgtgaccaagatacatactttactataaggctctaccaaattcatcttaaaattgacagctaaatactgtaattatatagtaggaagaaaattcttttctgaacataggagttcctaggatcacctaaagtagggctcctacctggaattctccagtgactgaaaactataactgggcaggatttgaatttacctacaaaaggagataaatggtttagttggacaaaagatcactcttcagtcttatcctttctgttcctcattgttacaaaagaaagtggatgcttcactcataactaggaatggtactgcctttcccagttctactgaaggggaagttaaagggccacaccctaggctttaggggatagaactgcacccagcagtgtcagcaattcctgaaacaacttggatgaaactgcgtgatgccacacccttgacagggcatttctgagcagagaacagtccttgggagatataaacatgcagtaagctcagctgcgtggcaaggataaacaggaacccatccttagggcatggacagcctaacaagaaaggcccttcagctgttctaatcaccagggtaggcctgggaaataaacatgtaaggagagaaagagataataaattttgaaagaattttgaggtgatgaactatggacccagtcagtctacagctgccgtgaccagtatggtagcaactgtatggctatttaaattaatcaaaacaaaaatgtagtttctagccatatttcagatgctctgtagctacctgtactgaacagtgtagattacagagcatttccatcactgaagaaagctctattgaacagtgatagtgtgtagagaacatctggttctcaatctggtggaaaataagacagtttaaaggggtctcatttattgtcactgttccaaatgacgaggcctcgtgccgaattcttggcctcgagggccaaat

SEQ ID NO: 11942 - DNA, 437 bp, Homo sapiens
  misc_feature 436, 437: n = A,T,C or G
actttttttttttttttttttttttgatgctagttgtgatttcctgtaattctcatttgcaagggggtaaagggggatcaatgagatgatacagaaaggaggagctgacaattcttttgtccatcacatcatgacaaatacgtctcaacagtcctgcactgaagttttactggcagctcttactctgggaagaagagaaaaggggaaggaagcattacattttaaaagccacgagggaagtgttctccttacacgatgagttttccccttctaggcaatcctccccagctgcatttactgagggaggagggatgagacagagaagtgtcagccctgagagcaacaggagggccagcctggctcccagaaatgtagctcctccctctgaagcctgacccctccacctggccactctgccgtccctgacatcctaaann

SEQ ID NO: 11943 - DNA, 348 bp, Homo sapiens
  misc_feature 347, 348: n = A,T,C or G
acgcgggactctgtaaatactatgaattggtatcttgactctgtgtgatgccaaatattcatttgactacattaccttcatttcaaaatttaaaattttacttttcaaacaaacaaaagttgtgattcagagtaattggaggggaaaagaaagcgatctttggcccagcgcggtggctcacacctgtaatcccagcactttgggaggctgagacgggcggatcgtgaagtcaggagattgagaccatcctggctaacatggtgaaaccttgtgtctactaaaaatacaaaaaaattagctgggcatggtggcaggcgcctgtagtcccagctagtcgggaggctgann

SEQ ID NO: 11944 - DNA, 520 bp, Homo sapiens
  misc_feature 448, 520: n = A,T,C or G
acgttccaggaatggtagatagagcatacatatagggcaggctgagaggctggaagggctgccttgaatgccaggctaaggaatttggacttcctaaggaagcatggagtgaattttaggctgggaagggataggatcagatctatgttaatattgctcaccccaattgcagcgtagaggatgggatagaagggaatgtatggattcagggagatggcttagaaccctaagattcatggtagcagggtctcgagcaggggcttgcttgagcaagcaggtcccgtggagcaggtttgtcttaactctcgttgtctttctgaatgggtatcaaagaggggcttcctgcagcctggatgaccggggctgccttcctttgtttgtggggagggacgcatgcctggcaacttcatagaggtccaggccatgggcattgccagaggctgagcanaccatgctgaagaaagccaccccgagtgcctggtcccacaggccttattatctgtagctggctttgaatgcn

SEQ ID NO: 11945 - DNA, 317 bp, Homo sapiens
ccgggcaggtactttttcttcttctactttttttttttttaaagagaacatctgaatgatgtattcggaaaaaaacatttcccaagaatatggagaaagggaattgaacataattcccagtgtaagagtggaatgagcatgtggccctgtgggcctagtcccagtttgttaatcttgtgagcagagctgctggcggctgctctcagcccgctaatcgggctctttctctgtcacgtggacaggacactgctcacagggttgcagttggctgctgccctgcgttgacagctggttctaattgtgcagagctacgtagt

SEQ ID NO: 11946 - DNA, 1188 bp, Homo sapiens
  misc_feature 1, 2, 3, 4, 5, 6, 7, 8, 9, 95, 96, 97, 98, 99: n = A,T,C or G
nnnnnnnnncccccccctgggggtgggggggggaaaaaagtttttttaaatttttccccccccggggggcccccattttttaaagggcggggggnnnnnattttttttttcctctgttgtgcaaagttgagtaatactttatttgaaaaaatgaaaagtgcacacacacacacacacacacacttacataggcacaggataatctggaagtatgaccagcaaatgataactgattccctcaggggagaagaaactgggtggctgaaggacaggaatgagaaagaaggacagttgcgtttgtttgtatcgtttgaaattgtccagtgtgtatgtgttcttttcaaatgtttgaagaaccattggctcccttatcaaaatgtaaataccaaggaaaatcaggaatttaagaagtctaagaattctgtaatgctgggtagaattttctgtacgtgtaaaactaaaatgtcttttgtaaatcactgagtcttcctgtttatttctggttagagatctttgggggcttggatggaggaacaggaaaagaggagccaggcttttttggaaaattggcggcagcggtggcatacgggaaactgaaatctttatctaatctcatcctttgtatattcgtcttggatttgctgaagaaaattaaaaggtaaattttgctgtgagctcactgaactcaaattgaaagggaacatatgctgtttatttttgtgaaggacattaattgggtgtgactggcagggttgagacctgaagttcctcttttagataaggaaaatttcccttggtgagaaatctctagactagttatgatagattcctaacccccaaccttgaaaggtaacttaaggctccctcctctaagggaagggctgaagaaaaaattaaacaggcaactgtgcctatgaagatttgcgaaaaaaaaaaaaaaaaacatctaggacacttctcattcactgggtcaagccagagccatcaactttgtgacctagtgagtggttagtggatataggcaagcgtagtaacttgggaccagaggttagggatccagaaagttgaaaatgtaaagacaaaggccagaggttataacttactgcctcttggtaagtaggaagccagaagttgagctcccaaataaaatgttttaggaactgtggttcttaagtaactccaaaagtc

SEQ ID NO: 11947 - DNA, 493 bp, Homo sapiens
  misc_feature 490, 491, 492, 493: n = A,T,C or G
gtggtggcttatggagtccctaacgtttgcacaaaatggttgctacattccacactcccatgtgccctgagcaacctccagggaaacttcagataccgtggggcttggcctgccagctgagctgacccagcgatcctttctatcacagctttgatcttcactgggttgggagcctgtctgaatctaaacatctgcctctctactgcccaccccttcggcatttcctagctctccctgaaaggtgcaaacatgcatgcagttactcaaacagaatatttatccttaactccctgtccctcacaatttcttttaaaacaatccactattgtctacccccgcccccgcatcaccctttcatccaggtgcccattcccttctctctagtcctgcaatacctaagcatcgatctgcctttagcacatccatccccgccttattctccacgcaggagctgagtgacctgcacaaaatcccctgctaaatacggtannnn

SEQ ID NO: 11948 - DNA, 368 bp, Homo sapiens
  misc_feature 263: n = A,T,C or G
acaccatgtccagtgattcatgtctggacagaggctaagtcttgggtcactcgcttcacaaagaggcatcactgttcactcaggggctcctacctgaatcccagagcagacggattcaaataaatgcaccaacctctatagacctgccttgcaacctcaaacctcttggggtcaaaagcaagaagaaatgtttatgatcctagattgtaggggaaataatggtgatttttaaaaacacaattccccgctgggcgcggtggctnacacctgtaatcccaacactttgggaggctgaagcaggcagatcatgagttcaggagatcaagaccatcctggctaacacggggtttccccatgttggccagggc

SEQ ID NO: 11949 - DNA, 724 bp, Homo sapiens
ggcggccgaggtaccagggcactccaaatatgtaatttaacacattcattaataactatgataaatagatattttattccaagaacaatatcattagagagttagattggagggcaaggggattaagtatcttaagtttattgtttcccgagtgaccatttttaaaagcctccttccaggaactgtggaatgcctgccaggctccctgactgctgtctggtgagggtccctactggtgctgtggacagcacaatacacaatggggcacaagaaagccacgcagcctccccctcctagacacatgctgtgcacccccttggctctgcttggaaggttcagctctgcaaatggaaggttgcaaacatcagacaccttctttctgtttctgtctctctccccttcttctccccacagtgtccagccttggcccctgacttttcctggggttggggaggcctgtaggttcagaagctgagcagctgggtgaagacctcccttagctcaatgtgctctggccatagggagcagacaagcaagctgagtttgggtagccctagacacatggaaaaagaaacaggttcctcacctccacccctccatagatgacttcattaaaatgtcgctggttaatagggaaaaggtagcactccttgttaggccaaacccctaaaaggcatgttttttacgaaaaaaaaaaaaaaaaaaaaaaaaaaaaaaaaaaagt

SEQ ID NO: 11950 - DNA, 584 bp, Homo sapiens
  misc_feature 580, 581, 582, 583, 584: n = A,T,C or G
acactggctgtgctgtttctagcaccataaggcagtcatcattattgagccaggggctgtgcaaaattggggtgattgcagagccaaaaagcgggctggagggtggtttctggaatgcctgttttactattcttcctgttcctttgctctttctgccaacttcagaatccttcctttccttaaaacatttagtgatatccctgaatttatttaattgctacgtgagtgatttttgccccacagcactggaagataattggaatgcattctagcttatgtgctctggataatatgcaattaccagccagctggagagtagtatgcctttgtctcacaatgtcttgtaattttaaaaagttttctcctatttgctggtgtctcttggtacctttcttacggcatcatatatctactatggggtccttatgtctgaatgtgtagacactttttttggtatactgaataagctcctggcgatgaaggaagacaccgctttggtttgtgatgtcctgtgcagttgggccccaataaacgctacggaaatgatggtgatgagacttatttctttagatctttaaannnnn

SEQ ID NO: 11951 - DNA, 403 bp, Homo sapiens
  misc_feature 403: n = A,T,C or G
acctactcagttctgctgatggtagcgtaaacgccactatatacataaagaaatgggtgtggtggtgtcaataaaactttatttacagacaggcagtgtcctgacttgggtcccattggctgtcgtttgctgacccctgcaacttgacgctgcaaagtgaacagcccagcacctcccaggctgcggttaggacctcagcccgtcaccgtcatctcctgggtctcagttttctcatctgtaaagtggggctgaagccacctgcctcatgtttctcctgggatttttgtaaaatagtgcacaaaagtagacagaaagctccaaaggcagtttgcaaataggaagacacaatcaagtctatctgtgaaaaacatttattcttgagaatctaaaatctggacaaagn

SEQ ID NO: 11952 - DNA, 430 bp, Homo sapiens
  misc_feature 427, 428, 429, 430: n = A,T,C or G
ctcgagcgcgcgcgccatcggcagcatcggcgtgatgccgatgccgcccgcgatcagcacggtgcgggtgctccccgggtgcagcgtgaatccgttcagcggcaggctgacctcgagcgccatgcccggctcgaattcgtcatgcagcacgcgcgagccgccacgcccgccttcctcgcgctggaccgcgatgcgcagcattccgccctcctcgcccaccacggaataggcgttgcggtggcgggcgccggcgcgcgaagtgaatgcgagttcgacgtgggctccgggctgccacggcggcagcggcgcgccgccttccggggccaggcgggattccctgaccactgggccgtggcggacgaatggcgtctatcagatacatcatgaagtcagccatgactcacgcctcttaccggcggattgaacnnnn

SEQ ID NO: 11953 - DNA, 1446 bp, Homo sapiens
ggtgggttagtcaggttatgtgtatgacattcttagaacagacctgtcataggtagcatcccatagggtctatctcggtatcatctataaacattacttataagtaaaacaatgcatgaaaagggctttgtaacctatactatgccacacaaataggtcaccacagagaaagacacttacttttaaaagttttttaatctaacagaggatatacaatttacaaacgggtaaaagacttacagatgtttctagaacatgtaaacgtgaatctgtgtaatgggaaaacactgaggggtaccccaggtgggggaatgaagacaagaagaaggcagatttcggcatggggtcctgggagagccaccgcctcccaggaatgacacacactgagcgggcttagaggagggaggactcagaataccaaagcagttggccaggcgcagtgactcacatctgtaatcccatcactttgggaggcagaggcaggcagatcacctgaggtcgggagttcgagaccagcctgaccaacatggagaaaccgcttttccactaaaaatacaaaattagccaggcatggtggtgcatgcctgtagtcccagctactcgggaggctgaggcaggagaatggcgtgaacccaggaggcggagcttgcagtgagctgagatcatgccactgcactccagcctgggcgacagagcgagactccatctcaaaaaaaaaaaccaaaaaaaacagtgcttgttgttcttttgttgttattgttaaaggatcattatctcattatcaacaacattggcaggtaattgagcaactgtttgtctccttgtcaatgtggagatagaaaattgcctacgaggttggacaaggtgctggagcagcgtcaaggaagagagatcgaccaagaagactgctttgcccttggacagctttgtttctgaagcactttctcatattctcccatttaatcatcccctccctgccaacttttccaacaggtgcatacttaggtagagctattctttttcagcctggggctaagatttggtcctgggcaggttatctttgtctctgcctggatagaggcaggggcagtagagttgtcatgcattccagactactagctatgcagaagcaggagcaaggtaagagcagatttgtatgaatgagggtgtcagggaatatcttagatgtccatttagttgttaaaaaagagaactgatgcctatatttcaaaacccaactttgatctggatgcagtggctcatgcctgtaatcccaaggtgatgggattacagatgtgagtcactgcgcctggccaactgctttggtttctgagtcctccctcctctaagcccgctcagtgtgtgtcattcctgggaggcggtggctctcccaggaccccatgccgaaatctgccttcttcttgtcttcattcccccacctggggt

SEQ ID NO: 11954 - DNA, 376 bp, Homo sapiens
  misc_feature 369, 370, 371, 372, 373, 374, 375, 376: n = A,T,C or G
acaaaactcaaacaaaagcatattctgtgaaaagcaagtgttctctaccccctgccttcccatttctctccctggaggcagccgatgatcctggtccttctgtgtcctgctaggaatgttctagcataaagcttttagatgctgtccgggacactaacgtcaggattctgcttgctgagaagggttaggagctggctgtcttgagacagaaacactgagtatgttttgagtttcatggagatgaaattgtccctgggaaattttttggctttctttgagagcccaccaatcagaataaaccctacacaggaacaaaagattgttgccgggtgctgtttggttgtgtcttctcattaagcctgttctgannnnnnnn

SEQ ID NO: 11955 - DNA, 684 bp, Homo sapiens
  misc_feature 684: n = A,T,C or G
actacaagatcaagatttttttcctaaagagccatttgtcttattttagcttcaagccaagccagggcatctgagaaataccaagcctccgttgtgatgtgtcgccatgaaaatgttggctgccctctggatgcaagtctgcttgtgctgtgctgtggctcaaagttaaatttagataaaaatcagttaggagctaagaatattcccagctttcctgacaggttgtatccgtcattatgggaggaaaaacaaggaactggctgcctggcgacagggagcgggccaggctgagtgtgaggtcaggcctcggctggaatctcacggacttgaaaggacagagacgtttcctgagatgtctgcggcagaatgtgggaggcttcagcctgaggaaagttcaagttggagagaaaggttgccagacctttgagtgacccacactgcttataacttctagaaggttcttttagggaaacctgcttagaatgaaaccctgaaacgtcctttgctgcctccttaacaacttgcattagagagtttcttcagccaaaaggtgaatgtctgttgagtggaaaggagaggacggagtcgatgttgtcccctgtgagatgtcatgtctcaggcagtatgctggacattcccgagacgccaactctgctcaggtgacttgtgtgccctgcccttgtn

SEQ ID NO: 11956 - DNA, 650 bp, Homo sapiens
  misc_feature 1, 2, 3, 4, 647, 648, 649, 650: n = A,T,C or G
nnnngaagtttctatgtctcagccagtacaggtgctgcatgtttctcctaggcaatggagctttgtagtacccctgttgtctgtgctatactgcagggggattggtcaacaggatgcattcctttctgtcacagttcattatactggtcagagttctgaggtcaccagctaacctgagcataatcagttccttggaagacattgggtggagtgacctcatagactcataggaaacctgaaaagaagccaggggagaaacaattgttttgaaggagtagggagatttcccaaagcccagctggaatgctgttgccaggaggaggaaccagttaaggggcagggaccagcctttttggaaatgctttgtagaatgccctagggaagaggaaatacataaaccaagggccaggatgcaaacatacttttgaatatgtctcagatctgagtccacctgaacgtctgcaggccaaaaagcatagcacatcattcataggaactccagaaatgttgcccgactgcctcccacaacttaccgtcagtgcgggcatggaaaccttcctgctttctgctctgtgtgggtgggtgaatgtgagtgaggagaaacactgtcatctgggagtgaagagccagctttgcagtcacttcannnn

SEQ ID NO: 11957 - DNA, 600 bp, Homo sapiens
acgcgggtccagaagtaatttattggcctgacaccaggctgtgtataaattcacaaacgtatataacctactcccagaggaccatgtgcatgtgggagggattggacagattgttctatatttcctgggtgacaggctgtggtgggaaagggctggggaccctgagtgtttggcttgtagcctacacctaacaccagcttttcttggtcagtgctggtgatgccaaggcaacgagcgagcttgtggttcagcgctttgcatgatgtggggctcccttaaagaaccaaagtgtggggagagtgccttcagggcagggctgctgggaagtggcagggcgaggaggcttccttctgtccccatgattccctcacatagggtagtgctaagcgaggtccagagaaggtaaatgggagaagtctcataaagagttgaacttgtaggaatcaggggtgcccgttcagcatggcaattgaatccttgatcctcagggagttagctagatccgactcacacctgctggaccgtgagagccaatgtccctcccacactcttagattcaaataatctctttaagcttatccttgcatttagaatgccagt

SEQ ID NO: 11958 - DNA, 539 bp, Homo sapiens
  misc_feature 538, 539: n = A,T,C or G
acaagatctgtcacttggtttcagatcatagctgtatgagtgaaccttcaacccattagtgacctgaagtagtctcatgagtcccagataaatgtgcacctacagtgctgcccctcagttaaacccactccagggccttgtttttccctgtctttacccagtccacatggaccttgcaccttggtttgagttaatctcactctcacagcctttatttctttcacattcaaccctcatttgaagtcacaaacaggagcttctaacctcccaaactgttttttttaatctccgcctgtgacctcaggagttgcagctctaggccttcttttcagactgttgcctctccttgcataatgctgacatcacgttgtagtagtggtaaacctgtgcctggattgcatttcaattgtgctagccctaatagactaggaatgccaatttcagagaggaggactagagcaagattgagaaagaaacagaaccgaacaggcactgtcctgagtcctgttgaaggtgaaaggagaaaattgtatacccnn

SEQ ID NO: 11959 - DNA, 201 bp, Homo sapiens
aggtacccgcccggcgcagccccgatgccttcctgtgaatgggacagattgccatatggatgaagacactgaacaagctgtaaaactcttggcgacatgtgcccggggggattgtcccatattaacaccacctgggctgtggcaattgtgctctgtctgtgcagtggcactgaggagcccaacaggatgttattttagagt

SEQ ID NO: 11960 - DNA, 354 bp, Homo sapiens
  misc_feature 1, 2: n = A,T,C or G
nnagcctgtggacctgagggtcaactaaacctcttatcctgataaattacccagtgttttccactggctatgacatacccaaatggaaatatcaagtaagcagttggatatacaggtcttgagttcatgagggaatgaaaccaaagctggaggtagtaaatctgggaaccaaccacagatagatgggatcaacaccaagctaatacatacaaggatctgctatttaaataccacttatgaaccatgctaattctatgatcttgagaaaataacgacctcactcctccatcttctcatctgaaaaatgggaatgaaagtaatgcttttttagggtggctgagaggattcccgcgt

SEQ ID NO: 11961 - DNA, 359 bp, Homo sapiens
acctcctttttaacctctagctgatcttggaatttcttttgtagtgtataattgggaaacaatagggatcaatgctctttcctgatctcaaagaagcccactctctagagagaaaagcaagacctataatattgaagatttgagaaaaagttaaattgtgataaaacatgctgatttctcacactgacttaggaaaagcacctaagcctcaaaaacgagaattgtcttaggagttaatgctgtggctattcttgtcctggcatttgggtgaatgcatgaattctttatttcagtttatagaataagataaactatcgagaacttcaggttgctgcataattttgacagccattccctgt

SEQ ID NO: 11962 - DNA, 430 bp, Homo sapiens
acgcgggtgtcttcttccttttttctttttcattcttcttacacttgaataaaatccaaaaattattcttggcccacagaccatatttgcccacccctgctttaaggtgattctttcatgtttgatacatccaaaaaatgagagctgatacctgattctcaaacaaattaatatttttgcctaaatgaatttcatggtttgccatggtggcccccatctgtaatcccagcactttgggaggccaagttgggggcaaatcccctgaggtcaggagttcgagaccagcctggactacatggtgaaaccccatctctactaaaagaacaaaaattagccaggtgtggtggcagatgcctgtaatcccagctacttgggaggcagaggcaggagaattgcttgaacccgggaggtggaagttgcagtgagctgt

SEQ ID NO: 11963 - DNA, 753 bp, Homo sapiens
  misc_feature 1, 2, 3, 4, 5, 6, 7, 8, 9, 10, 11, 753: n = A,T,C or G
nnnnnnnnnnncgaaagtcttctagaattaattaacgcgggaatgttctattaacacaagtagatatttcgttttaaacaaaactgattttttttcctacactaatttaatctccttgcctaatgttctttagtcctccaacaggtctgcctacttaaacaatttctagtcacaggatggggctgccacagttttatctccatctggcagaacataaccaacccgcttgagctctcagctcctgttttatagcaactaaagtttccttgttcacccgctcccccacgccacctccatgacgtgcatttctcgtaaaactacagatcagtaaacttcctcagggaacttgcagtaatgtttgacaaaaaaaaaaaaaccagaaaccaaaaacctagtacccctgtgatgtgtagcaaaattcatcagactagctgtctgttctggcactgattgccaggcaagcttccattgtgccttcatagctcatacacagtgcactttccctgtattaggcccttgtggggttctggatccatgggcaaaaacttgattaggggagggaaagaaagggaagcaccaatcccttttaagtcaaaaactgagaataatagattgctatttcttctatatgcaaaggatgaaaatatacctatgacccttttcactgtgaaatgcttaatgtttgttctagcaattcttactggaaatgactgccttacacagttgcaaatgtcttagaatagtatagtgcgn

SEQ ID NO: 11964 - DNA, 352 bp, Homo sapiens
  misc_feature 318, 351, 352: n = A,T,C or G
tctgagcttccctacctcttgatttgtttgcagtgctgctagtccaccctaatctctgcctgctcaaaacttctctcaatgcaattcagagagatagagtttagcactacagtgacttagatgtatgttgaatttgatctttaaataaatcatatgcatcttaagggcacagatgaatttgatgattcttttgtgacatcttgcagttgatccttaacaaataattattagtagataacaatcaacaaccaatccagtgtttattcttacctgccatgttaatctctccatttgaatctacttgaattattctctttntgtttcagtgttggagtgtaattgttccagcann

SEQ ID NO: 11965 - DNA, 201 bp, Homo sapiens
ttggccaaggagtcgcgtgtcagtctcaaggcgttatccgaacatacgctggtcgttaccgatcaggtccacagttggcagcatgtgttggacctgttcagcttttacgatcttgcacccgccgttgtgcaccgtgtgcgcacgttcgagttgcagcgtagcctcgtcgccaatgggtttggcgtggcgctgatttatacc

SEQ ID NO: 11966 - DNA, 521 bp, Homo sapiens
  misc_feature 521: n = A,T,C or G
acaaatgttttctggacaatctgtgctgtgattttggaaattgtgtgtgaaagaggagagtagctgggcgtggtggctcgcgcctgtaatcccagcactttgggaggccgaggagggtggatcatgaggtcagttcaaggccagcctggccaagatggtgaaaccctgtctctactaaaaataaaaaaaatagccaggcatggtggtgggtgcctgtaatcccagctactcgggaggctaaggcagagaattgcttgaacccgggaggcagaggttggagtgagttgagatcacgccactgcacttcagcctgggcaacagagtgagactctgtctcaaaaataaaaacaaacaaacaaaaaagaagagagtgaaagaatttgagtccttgcacagacaataactgttttttatgtttaaactttttagtttcttatgttaaactttttatgtttaaactttcaaaaggttgaataaatttcaccttatgcttgcattataatagcaaagttccttgatan

SEQ ID NO: 11967 - DNA, 476 bp, Homo sapiens
  misc_feature 1, 2, 476: n = A,T,C or G
nnacccacgcgtccggccatcacaacttcttctgatacagcacaattatgggacttggatacctttcagagaaaaagaaagctgaatattcgccagtctgtgggtatacagaaggttttctttctaccattaagtaataccatcctcagctgttttaaagataattccatttttgcctgggaatgtgacacacttttttgcaaatatcaattgccagctccacctgaaagctctagtatattatacaaagtgtttgctgtaaccagaggtggccgaatcctggctgctggaggcaagtcaaatcatcttcatttgtggtgcttggaagctaggcagctctttagaattatccagatgcccactaaagttcgagccattcgccatctggaatttcttcctgatagtatagatgctggttctaatcaggttcttggagactaagtcaagatggtattatgagatttatcaatatgcan

SEQ ID NO: 11968 - DNA, 339 bp, Homo sapiens
acaagctgttctcccgcagcagcctgtgagtctttctcttgaccgtcttgttcaggagctcttccgctctgagaaaaccagcaaggcctctccaagcgcaccgagcaggaggcatcccgtggttgcactggtcaggatcgcatcaaacagcaatattgataagccagctgtgattatcttctttaccttggcaccgagctgaagatctgttagaaaccctctccaaccaggactttcaggagaaacggtggccaccgcccagaataacaaggccccagcagcaaggtgtccttttcccagcaagtgaaacctgccccccgccaccacctgtccccgcgt

SEQ ID NO: 11969 - DNA, 396 bp, Homo sapiens
  misc_feature 396: n = A,T,C or G
acgcggggtgactgctaagactgccggggctgctgcctgctgcttctcgcgcctgtcctctccaagatgcagttttttgatgctgaggagctcctggtcgatgaagaggatgatgtttttggtgaaggtaaatgcatctttctggcaagaggctctccggtctgctttgctttgttttgacaccactggacacttttgcccagcttgggcaaggacttgagtattctgaaatgataaaaacaaagcatcctgagtgaggtagtggctgcaaatatcaacttatgcactgaaggaatacacaaggcaaggggtggaacaaggggttgagtcattcccgcaaatacattttttaaagtcatgactaaaataaaggtttagtttctgctggaaaatagn

SEQ ID NO: 11970 - DNA, 598 bp, Homo sapiens
  misc_feature 1, 2, 3: n = A,T,C or G
nnncccagccaggcctcacgttctcatatttaaatatcatttggaagctgatgaaactctggaagtgctcatctccctgttggttctaagatttagtcttcctggaacttttatttatgtagctaagtgttgaaattgagtctcaaagcagtattttattatatttcttgtggttggggggcccgggtctgtgggtcttgtggagctctccaaggttgctgaagcatctggttctgtgtgataagcagggtgaccatcttgagttgaaaacttcagccaagaatgtcagtggaaggccaggtcacttctcagaacacgtgaggctttgctgtgtctgtcccaagaaatccagacaagaggcacaaagccggaaggatgtgggcatgtccagatacgggtttccagggaagtggtgccaggatcacaacttagtgtctggatttccagagccccaggtgccaagctcaatagtttctatctgatcatggagtcatgggcatcttcaggtgcacggttcagctgaagactcctcagccccgcttgataacacacgtgtgctccgtgtctgcagaggcctctccttctgactgccccgcgt

SEQ ID NO: 11971 - DNA, 1599 bp, Homo sapiens
  misc_feature 1, 2, 3: n = A,T,C or G
nnnatgacacccgtctgtgtcactgctcttgacaatgacagaacctacaaaaggatccagggtcctcagcccccatctgcctcccagcctcacttcctgcacttccatgaaaataacctttgttccccctacaaggaacttcttgcagttatccaaatgttccctgtcctggtgcacactgaggcccctgcatggagccaatccttcacttaaatcactatgcccccatgccttcatctggagaactcacacttctgttcagaccctcagatgtgactgcttccgtgttactgctttctctgccatttcactgggcctggaaaataccttctgcaaactccagggagagttactcagctcccccttccctggtgctttgctgatgcctctgtcacagcactcagcacatgacactcggattactggctcacagtcccctgcttccaaaggctctgcctgcatgcctccaggggttatttccagagcacccagctcagtgcctgtccagtggtgaacgtccatacatgtgtgttgaatgaatgagtggacagatgtgtgcagggagaatgtgaattcactcccacaaagcttgtatgtgccaaaaaatattggttatttttcataattgagctaatcttgtttccctagccctatctcctacatggcaggagcatagagaaatttttatccagctgagtaaatgtagcccagtgctgtattttaaacagtcccttaaggtaaagtgatttgtctctcagattgcctctctcccagctcctctcttggacggagctggacacatggcggagagggactttgagatcccaggaagcagggaatgatgagggctggtcctaggagccacgcgagccctctggatgcttgctcatctctgctgcatggggctaggctgaactgctgtctgaactggtacctgctgaggtccatctggttagggcatccactgctggagtccatgcccttagggcatccactgctggagtccatgtcctctacttgcctccggccttgaaatctccacctctgctctctgacccttgagttctgttggcccactgactttagcacctctatacctcagctgaggacatggacacttccaggtccctcacactccgtggaggagctagaggagacagcagccctatgacaggctcattggcctatcggtgtcccatcacagcctctgtaacagccaggataagcttcaagccaagggctgaccttctcccagggtctgccgaggcactccaccagccccagtgttgctgggcttccccgtggccatctgggtgtttctaaagcaactccccaccaacctcttgggctgtggtgaccaagggctaaaaattaagtggggaccctggtatctgacttttgctccacttctgacaccttctttctctcccgtttcactaggactggaaaatacaggctttttttcccaatccttgtttctctcaaaccaagacctcatctacataaaacatctagggtcaggcccatccactctagctcttattacagagaaagagctccagaaataaaaaaaaaaaaaaaaaaaaaaaaaaagaaagt

SEQ ID NO: 11972 - DNA, 336 bp, Homo sapiens
  misc_feature 333, 334, 335, 336: n = A,T,C or G
acttatcaaaaatactttttacagtagctatttcaatagatgacaatccctctatacccttcagactattagatctcctaaggtgtctctaagcatgtaatcttcaggggaagtatttgctctgccatacgcatggggtgcaatcacaggctctatccagactgattctatctggtgaccaggcagtgagatatcacatcaaagttgactcaatctggcttattaatggggaaagcagaaatacagtgaaagctgtcagagactttgcatcttttggaaaaactatcttacagttaaacatctggagcgtctccaaaagtgaagaaggtctcnnnn

SEQ ID NO: 11973 - DNA, 998 bp, Homo sapiens
accctgcagaatctaccaaggcactctgtagcaaagcaggccttccacctgtctcggggaacccagctggccaccttgcactcagcctctgccagtcacctcagggctggcatttgggagtcctgactgcacgccaaaggttgttaagtggctttctctgaactcatttgaacagctgagtaaactgttcttgctttcacaaggaaaagaactcctgaagtcattagaactcaccaaaccagtttccttgtttttgaagaaagcaggtaatgtggctttgccagcaagaagcaggccttgggcgtccatctccttctcaggtgtgtttactcaggagaaggtgacatttggataggggcaggtgtgtttgctgaactgagcttcagtctaatcattccggaaaacttcctgagactttctctgccctgtaatttccccactgttgatggaagtatattgcagtctcatgcaggactgcgaagggaaggtcacactcactagatcacttatataccaaattctggggaacttttggtgcatattatactttagatctctttccattaatgataatcattgaaaatattaccatggaataaaatctggactttattaatgtaacataccaacgttgttttcttagttttgccgactctcctatggtgacataagatgttaacgggaagaggatgggtgcagaccatacagaaacactattgtcttggcaacttttctctggaattatttccaaataaaaagttaatttttaaaaaatgatcagcttccccgctttctctgcgcagcgcagtatactaagccccttccagacactgtgccatttgcgtaacaccctgcatgggagatgccatccacatttcacccaggaggaaatgcggttcaacgaggcccacacctacagctgaagacagccccatggcgggggtgtgacctcgaattcggatcttacccatccctatcgacaggagccaacctgcgct

SEQ ID NO: 11974 - DNA, 412 bp, Homo sapiens
  misc_feature 412: n = A,T,C or G
acattttttgatgaattagtgattttagtgcagaatgaaaccaacccaaaaaaccaaaaccagagtatgtagttgtattttcttggggttctcagatgagttgaaggtaagcaattgtttgtgaggaaaccaggcttagaaggcctggcctctgcttgtctttgcctggcactggcactgagaagaaaggcctagccttcccgagaagtccctgtgctccacctacggtgccccaaagaggctggggctagggtccatctcctgaggctgaccccattctaatccaactgccaggcccatggggctggcttaaatggtctgaaatgatcctaaattttcttcacttggattatttgcaagtcagtctctctctgtggaactaaacaataaatctgtgcctttctgaactgan

SEQ ID NO: 11975 - DNA, 703 bp, Homo sapiens
  misc_feature 699, 700, 701, 702, 703: n = A,T,C or G
acaaattatttccaggtgctgataattatcacttgtggtgtttgatattccggactttgcatctaaatttatacttgacaagttaaacttttcatcgtgtgcattttcccgtaatctctcaacagccaaagacaaggatagacggattagtgatgggtgaaaccaattcaacccaaaatggcaacacttaattacaagtcttgttgtttataattaactgtgtaaatcactaacttgaaagtttcttttcaaagtatttaaaaccaactcttttcccagggggatttaatactgtatattattgcatagttaagtattattttgtttgctctatgaacaagatgtgaaaatggcacattttaccgactatcttgctagcaaatttggaaaatgttcatgaattgcattactagcaccatttggtgcttctcagtatttttggacattttttgccttatatatgaaagccaacggaaagacaatccaactacccaaatgactatgagtaatttctgagagtggagagtgagggtcaaattctcaatttcagaaaataaaaaaaaaaaattgagcttccaaatgtttcttctgagatgcattcattttcctgtgaccaatttttagattaaaaaattactgagaacatgctctgtgctagataccatatgttttctaatatcctaatttagtatttcctannnnn

SEQ ID NO: 11976 - DNA, 534 bp, Homo sapiens
  misc_feature 530, 531, 532, 533, 534: n = A,T,C or G
acgcgggaagtctaaacctttttgacaatactcaccctaccctggccaaataccatcagaaaaaccccaccccaccccaccccaaagaagcaaataacagtgctctcactccccaacccagtggtgtgggctggggagatcagagacctaagcacccatttctttgcccagcaaaagcagacagcactttggttccccctgctgggtggttttggcagaccaggcaggaagcgttttccctcattccacttcaagctgaaggaagttatgctcttgccagggtggtgtctagcagcagtggggtctagtagcagattgagcctccaccccaacccagaagcaatgacacttaacaaggtgacgtgagccagggctaatccatactctaccctcaccttacatcaacgaggcagaacaagatggttggaggtaggattctcaacacatcttaactccactaatggcagtggggcccagtggagaactgagccttcacttccaactggcaagtgatgggtggcagggctagnnnnn

SEQ ID NO: 11977 - DNA, 1392 bp, Homo sapiens
  misc_feature 1392: n = A,T,C or G
acttttttttttttcttttttgtatttttagtagagacggggtttcaccatgttagccaggatggtctgtatctcctgacctcatgatccgtctgcctcggcctcccacagtgctgggattacaggcatgagccatcgcgcccggccctctggttttactgttattgggcctcagcttttgttctgatccagggcatggccagtcagaagaatggacattcatcctcctgtgtctctataggacagtgtctagtcttcagcaagagaggaagtgacgagggactcacagatgttatgcagtccactgtttccatatgatttctagtcatgtaactcctccctacagcccagggaacatgcaatgccttaattaaaatgtctgagttagcttaaatagtcttttttattatttgacagatatgctttggaacaacagacctggattcaaaaactacctttctatattgggattcttgtttcaggtctggtgaagttcaagggcatcttgaacgtggtgcacttggagacagtgagggaagcaggggtgaagtggctgctacctgagtcccttctggagctccattttgcttggtcttggagaaggcttatcagctgccctcccagctagtgtaagcactgcaattgtacctgttacctgagtcaacagatccagatgagaggtgtaggcaggagggtcatctctgtgcatttaggaaaagcagcactgatgctagtagagcatccagttccccaacatgatcacccctgaagccttaattcccaaatccttccaagccttatctgtaggggcttaatgaggacagagaggaagaaacagtcactctggcacaacaggacaatatattcagattaaatctgaaaatggtggaggcctgctgcccatgaattctgagcctctccaaccctggtcccataatgaaactagtagtagggtcttccaaatggcattagacaagggttccatctgtgtaaggaccactgggagttagactggacccaggatggtatgccatgtgcagccatgtcaacccccaatttgctcctctccttccttagctctttctcttcctccagtttccagtccagccctgttggctctcagaatgcatcatccttctccctgcagcgctctcactgaacatgctcaagcgcaaggaacttataatcttgtgttctctggattctggatttagtaatctgtattagtctgttctcacactgctaataaagaaatacctgaggttgcttccaagatagccaaataggagcagctctggtctgcagctcccagcaagatcgatgtagaagatgggtgatttctgcatttccaactgaggtaactggcttatctcactgggaccccgcgtacan

SEQ ID NO: 11978 - DNA, 1040 bp, Homo sapiens
  misc_feature 1012, 1013, 1014, 1015, 1016, 1017, 1018, 1019, 1020, 1021,1022, 1023, 1024, 1025, 1026, 1027, 1028, 1029, 1030, 1031,1032, 1033, 1034, 1035, 1036, 1037, 1038, 1039, 1040: n = A,T,C or G
acaattttccttgtagttcttttccttcagaggcgtccggggaaatggagatcagcacataccatttgtaattatacatgttataaaacattatttccaaagccatatgttacaataacttatgtcagatttcttacatttctattcacttttgatgagcccatctttatccaaatccttatattttctaaagagaataaataagtggttactgaaaattaatatcacaataagtctttaataacattttattaataagtgcttaattacatttcagagtattcttaggttattggcaagtatccctcttcttgcatatatgtcttcaaaataatttcaaaccattattcatatatatctgttttatgcttttgggggctttctccctaattttatctgtgcctatttattgaactacttattatacagattgagcatccctaattagaaaatccaaaatgctccaaaatcccaaactttctgaacactgacatgctcacatgaccattgcagcatttcagattttggattcttggattagggatgctcctgcattctacaaagattcaaaaatctgagaatatctgaaatctgaatgcttctggtcccaagctgtctaaataagggatactcaacctgtattgattcgtgtgggcactaagctacttatttttctcaattagttttcttcttcctataagatgaattgaggctgcgcgcggtgggtcacgcctgtaatcccatctttttgggaggccgaggcaggcggatcacctgaggtcagaagtttgagaccagcctggccaacatggtgatacttcatctctattgaaaatacaaaaattagctgggcatggtgtcacgcatctgtagtcccagctagccaggaggctgaggtgggagaatcacttgaacctgggaagtggaggttacagtgagctgagatcacaccactgcactccagcctcagtgacagagcaagactcctgtctcaaaaaaaaaaaaaaaaaannnnnnnnnnnnnnnnnnnnnnnnnnnnn

SEQ ID NO: 11979 - DNA, 570 bp, Homo sapiens
  misc_feature 569, 570: n = A,T,C or G
acttatactgaaattctagtctaagagatggattaaagaggacaatgtgtaagctgatacagtgtggaaagatgggatggaatggcccccagggtgtgctgatagagaagaaggaccaggctggggagattgagtggaggaatgagtgatcataaatgagcaaatactttgtccaaaaagcccctcagagaagtgcaagggacgtagttgggtgggtggttcagggagtagctcaagtaatgatttgaagctgaagtcagaaggaactagccacatttcttctagaaagaactataatggagagctcacgcttagcatagagagggggtagaagaggaagagtgtgaccagaggaggttcagtggctggggagagaaccacgggtccaaaatgttgtgatgcaggggactcagagggttacatcatgctttaatgattgctacattgcctgagtctgatacaacaatgaaggtcagttatacacttgaactgattgcttatctaggacagtgggtctcaactgggggtgattttacccccaaagatgacatttgacaatatctagagann

SEQ ID NO: 11980 - DNA, 834 bp, Homo sapiens
acagatatgaagtcaggaaatacatgaggcggtgggtttgaaagtcttttcttaatttgtagtcagagcttcataactgggtgaggcaagagaacatgtgatcaagagtcaatgtgatgacaaagagaaatagaaatcactattaaattacggtgttcgagaatggtgatgtgattccagtagagcttgagggggaagatgttactagagattgaaagacaaaggagaggtggggagttggggacaggttgaagagttagtctgtatgatgctgtggtttatgaatggagaaaaaattgtggcacactagagaatatcagcttacaggctttttttttattccaactcattaatatagtgtggagaaagatgagcaagaaataattgattgtttttgagtaagagctagttaaagaaatttggcttgtagagagtgagagaagactagatacagagagtggcacacgatattgcttagtattcaaattaagttttagtgacaaaagaaatggtgccgggttatagaattttaaatcttgttttattttgggtttcatcacctggttttcttaactaattttatgtcatatttattatttgcagctttgttgtggtttttcatttttaaataagcaatttcgaaacgatacagaataaaaagcacttcgttcagttcaggagaaattctgggctgggtgagactaaaggtggctaataatgagcaagtttttaaagcatttcctccttactacttggacagatgtcttaacgagagaggtatctagatgaatgtgaagctgatgagcggcacaacatttcaaatctttgatttgt

SEQ ID NO: 11981 - DNA, 340 bp, Homo sapiens
actgcaaaaggcagatgtgaggcaggggtggaaagcaggaacagggtttgaaagaagttcttagaccctcccggttccttgccctgagcccacgccgtcacagaaccacctcttctccatttctgcaggagatggtttaaattctctggagattaaatcagaaacattcaggagttggggaacctgggcagggcatgatgaaaacagagggatcaagtagaagtcctcaggctgacacccccagcttcgccccagtcatgcctccagggccttggcatctcatcttatcatccttgggtaggtgattaaggtctcattaaatcagggggatccccttata

SEQ ID NO: 11982 - DNA, 624 bp, Homo sapiens
acttcaaagcccacttctttcccttatgccgagcgactgatgcgcaaatgacaaactccctcattttctccgtatcattaatgtttatactcggcatttgtaatacaataaaacataaaatgtttatactcggcatttgtagtacaatttatattttaaagttttctgatatttgatgtatcagatgttggtgcttatcagataaggaaacaagggtccgaaaggtttcttaacttccaagagctgagcaggctgctaacctggtctgctcatctcctagtgggattttttttttttctcttacatggcatacttctctgccatcatttttaaaactctgagggggaaaaggaagctaaatgttaacatgctgtgaccagtaaaccaaagatgcagtgattgctagtaggctccatcgtcggccccttgcaggtggtggggacatattcaggggtggtggatatcagtgagcacagcccctgactggtggctgcccatgcagagtgtgggggtggggagtagatggggggcttttcctaatgcatctagcacccagtgctctctggcttcctagcttttcccatcccataccataaagagtagttatgtaagcatatttcctgt

SEQ ID NO: 11983 - DNA, 626 bp, Homo sapiens
  misc_feature 1, 2, 624, 625, 626: n = A,T,C or G
nngagaaattgataatggagaagtccaattctgcaacaagttttttgagaaggacactgcattgtggacatgagtaccttctctgcatgacttagaagaaagttaattttggtttttggacagtcctgttgacacttctgttttgtattaagtgatgaattccatgttaaaattatactggccagttgatagttaccaaggaaatgctaggctcctgattccagtcagtgggtttggatatcctaatctgtgctctcctctcttctagaatatgagtgttctgcctgtattgggagcacattgctcagtctttgagttatgctcagtttcttaatccagagaataaaatgtgtttgggtgctgagattttagagcttttctgtaaggtcaatacactgagagaaggcttaatatttcttatccattggtattttccagaaaactgtatttgcttttactttttttttttttttgagacggagtttcgcttttgttgcccaggctggagtgcaatggtgccatctcggctcaccgccacctttgcctcccaagttcaagcgattcttctgcctcagcctcccgagtagctgggattacaggcatgcgccaccacgcctggctaannn

SEQ ID NO: 11984 - DNA, 3239 bp, Homo sapiens
  misc_feature 1, 2, 3239: n = A,T,C or G
nnacgcgtcgcgtgtcggctgacgtcatcgccgtgcgctgccacgtctgctcagctccgcggtaatggaggctagggatgggtgctgaagtatcaggctctggctctagctttagctctggcactggaactgcgtcggagtctgggtctgagtctggcagcccgaagcctggacaccttttcttgattctctaggcgggggctgcctgcgtccaagcagctggtttgcagcgttccaacgctgggagggagttcccttacctggggtccagtctgtaaagttgtcgccgctttctagggaccccgccccaccggctgggactcttccatgcagttgaaactggttgacaaccattaacctgggttgcaactacaggtggcactggaagcagactggttcctggacatgcccggtggaaggaggggccctagtcggcaacagctaagccgttcagctttaccttctttgcagactttggttggtggaggctgtggcaatggaacaggcttgagaaacaggaatggtagtgctattggccttccagtcccacctatcacagccttaatcaccccaggtcctgttcgtcattgccaaattcctgacttgcctgtggatgggagcctactctttgaattcctttttttcatctacctgttggttgctcttttcattcagtacatcaacatttataaaacagtgtggtggtatccttacaatcatcctgcttcttgtacatcactgaattttcatctcattgattatcatctggcagcattcatcacagtgatgcttgcgaggaggcttgtatgggctctcatctcagaggctactaaggcaggtgcagcatcaatgattcactacatggttctgatatcagctcgcttggtactactcactttgtgtggatgggtactttgttggaccctcgtcaatctctttcgaagccattcagtcctcaatctccttttccttggctacccgtttggtgtttatgttcctctttgctgttttcatcaagatagtagagcacatcttcttctcacagactacaactatgtggttcagcacgaggcagtagaggaaagtgcctcgactgtgggaggcttggccaaatccaaagactttctctccttgttgctggagtcgctaaaagaacagtttaataatgccacacccatccccacccacagttgtcccctatctccagacctcattcgcaatgaagtagaatgtctgaaagcagatttcaaccacagaatcaaggaggttctcttcaactccctcttcagtgcctactatgttgcatttctccccctgtgttttgtgaagagtacccagtactatgacatgcgctggtcatgtgagcacctcattatggtgtggatcaatgcttttgtcatgctcaccacgcaactgttgccatccaaatactgtgatttgctacataaatcagctgctcacctgggcaagtggcagaagttggaacatgggtcctacagcaatgctccacagcacatttggtcagaaaatacaatatggcctcaaggggtgctggtgcggcacagcagatgtttatatagagccatggggccttacaacgtggcagtgccttcagatgtatctcatgcccgcttttatttcttatttcatcgaccattaaggctgttaaatctgctcatccttattgagggcagtgtcgtcttctatcagctctattccttgctgcggtcggagaagtggaaccacacactttccatggctctcatcctcttctgcaactactatgttttatttaaacttctccgggacagaatagtattaggcagggcatactcctacccactcaacagttatgaactcaaggcaaactaagctgcctctcaacaatgagggagaactcagataaaaatattttcatacgttctatttttttcttgtgatttttataaatatttaagatattttatattttgtatactattatgttttgaaagtcgggaagagtaagggatattaaatgtatccgtaaacaaggtgatgtgatctttcatgtgttagtatattcgaataatatacatatgagaggtatgcctgtccagtaaagagattgatttgtttgtatggctctggaataactcattcgtttatgaacacatctcatgtattacttgacacagtacctttggtatgtctgcttttctttcaatcctcattatctttagccctcagctggccagtacttattgctaaagaaagggagatcaatggagttgcctaccagcacccattctcttttagttcagctggctaatagtattggaatacattgggaaaagagtgggttaaagtcctaggtggggttctctttgttgcctaccaggagaaagcagtaggcttcctttctaagatacggactcagctggtctattttaccctgtgacatttaaatatacttttgaataagctactatcctgaggctgagggttttgctgccacttttcctgtgtttccacttctgcttccaaagattttcctcttagttgtttgaaataatactttgccagacaggaagtctttagactgcccacattcatgaagaagatgatgtgtggctggatcagtaggagaagctgagtgcaaatgccatgtgggctagagtatgggaaggttgaaaattccaagtaactgggagagtgggcaagtcctcagctgaacaatcttggatgtagtctagcagcaacccacctacaatggcgttatgtttggagttatgaggggaagtgaaagataagaattacctacagctttgtactcagataatttatatccaaaatttgtgttttaaatttcatactccagaactttcatgtttatgagtattagccttttaagttatgggaggtgatatacttagtccattgatgttgtcacttgtcatctaaacttatgagaccttgtcttagagaatctaaaatatattgtcatatgttttctgtgctgagtttggtttgttacactgtgaagcttttggtgaaacaaaataagacttatgaagtaaaaagaccaatcatgtcgttgacaagctggctctgaaaataattcttgcagaagagttcctgaaaggcttcaccaaggggaagtattgtgaggagtgtttgtaaaaccaaggtacccaatatcagttttatgtttaaatcaataattgtttctttaaaaaaaaaaaaaaagggcggccgcn

SEQ ID NO: 11985 - DNA, 572 bp, Homo sapiens
  misc_feature 567, 568, 569, 570, 571, 572: n = A,T,C or G
actcatgtctgtggagcagagatgctgactgggaatagagacgctgtcgctcgaccacgggcatggcctgcgagggccctgataaatggcatcggtagtttgatgtggaaacgtgtgctggatttatgctctgtattcatcccacttctcaggttcaactgctttcatcaattgccttcatttgaactacaccataagttacaaactcacgtcaatgtaaggtgttgtgatttgcaatctgagcaatgatgtttgactgtgccttgaacctcaggatgaaacaagacatcattgatgcaggcagtcaactttcactgtaattgaccagcatattatttaggctttgaattaatggtgtcattagaatttgatgactattttagaccacggatacgtgctacctatgagatatgtttgggcattcttctaaggcaagcagtggagatatttatggcacaatacagggacaacaaggatgtatcccccaatttttcctaattacactttaaatttttttatttcatgtgaaacgtttgggggaaaacatctgtattacatcaaagtagnnnnnn

SEQ ID NO: 11986 - DNA, 419 bp, Homo sapiens
  misc_feature 1, 2: n = A,T,C or G
nnatacgaaaaacctgtcatccaatatgggagctactagtcacatgcgctatataaatgcaaattgaagctgaatgaaattgaaaatctagtctctcaatcatattaatcatatttcacctattgtataatgcaaatgtggaacatttctatcatcccaagcattctacctaactttggacaatagtcaccccttctggggaagaaagtgagattatccttagggaggaaagaagggtattttagggcaaaataactttagaatttaccctctgtatgtcactatgttttttattcttttacgacaaaaatgttttcaagtgccatttgaaaaaactgaaaaaaaaaatcaaagcctacagttggcatttatcatggggatgaaaaggagggaatatgggcaaagaagtagatcaaacc

SEQ ID NO: 11987 - DNA, 426 bp, Homo sapiens
  misc_feature 1, 2, 3, 4, 421, 422, 423, 424, 425, 426: n = A,T,C or G
nnnngagccatcgtcccgctggtacctttttttttgttgttggtgaagtagaatgtgtgtatggggagggcaggtggataggatattttggaatttgaagagaatgggaatgtctggatagtgcatgtatagaatgggaagtaaacactggaggacctgggagtgtggtgcttattgatggatcgttgggtttatccaggattggggttttgccagatggctgtgatgaaaatcttaagagttaagggtataggcaagagtgtggctgaaatgatacacaatgaaatctaagctgggattacaggcgagagccactgtgcctggcgaagcactgtctgtttttaaggttgtaaggtatcttgggttataaataaaggcagagagccactccatacctatagtgctagctactggggaggcnnnnnn

SEQ ID NO: 11988 - DNA, 449 bp, Homo sapiens
  misc_feature 1, 2, 3, 4, 5, 6, 448, 449: n = A,T,C or G
nnnnnngaggcctcctctctgacttggagcaacattgtagaaccggcaggtacttggagggtttgctgagtgcacctttgtaggagggcctggagtgggacgagaggcagccagtgggcctggctccctccagatgtgttcaggcgcagcaaaaatcattaggcattgaaaatagggaagtaggccgagtacacgtgtggtaagctgtggttggcgcaggccagtctgttcgttaacagaaaccagtgccaattgacgttgatgtactaggcgtttgagagagaaatcactttgaggcaaagtcagtagctatagtgcatagggagtgagtatttaggtagaaaccagttgggctggggctggctggtgaagcccctctgaaggaggctgagtgccaagctgctggtccaaaatgtggggtgctttttgcctttggggtctcatagann

SEQ ID NO: 11989 - DNA, 801 bp, Homo sapiens
gcggcagtggggtgtgcaagctggcagcgttctgcacgggaggccccgtggaggggtcatactgctgctgactctgcctctgtccagcgagctgcgcggcctgcggcgtggggggcattcctcccgcaaaataagaaaagtgccaaaagcactgattcccaagtgtggcagcttctaccaatgagtcacaaggagacacgtctaacaccccagtgcttgtccaagacccaccacactcacacgagaagttggccacaaccgagcacacacaaaaggaaagagaggcgcttgacctttgcaagtcagcatcaagcaaaacaagcaccagatcaccacagggcacccctacaacagcagcaattaggaaaaacataggagtaaaaattgttgaaagacactatgacaatgcgacgtgtggctcccattagtgtggcaagaatatgtctccaggggctttgcatatgatatcgactgggactcagagaagtatctcaatttcaggcaccccactgcaaacacgctacctccactgcccaagtctgagtctggtgctggtttctggaaccgcagtgtgctgcctgctcatgagcggggagctggctctgctgctgggccttaccttgtgcggtcggcattagttgctggagaggaacgcctgcgtccgcccctgggtgctggaaaactaccccttggtgacccacttcaaggcgaggcctcttagactgctctagaataattttcaaaaaaggtgcagtttgatgtaaaaataaaaccagagaagtagtagaaaaaaaccggacg

SEQ ID NO: 11990 - DNA, 566 bp, Homo sapiens
  misc_feature 1, 2, 565, 566: n = A,T,C or G
nngtacctaggaacttaattgaagatgtaaaaaaattgtttcatactgtggtaagccattgaaaaattgtctatttaaaaatgcagtgcattttaaagagttactatttgaggatctaaaatatacagagaaggctgcatattttactttgatcttattaccatccaaaagaaagcttacatagaaatgatttgtcactttctgctttctgaagaagatatatgagtcttttagccaggtcctggctatttagtcagttgagaaatactttcattaaaaacctattggtagaaatttgccagtttattgggcacttgctcaagtagttgcttttctgagaggcagtggtgagaccaggatgttccagccccaaggagggccctgtagcccatctcagcctggccatgtcgtgctatgagaggttcctctatccattggtcaaggaagggatcaggccctgcagtcacactgcctttgcctcttgccgactttattcttgagcgagtcacttggcagagcctctggtttctcttagggttgctgtaagcatagagcacggggtccnn

SEQ ID NO: 11991 - DNA, 576 bp, Homo sapiens
  misc_feature 575, 576: n = A,T,C or G
accttgctccaccaatcccagctgtcacatcagccctatatgccagtctctgggattttgcttttgtgttttctgtgtaaaaacactgctttttgtttgggctctgctttcctgtgttactgtttagacagtgtccccagacagaaaaatggagaatggcaagattaccttatgtgtttccccttctttgaaggatcacagcctttttatgtcttctgtctaatgcatgaatagggttgcttcatgtagtttatccaatttacaattgtttatggcaaaagggtaactttgataccttttactctgtgatggctgtaactagaagtcctattaatgcctttttaaattaaaaatagcactgccaataaaaccttaatttccatacatcaaaagtcaaccaaaggaaactaataagtagtaaaataaaaatgtggggcatgggtgtgagcagactcgtgtaatttcccattattttaattttcttagaaataaaaaaaattccaagagcccgcgtactcctattcccagcagcacagtttcacagctctgtggctgacatgcaaaacatgcctgcnn

SEQ ID NO: 11992 - DNA, 561 bp, Homo sapiens
  misc_feature 561: n = A,T,C or G
acgcctggctgatttttgtgttttaagtagacacagggtttcaccatgttggccaggctagtctcaaactcctgacctcagatgatctacctacctccacctcccaaagtgctgggattacaggcatgagccaccactcccagcctatcctgtttcttataaagtttctatcttagaaaagtggcatagagtgaagacttgataactttgtatctagggaaaaaatgacatttccatgttgtccagtataaaacacatattattattgttatattctgatgggccaaaaagacatatatgtttaagttcagattcataggcacaaggtatttattatgtttcaaactcccaaaggatttcatgcaatttgagaaatactaccatgaataaaggacaagaggaattctggagaaagggtggtgcaaatgcatacccttatctccctccaatatgaattttgatctgtccaccagcacagctatcaatgctagcaggcaggtggggaatggcagatatgtgggaacaattggctttttggttttgataagggataggactagn

SEQ ID NO: 11993 - DNA, 832 bp, Homo sapiens
  misc_feature 830, 831, 832: n = A,T,C or G
acgcggggggctgaaaatcctctgggttggcaattgtaatcctgtggacattggtaatacccgaggatgcaaaatttccccaaaacaagcagaaaattttccatgaattgctgctataaagctgaattcctctccccaccccaacattttataaagagcaagtgacttttacagcctctgggtattgcccaatagcgatctggaaacaggctgctcttcgtttaaatgactgaacacacggttggggatctgttctgaaaggtggagggtgcccgcttgggaatagggacattataaatactggacaattgaagacaatatttctgaagtgtaaaatgtttgcattgttataaaataaacccaaacaggcccatggaagaaatctcttctcccaagtcctttactgaaaaaaatgatcccacagactgagaaagccactttgacttaggtcagcttggaaacccactaaattctccaggtctctaacaggagaaaaaaaactggttataattgttaccagaaaggaaaaatttttttctttaccagaaatgggcagtgtctgtcagagaaaccaactgattcctgatattatcacaaagccagatacttgaagagctctattaaaatatgactgaggccctttgatgaccaacccagcctgtggcagatacccgcactgaggaaacttgttactgggtgtgcaggtgcgattgcagtccgagctcccacacaggtgctggggctgtgctgccaccagcttggattttcattgtttgaaattgcactttaaatactttaaataaaatctccttggcattttcacttttgtnnn

SEQ ID NO: 11994 - DNA, 718 bp, Homo sapiens
  misc_feature 711, 712, 713, 714, 715, 716, 717, 718: n = A,T,C or G
aatagcttttgctcctctctagaaaatccaaggtatttgtggagggcatcggactggctctacaactcccaagggtgtctagcaaggtcacggcatgcattggacactccaaatatttcacagttgatcttttaccaacataaaccctgtgtcagccacatgtcttcacgtccacaggccttaattccttcctcctgaaattcccatcaaatggtacaagcagcagcacaggctggagtcacctaaaaagctaattaagtacaccgattttattgctagaatactcaagtcaggacctgaccacaggctgagcacagatgttagtggcaggaatggctatcttgttaacatagtaataacactgagaagaggaagaaaaaaccatgaggattttaaaacatcttttcatcttcctgcataaaaaattaaattaaaaagaagaacaatggaatttcaacgcctcactgagctctgatagagcgaatgaaacagtatcgtgaatggctggacagggaatacagtttcttgcattaaacaggatcgcctagttcagaggtcatccgcacccacattccagccccttcctggtatccctctggggaatcaagaccagggaaggccagaaaagaaagaagcatagctcctatgatcccctggaattcctccactgataaaggcaacttccaatgactcctcttccttcccacgcannnnnnnn

SEQ ID NO: 11995 - DNA, 573 bp, Homo sapiens
  misc_feature 1, 2, 3: n = A,T,C or G
nnncacgagggtttttagaggtgctatctccagttccttgcacccctgttaacaagcacctcagcgagagcagcagcagcgatagcagccgcagaagagccagcggggtcgcctagtgtcatgaccagggcgggagatcacaaccgccagagaggatgctgtggtgagtgtcgttgaccgaaagcatatggtggaaacccaggtggggctttggagacaagcaactctacacgagttctggaggaatgtggctctgctgtgaaccatagctttgtaaaaagatcctttgactcatatttggtggacgttaaggaagaaaggaaattcagggtgtgggaaaaggggtttgcacacaggctcggatggagtagattgggcagtttggattgccttgtgtaaaaaagaaacaaaacaaacaaaccaaccaacccaaaaaagaatgctgaaacaagagtttcttcactgtatgtgaaatgtgaagttgggcagttattgactaggtcaataactgaatttagtgaatggtattaagtgaacgaaatacatcggttcataggtaacttgataaaatgt

SEQ ID NO: 11996 - DNA, 1046 bp, Homo sapiens
  misc_feature 1044, 1045, 1046: n = A,T,C or G
acaattcatccagagacaaattcctcttcagctgtgagcctatgaaattatacagttatatgcttccaaaagacaatagtgggacaaacaggatagatattcccactccaaaatggggcaacaggaaagaacaaagggctaacaggttctaaccaaatccaaacacctcagataaacaacaaaaaactcagtagggcaaacattaaaccctgaagcttgggtgtagtcttttactcccatttctcattttctggacacactggggtggaagttggacccccaaggctccaggcaaccctacttcatcacattgctggctgcatttcttgtgtgttggagttgcatgcctttgggtctcccagcctggagttgcaccctggtggccctactggtctggggtcttgggatggccctgcctgggcaactccactaggaattgccctgatggtgactctctgcattggcctcactcccacggctgtggatattatttagataccttgctcattgttaaaaacaggaactaatatttccaatgagcatatcgcgagacaaatactttatatattctgtgtctttcaatccttcaggtaagtataattttcatttacagaggaagaaaccaaaagctcaaagaggcaagtaaattaatcaggaccgaaacacaggattgtaaaataaaaatagtttgtcatagtttaccatttggcatgctgagaaattggtggcagcactgtcacctaaaagtagataattagattggaaatctgatctgtcaaattgcagatcttctagataaatcttggtactggagggtgggaacgtacagggcttataacctagtaggcagaaaatggttgaagaaagacttgtgtaagccaggatctctgggttgctgatcctgtttgatctcgtactatttaaagaaaactcaaaattgaagttgattcttagcttaccaaaatttcaagatgtattttaattagattgtgtctaattagtttctatttaaagtgctatgtattaggataattaatatttaannn

SEQ ID NO: 11997 - DNA, 456 bp, Homo sapiens
  misc_feature 455, 456: n = A,T,C or G
actttttttttttttgtttttgtttttgttttgtcctttagtaaagttttacagtttttttcctgtaggtcttacacttttcttgttaggtgtattcctggattttttttgtttttgttgttgtgaattacatttttttcttccattttacattttattttctcatgggttattgctggtatgtaggaaggctattgatttttatgttgatcttaccatttacttagttttcagttgcttctcttgaagtttctagaaggatggctgtattttctgcaaatgatagcattttgtcatttccttttcctttttctgtatgtgtttacacccttacaggttttttttgtttttttttgttttgtttttttttggaggacatttgttttgtttttctgggcttactacattggttagggttccagaatagttcattactagttttgatttgggtatcnn

SEQ ID NO: 11998 - DNA, 2921 bp, Homo sapiens
ccaccgcggtggcggccgaggtacgcggggattgcccctgtaacctgtcaaagaagagctaagggagctttcggggttggcttcttggaggctgctttctcctttacttggaaggcttcgctagtgatggacccatacatgattcagatgagcagcaaaggcaacctcccctcaattctggacgtgcatgtcaacgttggtgggagaagctctgtgccgggaaaaatgaaaggcagaaaggccaggtggtctgtgaggccctcagacatggccaagaaaactttcaaccccatccgagccattgtggacaacatgaaggtgaaaccaaatccaaacaaaaccatgatttccctgtccattggggaccctactgtgtttggaaacctgcctacagaccctgaagttacccaggcaatgaaagatgccctggactcgggcaaatataatggctatgccccatccatcggcttcctatccagtcgggaggagattgcttcttattaccactgtcctgaggcacccctagaagctaaggacgtcattctgacaagtggctgcagccaagctattgacctttgtttagctgtgttggccaacccagggcaaaacatcctggttccaagacctggtttctctctctacaagactctggctgagtctatgggaattgaggtcaaactctacaatttgttgccagagaaatcttgggaaattgacctgaaacaactggaatatctaattgatgaaaagacagcttgtctcattgtcaataatccatcaaacccctgtgggtcagtgttcagcaaacgtcatcttcagaagattctggcagtggctgcacggcagtgtgtccccatcttagctgatgagatctatggagacatggtgttttcggattgcaaatatgaaccactggccaccctcagcaccgatgtccccatcctgtcctgtggagggctggccaagcgctggctggttcctggctggaggttgggctggatcctcattcatgaccgaagagacatttttggcaatgagatccgagatgggctggtgaagctgagtcagcgcattttgggaccctgtaccattgtccagggagctctgaaaagcatcctatgtcgcaccccgggagagttttaccacaacactctgagcttcctcaagtccaatgctgatctctgttatggggcgttggctgccatccctggactccggccagtccgcccttctggggctatgtacctcatggttggaattgagatggaacatttcccagaatttgagaacgatgtggagttcacggagcggttagttgctgagcagtctgtccactgcctcccagcaacgtgctttgagtacccgaatttcatccgagtggtcatcacagtccccgaggtgatgatgctggaggcgtgcagccggatccaggagttctgtgagcagcactaccattgtgctgaaggcaaccaggaggagtgtgataaataggcctgcatccattctcctgaggatgtgtcccatctagggaaggctggactaggccttgcggctcctcagggactcaggtggccctactgggagaggggcctcaaatgcaccatgtcaagggttcaagattgttcctgcttttccccaagtacaaccacacccacactcagatcctcctcattcacatcgcagattctcccttgctctgcgctgctagagtgactcactaattcattaatctgcctccctctcgtaagatttccttctttttttcttgaaagtaccaggtgaacaaagtttaccagaaagcagttgagacaagaaaataagagctcaggatgagggaaaagaaaaagattgagagaatttgtgcccccaaccatttcctcagactctaagaaagaacacgctctctccaggcaggtctgaagctcaactctcttattgcctcacttcaggtatacctcactttacacaatagaattataactggaaagaagttggggacacatgtatttgatgattacattttaaacacattaggaaaagttgctatttgaactttttattgatttttggggggagtaaagaattattttgtgatgcaaataaatatcctttaattgatcgacttgccaaatttagatttgtgtgcatcaggctttcttttttttctttttttagagaagttcaatataagcttttcttttctttgtttctttctttctttattttgagatggagtcttgctctgtcgcccatgctggagtgcagtggcgcgatctcggctcactgcaacctccacctcctgggttcaagcgattctcttgcctcaacctcccaagcagttgggactacaggcgtgagccaccatgcccggctaatttttgtatttttagtagagacagggtttcaccatgttagccaggctggtctcaaactcctgacctcaggcaatctgcccgcctgggtctcctaaagtactgggattacaggcgtgagccacctcgcccagcggcatcaggctttcttaaagtgagagcacgcctgtactagagcaagcaggaatcagagaccttccagaaatactactgtgtaagggccagaaatatcttcacttgtcattgttatataatcattattacttttgctgtaatgttaatattgatttattaatatatattatcttttcatacattttctaagaaacatttatattgataagatcttttattttgccaagggcataaattattgtttttctttttttttttttaataaatttcaccaagtatggctcttctgtgatgtgtttttttctccgtttgggaatttctaatcccaggcactcctcagtctcattgtttcattacctatgaggtttcatttacttctttgtaaatgtactgacttttggagttacttaagaa

SEQ ID NO: 11999 - DNA, 328 bp, Homo sapiens
acgcgggaaggagatctgcttggccactggtggctcggggtctggagttcctgtgtaaggattccaggaggatcccagggctccctcccaccctgttccagttgattgcagcaagggaaagaggacaccgcccgcatcagcccatccagcattcgttcaactaagcatagagtgccggggtcacaaggacaaatgagccccccacccctgctctcatggagttcccagtctatcagggaccagccattaagtagttcctgtggagtaagtcacttaacaggtgttctcggctcagggcccagccctcaaccccagcctaagcccaagt

SEQ ID NO: 12000 - DNA, 494 bp, Homo sapiens
  misc_feature 490, 491, 492, 493, 494: n = A,T,C or G
acacggagggtgccatcagaacaaagaggggagaggcctgccaaggaagtttccctggaaatactcttggactgagtgttaaaggatatgctattaatgctattattggttgttctggagagactaaactgaatttattatcctttgcctaaaatctacatctaatttcacttccacttccttatatgtcaaatcaattctctactttttttttttttttaatgaggcagggcctcgctctttcacccaggctggaatgcagtggcatgattatagctcactgtagcctcgaactcttagttgcaagcaatcctcctgcctcagcctcccaagtagctgggactacaggcatgcccccaccacacccggctaatttttgtatttttagtagagacggggtttcaccatgttggccaggatggtctcaatctcctgacctcgtaatccacccacgttgttctcccaaagtgctgggattacaaggtgtgannnnn

SEQ ID NO: 12001 - DNA, 333 bp, Homo sapiens
  misc_feature 1, 2, 326, 327, 328, 329, 330, 331, 332, 333: n = A,T,C or G
nnctgctgggtctgggtctccactgattattgccttgccgccccccctcggtggggaacacagagccctgcccagaggcttgaacctggcaccacaggggtctggaattacacagaagacgggtgacagccaaggtggatcatgaacggtgagaagtccagcaggtgacaaggggaagggtctaaagggtggggggcacagcgcaagcaaagtcttggcaacaaaagagctaatgcatcccagaaatggggcaggtggagtactggaagctacaccaagcttcagagtggtcctgtggcctcggtgtggtagctcaggcctataannnnnnnn

SEQ ID NO: 12002 - DNA, 617 bp, Homo sapiens
  misc_feature 1, 2, 3, 4, 5, 6, 603, 604, 605, 606, 607, 608, 609, 610,611, 612, 613, 614, 615, 616, 617: n = A,T,C or G
nnnnnnactgtatcctatagctttttctcttgggtttcctgtcttgttttagggagacttgacactggcatctttgtacaagaaggatttgtgaggaagggatgttggggaataaatgaatgcaggtgagattgcttaggtaattgtaggctttaatctgtatgtgaggtgataagggcttagatggtttttcctaaagaagaaattatgccaattacaagatacaggttaggaagaatggaccagaggaattaggcagtcagtgaagatgtggacttgattgtggatgtgattgaaaaaaaaaatggtgttgcttctgtagcacctgaagggcttagttgggaaatgttcatgtgggattatcagcatggttggctaaagctgcctactgaagtattaaacagaggaagaacaggaagcagatgaggggatgtcttgggttatattcagatagagaatggaaggaaaaagaggatgtaggttaagagagagggtgaaggaaaattagaagagtgcagtaatgggagcaagaaaaggatgagtgtttccaggagctataagtattagttgaaaccaaaaagttgggtggaacgagactaccannnnnnnnnnnnnnn

SEQ ID NO: 12003 - DNA, 545 bp, Homo sapiens
  misc_feature 523, 545: n = A,T,C or G
acaggttacttgtcaattgaatctgtggcttttcctctggtaaacagtagctttctcggcagctctgcttacttgacttctggttatatcccatgagccaggcacagatctggttttacgggacaatgccaaaacaaacattgtcagggttctgttagggtcacaagaagatttactctatttcttgttctgtctgcctgcttgaaacaatagcagccattaaaagttgttatgtggaagtcttgtattatatactagaaatgggccttgtaagaatgacttgtatcatattgtccacatcctcattgagaatattaagaagacaatgttgagaagactgacgcccagagaaatgtcatttgcccaaggcaaaatcaaatattttggtggcagagactgcttaggaaacaaccggtccttatctcaagtctaactcccttaacatttgggggcatttcataatttgatcttgaggtaatagatattagatgtattaacttttttttccagccttacataacanagtcttcagaaacagaaaccgn

SEQ ID NO: 12004 - DNA, 542 bp, Homo sapiens
  misc_feature 542: n = A,T,C or G
acttttttttttttttttttttttttgagatggagtctcactctgtcgcccaggctggagtgcaatggcgcaatcttggctcactgcaacctctacctcccagttcaagtgattctcccacctcagcctctcaagtagctgggattacaggtgcctaccaccatgcttggctaatttttgtatttttagtagagacggggtttctccatgttggtcaggctggtctcgaactcccgacctcaggtcatccgcctgcctcggcctcccaaagtgctgggattacaggtgcgagccacctttcccagccctctccctggcatcttaatgcgcataatagtgaacacttgcaaaggggctttactgttatcgtgctactatcttggaaaggaagtggaaaaagatgctgcctagttccacgattggtgtgtggatcctcctagaagtcactgcagacctgttaagtgtaaagagatgcactaaaattgaaaaaaaaaaaagttgggggaagggggctggaatatgggatgagtcctcattcccan

SEQ ID NO: 12005 - DNA, 463 bp, Homo sapiens
  misc_feature 1, 2, 3, 4, 462, 463: n = A,T,C or G
nnnnggctttttttttttttttttttttggtctgccagggaccatcaggcatggactctgatggaagcctggtggtgataaggtcatccacagatctcattatgctgtgagctacagccgacgtgattataaaattctgaggtggaatcctgagagacaggagggctgagccaaaacccttcatggggttgtgctgcaaggagtgcctgccgtccagcagggccttggcgagcataagcaggacacctgagctgtgataaatgtcctggagatgaccagaatctgcctgtgcttgggtaagggagaggctaccccgaggagctggaaacaaagacatggaagctaggtaacctgacgctaggcactctcacatcctggaatgagggagtcttcactgagcctatttctttaagggaaaagttttcattctgctttgcttaaaacatactcccagctgaagann

SEQ ID NO: 12006 - DNA, 176 bp, Homo sapiens
ttggagctccccgcggtggcggccgcccgggcaggtactgtgctaaccaggcaaccattggttagggagcttccaaaactccgtgtccactccaggccccgctccagccatctggccaagcacactcagcttcaggacacaatgagcatagccagtccctctttgatgtccttggt

SEQ ID NO: 12007 - DNA, 730 bp, Homo sapiens
gagatggaatcttgctctgtcacccaggctggagcatagtggcatgatctcagctcactgcaacctccaccttccgggttcaagcgactcttgcgcctcagccacccaagtaactgggactacaggcatgcacctccacgccctgctaatttttatatttttagtagggatggctttcaccatgctggctttaagtgatccgtccgccttggcctccaaagtgctgggatttcaggcaagcgttaccacacccgacccctcactagtatttcagcattaatgttccctctttaaccagtgcttattatgagtatacacaaacaacattgcctgacataagaacaagttgaacccacagtggaatccctacagtggcagacagtggcagctgagagtgacagaccaacggagggaaaagccacaagccatctcctgtaagctccactgccatcacctgagctcatggcacacacctgctctacctctaagcgaggtgctgctcttcacatcaccactctggagacaccagccccaccaaccccaccagcacgctgagctctccgggaccccaagacacatgtgtataaaatgcagttgcatgtgtgtgtgtgtatgaatatatgcaaatattacatgaggatagtgagggaaaatcaggatataagaaagctttggaggaaaagaaaattttaaaaatgctgctcagctgggtgtggtgatgtgcacttgt

SEQ ID NO: 12008 - DNA, 540 bp, Homo sapiens
  misc_feature 540: n = A,T,C or G
actcatcattaagaaattaaagataatccgtaaataaaacaatgacaatataatagtttagagagttaagatttaggaagtagtagataaaataattatctgtgttatgcaaatataatccttagaatgcaatatttgattaataggagttgtcctatatgtcattcataaacttgtagcagagagaaacctctgcataagctcaggtgttcaagtatgcaagaaacacagttttctgtattttgctcttgctaaacttaatttgtattctgggccctggtttcatcaagtggcagaaactcaatctcagtcagccctaactgactatcctccaggactctgtctacaaaatgccaggtggggggccatctggccctcagtgccatcagccacccctgctggcacccactgagacttcctgctctgtggtcactggtccttgtaggttgccactgcagcctccttgtcctcattccaaggacacattaggccttctggctctatgagtatttttcactggagaaattttgcttctgctgn

SEQ ID NO: 12009 - DNA, 472 bp, Homo sapiens
  misc_feature 467, 468, 469, 470, 471, 472: n = A,T,C or G
acgcgggcagttcgcagagacctgctaattcataacttacagtctcttgccactaatgtcactgccagcaaagtcacagtcccctcagcatcctccatcttgaaagggtgacgtgccgccctgccagcggaaagcttacctggcactgttggtttgtgtatcatccacattctccccagtttttctaaattaacaataggaagcatagctggtttaggaattcttttagttagattaggtaattcacaaaactggtaggaaatcgttcaacctaagttaaaaccaaaacagccatatcttcaggagacattttctataaaattttatcacttttatttattttatttttcctggcaataatgaaaggaaatgtcagaaatggaaagtttgtccctttgtaactggcgagaaactgggtttgtgtttgcctaacttttctcctggaagatttaatcagtatttgctgnnnnnn

SEQ ID NO: 12010 - DNA, 424 bp, Homo sapiens
acttttttttttttttttttttttttttttttggtagagacaggggtctcactatgttgcgcaggctgacctcaagctcctagcctcaagcaatccgatcccccaacctcagcctcccaacatgctgggattcctggcgtgagacaccatgccgaggctcaatgtctcctctgaaaggaaagaagtggacaaagccattctgcagattcccaacactgtcaccgaggctgcccgcacagctctattatctgtcctgaagcattgttaagagactgcgctatcgttccattgacagtttgaagttcagtgacagaattatctggagagggcaaaccctgtgggatgaaggccacacagcttcagtcacaaaagaagggctatgtgcacccatcaccaagacacccagtgtctgtgagtctttggt

SEQ ID NO: 12011 - DNA, 473 bp, Homo sapiens
  misc_feature 468, 469, 470, 471, 472, 473: n = A,T,C or G
actaattttgctattagtttatatcattatttgggaatatgactttttttaaattgcaacaacaaacaatgaaaattataactaagagtcacattcagtagtatcttctctttacaaaatctgaatatagacaatcttcaagggcttcggaaatacaaagaaagatttcattgcaatggattttctcaacccatttgaagttcctccttgtctcttctgtcattatttgtctggtctatccttaagatcactgaataaacaaacctatccaccgatcttggcactttttttttttttgagatggagtctccctcagttgcccaggctggagtgcagtgacccaatctccgctcactgctagctctgcctcccaggttcacaccattctcctgcctcagcctcccgagtagctgggactacaggcgcacgccgccacaaccggctaatttttttttttttttttggtannnnnn

SEQ ID NO: 12012 - DNA, 414 bp, Homo sapiens
actttgggaacagggtctgccttaccatagaagtgtaaggactgtgatgaaagtgagacttctctcctccccatctttttttaaccctttctccccctccccaaaaaactgctgtgaaaaggactcaaagaaagggcatagcttgagttgaccatttattcttgttttgttttttccttcccatgatctaaattaaggggggggaaaaagcataggtttaatggccaataccataagcatggacacgaacatacacacatccccccatacacacaccacacaccccactactcacccagcaattcaaattgaggtgccaaccgcccaactgctggaacagagagaccccggaggccactgcgcctcccttaccactcaaatcttccattcccactaaaattgtgtccctagggt

SEQ ID NO: 12013 - DNA, 391 bp, Homo sapiens
  misc_feature 391: n = A,T,C or G
acccagctgagactggctaagtctaattcctcccccacactaacctgcctctgccaggccagctgtgctcactggacagaaaccaccccatgctttccaccctcctgcatgatggggacatggattccagggcccagctgtcctgggacatcaccacctctgactgactttccctcatcagcagagaggcctgcccaagaggagtctctccagtcagtgatcaaacgtgcctagggtaggagcgagtgccgctgcctcattcatcactgctgccagggcccggtgctcctagggtcaaatttcattttctcagcatccttgtttcttcttggtgctgaggggtttggcctttgtcagtgtccagtgtttgtggagtggaaagaaacagacn

SEQ ID NO: 12014 - DNA, 444 bp, Homo sapiens
  misc_feature 443, 444: n = A,T,C or G
accagacacaggcatatacttgtttcctactgaaacagaaactatattattacaactcttgcagagtctacagaggaaattcagaagttcctgaatcaggggactgactaccaaattttcaactcacaaatagaatcccccacgaactgccctacctggagttatccattaacaattaaagaactgaagaaaagctttatggcctggaatctcaaggctgctgtccatgagtctaatccagccagaacatatgctttgtgtgtccagcatgataatttttgttaagaacattggttgtgaatgcctttaaatgaggcatgctctgcctagttttacggcagtcttcactgaaacagattatcttaagtttgtgaatttgagattgcaaactcctgatataaaataacttttctttaattgaggaagaaaaactagaagtagann

SEQ ID NO: 12015 - DNA, 415 bp, Homo sapiens
  misc_feature 1, 2, 3, 4, 5, 6, 7, 8, 9, 10, 11, 414, 415: n = A,T,C or G
nnnnnnnnnnnggggtgggggggggttttggcatgaatttctttttttattacccggatgctgttatggagatttcaccacaggcccagccaggcctcacgttctcatatttaaatatcatttggaagctgatgaaactctggaagtgctcatctccctgttggttctaagatttagtcttcctggaacttttatttatgtagctaagtgctgaaattgagtctcaaagcagtattttattatatttcttggggttggggggcccgggtctgggggtcttgtggagctctccaaggtgttgaagcatctggttagaatgtcagtggaaggccaggtcacttctcaaaacacgtgaggctttgctgggtctggcccaagaaatccagacaagaggcccaaagccggaagggatgnn

SEQ ID NO: 12016 - DNA, 516 bp, Homo sapiens
  misc_feature 516: n = A,T,C or G
acgcgggggtggaggaggggtggctttggtcgctggacacacatctctgccacggtgactgacggaggctgtgaaaggacaatctgagtgaagaagtgaatgaggtgctgattccacagggacttcctgagatgggcggagtggctcccagcggacgggaattagagaccgcctgagaacaggaaacctacctcctctatttctgggttcccagtgtcctgcccagagcccatcatgtggcagaagctcaggacgcaaatgtcaggggcagaagactaagtccttgctctgggcaggggtcaggacgtgtgcagctccttggccccagaattgtttccctcctgcctcactccctggtgtagaatttggcccagacgctccctgccatgtgacttggcaggagctccctctagaggaggggtagtgatatagctgtaaatctcacgttgaggctgggcgcgttggctcaagcctggtatcccagcactttgggaggctgaggcaggcggatcaccn

SEQ ID NO: 12017 - DNA, 318 bp, Homo sapiens
aggtaccaacaactactggtttgatgcaaccatttcccttttacgcaaaaaggtgcactaaaagtagaccacgcattgttgtgtatcattaggcaagcaatttctcttctctaggcctcacttttcccatctggaaagtaaaagggtccagtcacatgatttctgaagttccttacagggtcagcgtcctggtgagaaaactatactgcagtgccaagaggaattgatgtaggatttttcttcttggtcctcgggccagcaatgccccacctgtgcccgctcggccatgcaggtgtgtcccagctcactgtcccgcgt

SEQ ID NO: 12018 - DNA, 1899 bp, Homo sapiens
  misc_feature 1, 2, 1873, 1874, 1875, 1876, 1877, 1878, 1879, 1880, 1881,1882, 1883, 1884, 1885, 1886, 1887, 1888, 1889, 1890, 1891,1892, 1893, 1894, 1895, 1896, 1897, 1898, 1899: n = A,T,C or G
nnagtcgacccacgcgtccgaggacttcaagtgaaaggcggtgggagaaattgttctgaaagcatgaagcccagctgaggccaaaatcaaagtgaatttgacagccttgggccagcaaaactctgtacccagcagaaaacaatagatgtgtggctgtgtcaggggcatcctcactgggacatagcttggggagctgaaggtaccttggaagggccagatgaggaagctagccaaggccacaggccttcctttgactgccatattgccagctcttcatagtattgactcttcagtcttagccaacacacacttgttgattccttccggaatgtcagactctgctagcaacacaaggtccctgtcctcaaaatcctattcttaatcagcatgttctaatttctgccctttgctcattttaatacagagcctgaggataggagagcagcgtggtgaaagaagcaatagttaccacatttgcaaaggcacataccccaaagagaagtttttaatatgtcacacccatattttatagatggggcaatggaagtccagatgggagaagttatttcaggtgaattatagaaactggatttcaagtttctgataagtattgaatttgggaaggctgtgaacattcttgagcccccctcccaagttcaccttcaacatcctaaagcaggttgaagaggaagatggttccaggtcacttacaagaacaggaacagcccctccctccaaatttgagcccagaaaggagaacctttgttactctagaaaacagtgtgtgtgctattgttttctccataggtcacaaacatccacaagatattggtgattttacatattattagagccactgaaatttatgatgcaggatattaacgtcaaagaggccaagatgcatcattcagaacactggcaggtcaagcagaaaccaccgtagtaaaattgaaagctggagtcagcaaagtatagcccacagccaaatctggcccatcccctgttcttataaagttttattggaacgcagccatgctcatcggtttatgtattatctatggctgtttccaactacagtggcagagctgagtagttgcaaaggaccatagggctatcaaagccccaaatagtcattgtctgacccttcatagaaaaattttgctgaactgtagtctagctccaaggattgttgtatcacctgtgatcgtgcctattaagcaattaacgtcatgtctagtacttagtaatgactcagcatgtatcaattacgatgataaatattatcatggcatccaaaccaaaacactcatgccaacatctctctgtacagaaacatggaaaaagagcgatgctattaaggaggaaaatggagccaggagcaaaacctaaggctatttctgaactaaagaggcctgaataaggtagtgaaaggaccagggaaagccttcccacggggatggagagccacctcctccccggctttctggttcagatgtcttgtctcaacagacggcagattcgcagggaagcaggccgagcctgatcttttctccgctagaactgctcaacaggtgaagaatctttttccagcactcctgagcccttcgggtcgcggaacagtgcgaagattattccaatgcctcattcggagaggtgataatctggtctgtggtttctttttcggtggggcatggggtgggggtgagtgtcatgctttctaaggcacagagctgactaaagggtgtcctatttataagtcagtaaaacacagcggcttcatactccgtgcttattacccagaagccccggctcttagagtttctattaagatgtacctcataaatatatacgcctcctatgtacccacaaaaannnnnnnnnnnnnnnnnnnnnnnnnnn

SEQ ID NO: 12019 - DNA, 411 bp, Homo sapiens
  misc_feature 411: n = A,T,C or G
acgcgggctgctcttgtggcacagaagaggtgcctgcacccctccctagagtgttgttccagctgcctgagaactgcccctacagccctaccaaggtcacgtctgcctcagagagcctgatcacgggctcaccagacccagtcccacccagctttgccccctctagccagccttgggagcagagcatgggatgggaccactgagagctccacaccccccacccatcaccaagaacactcttgtattccttatcaacaaaggccaagtaaaaatcccactgtcatcactgcagctgcctctcacctgccagcatcacctactggccaggaggtcaaaactgcatgtcctgtcgcagcaactgttgatatcattgcacagcactcagacagctcttacctgcaggcatcaccn

SEQ ID NO: 12020 - DNA, 673 bp, Homo sapiens
  misc_feature 671, 672, 673: n = A,T,C or G
acttttttttttttcttttttttttaagagatggagtcttgctctatcacccaggctagagtgcagtggtgcaatctcggctcactgcagtctccatctcctgggttcaagggattcttctacctcagcctcctgagtagctaggattacaggcacatgccaccgtgcctggctaactttttgtatttttagtagagacggggttccaccatgctagccaggctggtcttgaactcctgacctcaggtgatccgcctgccttggcctccaaaaatgctggaattacaggcatgtaattccaaccttagacactcagtttaaaccctcttatcctatcttcactggaagagcaaagcaatctcctaccttgttttgtcaataagaagggaatattattaagccccagtaatcctgttgattaccatagtgggcatgtttctctagaagtaagtagaatctttggggttccgatggcaagaatacagaatcatcaagctttagatgaaatctgtttggggagggtaagcccagtaagttctttggctgcagttcttaattgtgagactcagtcttgtgatttggaaaagggctcgagtatcctgactctctaagctgagccaagatggggcagcctgagccagactgttctttgttctctgggctcctgcagnnn

SEQ ID NO: 12021 - DNA, 843 bp, Homo sapiens
acgctgtatggtgtgtaaatgatatctcaatagagttgttatttttttaaggattccatgggtatttctgctgattcagaaccactgccccacactacctaaactgtggaacagaaactcctgaagagtggcagagagtcacactcctctttgaaccgtgagagacacaaataccattgggaataaagagtgggtagattacaagacaactctcaaatctaaactgaagtcaacagatggggtttgatgagaatgattcaaaaaccagggaactatttgcagtaaagtgaatcaatacttaacagttccttgcagtccacaaattaaattgtcaagcatggagaaaagacacgagggttaaagagccccagcctcatgcagggagtggccgaccgaagctcagaggccaaaagatagcaccagccctccatggtggatcagccacgcagaggtgggcacacatgctctgtcatccaggaccactctgcatgacaaccatgcgaaggaaaatccttcctcccgtcccgcagttaatgaaagaacccacagtaaagatcatcatggatgaacagacagagctcatcatggatgaggccccaaggaactgagaaaaaccctccaaggctccaatttttaaagaaatcaccttcaccatcagcactgtgataaatggcaacctggacccactgtgggcaaagctctaaggaagtgatgttacaccactcaccctctgtgccttcacacctagaaggttccttccacctagaatgccctgaccttctccattcctcccaaaaactactgcccatttgctctagactgagtgtttttgtcctccaaaat

SEQ ID NO: 12022 - DNA, 588 bp, Homo sapiens
  misc_feature 584, 585, 586, 587, 588: n = A,T,C or G
acccattttcagagtcttacttttcctaggggcagctcgaacctttcactggacccccgcttcccaagagagcattcatgtggcccttgtgttcctgaactctgtcaaagatgaccactccctgaggttgcacacgaaggccagaaaggctactgacctcaagctctgctgtgtcatgtttctgtcacacacagctattccttatcaccccacggtcacatccgcaaaaggacgccccagtccctcctcacctcaagcatcatccagcgaggctgtgtatggtgcttctgatggaagctgagcctgagtccctgatccctcacttccttggcatgagactgaagcctgagatacctttactttctctgtgccaggcctgtgctaggcatggaggatatggaggagaacattagatgtgagaaagtttttaaaaataaagtccttctgctttgggtataaatctcaggagtaagctagttttgcaaggcctcccccttaccttagcatgtatattaacatattcatgatataaaacattaagagcccacgttctggataggtcaagcaacagctgtacctgcccnnnnn

SEQ ID NO: 12023 - DNA, 314 bp, Homo sapiens
  misc_feature 282, 283, 284, 285, 286, 287, 288, 289, 290, 291, 292, 293,294, 295, 296, 297, 298, 299, 300, 301, 302, 303, 304, 305,306, 307, 308, 309, 310, 311, 312, 313, 314: n = A,T,C or G
acgcgggcatctgatcgagctgctgccctgctccctaccccctcccacagcctggtttaagggtttcaggccaaggcggagcaagaggcatttgccagcagctgttgaatgtcaagaggcctcgccgctctgaggttcttgtcacctaagagagaggtgtctgcctgagcagctcacaacaggcaggggtgaggagaggggaggaaagaaggcaggagagagtcagggcctccattaggaaaactggctgtttgctgaagtgacagaccagaggcagcaagnnnnnnnnnnnnnnnnnnnnnnnnnnnnnnnnn

SEQ ID NO: 12024 - DNA, 710 bp, Homo sapiens
  misc_feature 1, 2, 3, 710: n = A,T,C or G
nnnatcagaggagggtatgggtatatcataaaagaatggtatcacaagcattaagacaagtgcgcagaaaacttgccaatagctgatagagcagaagggatgtataattagagtaagaactaacacctatttgtaactggaaatggcatggtcagagtccctttccttttatcactagatgctaagaatctagccatgtaaaaactcccaaaacatccaaattcaaaaaaactggaatctaacgtggtaatgcagttgtcaagaacacgcaatagtctttgggcttttacaaagcactgaaaactaaatgttgcatttgtgcccttatcttccacaacttctttcttggcagcttttcttggctcacttcagacacacagagtttcaagtaatcagggaaagttgggacagaaacttcctctgtctttccatggccttttctttttcctttacggatctgtgatcctatgctttctctcacgttcacattatatgtgtcagttggagaaatcttgatgcccagtttcatttgtttcttctgtcccacctgtaactaatttaggttgagttctccggctcatgtatcagagtgtgtatgacaaattatcttaaagcccagagggcctcggtggtccaagtcccagcaacaagggacacctgctgtcatgacatgggcttgacctgggttctgtggacattaaggaaccacn

SEQ ID NO: 12025 - DNA, 525 bp, Homo sapiens
  misc_feature 524, 525: n = A,T,C or G
accaataagatagttgtttaagactatagctctctaaagagtagtcttttaaatttagagaatttctttatctcataagtgactcaagccaaaaaggctttttttcatggaaagtccctgaggtaactttccgggtttagaatacgacaggcaaaattggcatcttttttttaaatgggtgcgaaagatgcagccttcatgatcctccccaaaatttactcccagaaataagctaagatagcagatctctgttgccacaggcggttaaggatggtgcagctggtctccctatgagcacatggacacgtggccacatgggggtgcctctagtcacagacctgccaacctgtgacgcctgtgacacagggcaggcacttcagggattagactttcccagcactaaccaggcaacaaagatggaagcaacagaagcccttcatggatagaactccttttagggacagactccactgacagcttggcacaatttggggagaaaaagaaagtgctgcttaaaatttgann

SEQ ID NO: 12026 - DNA, 511 bp, Homo sapiens
  misc_feature 504, 505, 506, 507, 508, 509, 510, 511: n = A,T,C or G
acgatggcttgacgcctgctccacctgaggtggctccatcttgcgcctaaccaagaggtgggggataagaccagcgagggtctctagtttgctaatatagactgtagaggaagaagggagaagaaggtgactgagctgagaaaggcttgggcagagggtgcatggagacagctgagcggacctcagtggtgggtctcatgactgggatgcaatgagactgattttcctccttctctaagggagacttgacttgtttctaaggggaaacagaaattccagaatttgagctgaagtagcaaattctgatggccgcaatgtcaaaatttcccccaaagaagcctgcttgtattctatgactccttcgaaggtgtccaagtcccttctagaaattgtgaaataggtttggcgtggtggtgtgagccacttgtccagccaggatcttcctttctaatctctcagggcaccttttgtgaagctgctctcagtgtggggtgagggaatgannnnnnnn

SEQ ID NO: 12027 - DNA, 490 bp, Homo sapiens
  misc_feature 490: n = A,T,C or G
accgtcaccagggagtccggcgcattcataaccagcaatgtttgtaagcatctagattactggggagagaaatattatcccagatggtgaatggaattaatggccacccccaagtgtgtctccccgtccaagcaggtattgccacctgtaggattcgcatacctagagggccccccagggaacaggaagagttctcctataattgtatcgctgtaatgtgtaattgaagtaacaaaggtgctgtgttttgtttgggcaagggcaaaaatagactgtttggttaaaagaagtccaggttggatttcaagtgttatcccgggccaggcgcggtggctcacacccgcaatcccagcactttgggaggccgaggagggcaaaacacctgaactcaggagtttgacatcagcctgggcaatacggtgaaaccccgtctctactaaaaatacaaaaaattagccaggcgtggcgacatgcacctataatcccagcn

SEQ ID NO: 12028 - DNA, 610 bp, Homo sapiens
  misc_feature 1, 2, 3, 4, 5, 6, 7, 583, 599, 600, 601, 602, 603, 604, 605,606, 607, 608, 609, 610: n = A,T,C or G
nnnnnnnataaggtggtaagggaccgttatattccttcacgcatagtttaaaagtggttggtctgtgtcctttccagagggtaaaaggtgagacaaactttttttttggtgttgttttcctccctcctttctccgttttttttttttttttttttaaactccctttccttgttatctgaacttccaaacatcagctttgatgtctattgttgggacttcaagaggactcttagcacatcggcaggtgttggttttagtgagcaggcgagagtcccacattcttccaaggagagagatgggtcccaccacattcctacccctagagcagaagttcccgcgctgtgcctcttctctggctgcttgctgaggacgtctcccagtggggtactgggtgtacaccagctttccttcccgtctttctgaagcctgtctgaagggatctgtcttctttcagagcagctgaagagaggttgtctaacagccacgtattaaggtttcattaatcaaagacacttccactgcccctttacagaaacacaactgctgtggctgtcctaccgctgacggcccgcgttaattaatnctagaagtactccgannnnnnnnnnnn

SEQ ID NO: 12029 - DNA, 438 bp, Homo sapiens
  misc_feature 438: n = A,T,C or G
acaaaaatgttctgcaataatgtctcaatgtagcaataaaagaacttgaaaaaaaactgccattattttttcttttctgccaaaatagcaattgtcaggcctgccatttcatttgaccattctctaaatagctcctcccctggactggtctcagatattggctgaaggtcataattgggaggtcacatagatttgagggaagttgatgggcaaatcagtttcacattggaagatgtttaaagaatggcacaggacgaaagacaagaatagctacagtcatgatgttcattcactgatagcaactcatcatttaactcagttgtcgagcttcagtaacctacgttcaaagtcatttatgccatgtttacatgacttcctaattaactcagtagatatttttcaagtttttctatgtagaagtagagtaactctatatan

SEQ ID NO: 12030 - DNA, 2056 bp, Homo sapiens
  misc_feature 1, 2051, 2052, 2053, 2054, 2055, 2056: n = A,T,C or G
nagatggcgcaggagtgcggttccacagggtcaggttcctaacacgctggccagagcagggagccgacctccaaactctcagggaagagaaccaggttgcccaccggcggcacctcgcacctcgccctgaccacaagcacgtgcgcccaacccgcctcgcaccccggcccgggtagggggctcaggggactcccggggcactcaggagggacgccccgggcggggcgcgcaggcgcgctgaggccgtgagccccaaggggcgggcgggtgcgcgcgctttctcgcgcacgcgcgcacggagggggcgacggccgctgtgacgctgcggcggcggcgggcgggcggcggcgcgtgaggcgcgcgatccccggtgtcttgggagcagtgccccggcccccgccgctcccgccgccgccatgtcgggccggtcggtccgggcggagacccgcagccgggccaaggacgacatcaagaaggtgatggcggccatcgagaaagtgcggaaatgggagaagaagtgggtgactgtgggtgacacgtccctgaggatatttaagtgggttcctgtgacagacagcaaggagaaagaaaagtcaaaatcgaacagttcagcagcccgagaacctaatggctttccttctgatgcctcagccaattcctctctccttcttgaattccaggacgaaaacagcaaccagagttccgtgtctgacgtctatcagcttaaggtggacagcagcaccaactcaagccccagcccccagcagagtgagtccctgagcccagcacacacctccgacttccgcacggatgactcccagcccccaacgctgggccaggagatcctggaggagccctccctgccctcctcggaagttgctgatgaacctcctaccctcaccaaggaagaaccagttccactagagacacaggtcgttgaggaagaggaagactcaggtgccccgcccctgaagcgcttctgtgtggaccaacccacagtgccgcagacggcgtcagaaagctagcaccatcccggccctccgcctcctggccctgcctctatttattgcattctggttctggccgcgccgcgttgctggggtaagggcaagcactggggtcaagagcctgcacacatgagccttccgggctggaaggctggcgtaggacttggggctgtagcatcatcttcctgaccctggcacctgtgtctacttgctcccgagaagaggagcgctcatgtcttttttgcaccccaagttggctggagcatcggccaccccaagattcatctgtgacctccaggcagcagtctctgctccagaatctctggacggagctgctggcagcttctgcgagaagagagagatgtggaaggcaccttctagaagagagcgtgcctcaggttacttgaacttgaacggagactgtagactcccggactttcccctaggactgggggccctgtaggctgctgttggaggactgggtagagacattggagggaagggaagggcttttctccacacaagggcagagagtccgtctagatttcttgctgtcctgccagctctgcccatgcctgaggtggtcctacctctcacgggcaccctagctgctgacagccctttgtggccgccgtccccatcccctgccctcagcacacacatctgcacacacgcagctttgttctcacctctacctgtcattccagcatccctgcctcttgtcacaaactgccccagcaagaatttgaggttctgacaacagtacccatcccccacagtaccccttcagctcagtttctagaaagctcccttttctttgaaatctgcatgttgaattgaactttgtgattttattttttgtttcaaaaaagtttaagaaaatggaaatgggcaacagtgagtgaagacatattttagcactgaatagaatatttttaaaattaaactatttgaaatatgaaaacaaatcggtttttcggggggcaaaggtataatggccggctggtctcgcccttttgaagggatcgggccaagggaatcacnnnnnn

SEQ ID NO: 12031 - DNA, 567 bp, Homo sapiens
actaactcacattaagttattgaaaagaaaaaatcaagctattagcaaggacggggaaaactgtagtgagtttgtgtatcagccacaagccgtgttgcactgaagtaacaactttttaaaatctcagaggctgaaaatgccaacagcttatttcttattcacaatacatgcctattgagggctggtgggtctctgcttgtcattgtcacgtggggatgcaggctgacggagcagctaccattgtgaatgctgctggccggcatccaggaggcctagcaggtctcttacaggtaactgaatgctccagcccagaagtgacaggtcacttccactcgcagctcattggtcaggaccagtcacaggaatctgcctaacctcatgggcattttgaaatctcttcaactttttgaaactgcttcagagatgcctcgtatgtgaaggcactgacaccacgtcctgggtgctttgtgtccttaggggaatggctgatgtctctaggccactttctgtgtctccttcatcagagcccgagaaccatcaaaaggactaactgaagtccccccgcgt

SEQ ID NO: 12032 - DNA, 532 bp, Homo sapiens
  misc_feature 1, 532: n = A,T,C or G
nacgactactatagggcgaatagtactatatagagacatgctccagcagacgcacagcgtgagcgatactctgcagaattgggatacgcgcggtcgccgcggaggtacaagatgctgcttgacataaagacgcggctggagcaggagatcgctacttaccgcagcctgctcgagggccaggatgccaggatggctggcattggcatcagggaagcctcttcaggaggtggtggtagcagcagcaatttccacatcaatgtagaagagtcagtggatggacaggtggtttcttcccacaagagagaaatctaagcgtctattgcaggagaaacgtcccttgccactccccactctcatcaggccaagtggaggactggccagagggcctgcacatgcaaactccagtcccttttcagctctggtcgacgcggccgcgaatttagtagtagtaggcggccgctctagaggatccaagcttacgtacgcgtgcatgcgacgtcatagctcttctatagtgtcacctaaattcaan

SEQ ID NO: 12033 - DNA, 476 bp, Homo sapiens
  misc_feature 472, 473, 474, 475, 476: n = A,T,C or G
acagagattaaattacatagttatcctagcaaagatgttctgcaacatgtttcattataattgtttcagaagtgctgaaaatcatttatatttaccatatacccatgtttgcctaagaaaactggaagtggtatctaaatatagatagaagtatatatcatccagcacattacagcttttttcttatttattatgtgaaaagaaaataaatattaccacatgactattttttagttttaaaaaggaaagataaaatattaataactcaaaagtaaatacacttcctgtgatataagtgatacaatccaagccacctgaccttttgtttgagattaaaactcttaaatatgaaggaaatataaaaagtatcccttaaaagtaaagtgaaagattgatgatattctcggtattctaacactataatcagtggagtaatttcctctattgattctaagcgagacctctgctggcnnnnn

SEQ ID NO: 12034 - DNA, 509 bp, Homo sapiens
  misc_feature 508, 509: n = A,T,C or G
accattcattacctgtcttcagcaactaccagcaaatggccaatttgatgtcatttttgtgtcaacctactaccttctaagccaattggattatcttccaaaacatcccagaccttatatcctgtcacacataagtatttcagaatctaaggtagtcttatctaaggtagtcttttatgccatcttatgcctttatgtgtccaattattttctgttaaagttcctcatttctcctccatattttccattttaacaaaagccaactcttctgtgggcttttttttctttgtatacacatggttccagccaccctgaggtcaagctgctgcaatgctttatttaccttgtagatattgggtatatttagtattcctcttatctgcaagctaaggagacaaaaataacaaaacttcttaatctgcttcctttcctttttctccttgtttgaacttcctactctctgcctctggaagctggcaaactgacagctcataaatcggcattctcnn

SEQ ID NO: 12035 - DNA, 582 bp, Homo sapiens
  misc_feature 582: n = A,T,C or G
acggtatattaaaaacaatcactgcagcccttaaatgatccaatagtttagctttgaatgcattcaagctaatgggggctttaatggcttctgacagatcattccattgatcaaggggcatgtatgaaatacgctgcctactaaactctgttttgattttgagaaaagaaaactaaacgtccatggtaaacatggcttgattgttcacatgttcaccgagatccctctcagcgtgaccctggttgggagcagaggagggaaggataatggaatcctatatacctggtttgcttctctcctgactctaatcaaggcataatcaacgggaaacctctgtctgcagagttgggggcagggggaaggaaggtgaccagcggtccagttttctgggttggatgagttataagccacggctttggctgtctgagaaactgattcatctcttgcaagccttgggggtttgaaggttaactgttctggttccaacgtggaaagccgaattccctatttgaaaggataatcaggtttttcagttggggacagcagttttgcaaagaaacaaatgaaatcatgctcctccan

SEQ ID NO: 12036 - DNA, 566 bp, Homo sapiens
  misc_feature 561, 562, 563, 564, 565, 566: n = A,T,C or G
accagcttttgcactttcctcactgtaaagatgttgtatgggttacttaaccagttggggtttaatttccttggctgtatagtggacttagtgtcacatgcctacctcaggatttctgtgacaattaaatatgatattttaaggcttctaacttactggatctaaataaattattcctggaaaaaaaaagtttgctgtgtaataaagcacctaaacaggaatgaaaaagcaggtatagaacttcaggtgttttgtcaccctccctcccccagtggtgtgtgtaggaaaactttgcttctttctgtaaatctgatgtctaatctcttctgactttacgttcaatcagttgattattttcattcagcagatgtgatcggtttgcagggttctcagtcaagtaggattgagaaaacatgaagatacacaactaaataaaatgctatgtataaaatgatgtcttatgcaataattatagctatgctatgttacttcagcaattattgctgctttggggaaatgagaaggctttgaggaggaggtagtatttcaaaatgatgaggnnnnnn

SEQ ID NO: 12037 - DNA, 536 bp, Homo sapiens
cacaatgtcctcgtgtcttgttctggtggccaccttgggtcccagtccacctggacatcaggctgacgtcatctcaacaatggccgggttgttaattcgccaccttgaagccatctctggaactgtgcaactgggtctccaggcttggtctgtttcaagattagctcctagaacttctaatctcacctggccgctagttattgatggagcccatatgtgaactcagccaattcttactcttttcctctatggcaggctccctgccagtgtttgtcatggcaggtcagcacacgggatactggatctgagaatctgatctccagggatcttccccttattctgttccccttggaggattcagcagatacctgtagataagaagctgagcactggagaaattaactagtcccagtcttctagttaactactaagtaaaggatccttgattcatacccagctctgagttctgagcattaattactttgttgcattgcatctggtgttgagtgattattctgtccccatcaaccccgcgt

SEQ ID NO: 12038 - DNA, 388 bp, Homo sapiens
acgcgggcagactttaatcatcaacataagctttattaaaatactggttcatcctgaagttcgactcaatggccattttctcctttctcttaattctgcacactcgtgtccactgtgcgatgcaagacccttcagaacagcccacccctcttactgtctaatgtttccagtggcacagggacagattcatttgggaatccctgggcccagtgtcccaggaagaaacccacagttgagcctggagtgactgtcctctgattctcacacttaccgtttcctggggctcctcatcttcaacacggtgaccagcgtgaagaaacagagcctgccccctacagactatcatttagagggagtttatttctagtgtccttcagacccgcccagt

SEQ ID NO: 12039 - DNA, 383 bp, Homo sapiens
  misc_feature 383: n = A,T,C or G
acgcgggaggataatgatgttgggaagtgatttctgtatctatgctgagcagacagtcttcaagagttagcaaagtttatatgtgcgggtgacaaaaaagaggctttgagttttgatgactgaaaggagacaaataatagctaatctttgataaagactaactatgggcaaggctttactctttgtttgtagtaacttacttaatcctcattataacccctttatatagatgctgtattttctccattttacagagaggaagtagagcctcaaagatgttatgtcacttgtcaaaagtcacccagcttgtgaatggctggatcaaactggatcatgtccaagtagcctggcttcaaagttcacacgctttactatatttatan

SEQ ID NO: 12040 - DNA, 495 bp, Homo sapiens
  misc_feature 491, 492, 493, 494, 495: n = A,T,C or G
acctgtgaacccaacctacaggctggcccctgtagacacagagaacaggtccatcccagcacctggatgacccttgcagatcaaaagccttccttggcaccatgtcagcccctatggaaataggcttcaggccagcccctgtggatacaggctgcaggctcatacttgcaaacccaggcttcaggcccacccctgcaaacctaaaaaacaggtctaccccagtgggcacctgcaaaaggccagcttgcatgaggactctagctgcaagcacgctcatggaccacattagccagcctactcaaaatctctgtgaagggctttcccaaacaagccagtctgcaaagactagaataaatctctacttcttcagatgcatggacaccaacagctagtcacaaagattaaaaacaatcagagtaacatgaaatcattgaagaaataaaataaaacatcagttaccaataaccaatcataaagacatggggatgtannnnn

SEQ ID NO: 12041 - DNA, 429 bp, Homo sapiens
  misc_feature 428, 429: n = A,T,C or G
acctgctcctgggccatcctgtgctaaggttgcattgctgaacggatgacagggtgggtggtgtatgtccctaaggccaccagagatggtttactcaattcacatgcttcctccacctgggatgaaagcggttaattaatgtttgattctaagaagtcaggtgatgtgattcagattagttatggggttgtgctgaagcgcgggtggaccctaggaggtgattttaacggaagtctcaaaatagcagccttggaactagttggactagttatttttaaaaataatgagaaatgttataaagtcggctgaaggtattgatttacctttcaggttgttcagaaacagaatcttgagaaatagcctgctacacagttgtaagggggataataaagagatcccccttctctaaaaaacgtttacaacccaann

SEQ ID NO: 12042 - DNA, 456 bp, Homo sapiens
  misc_feature 455, 456: n = A,T,C or G
acatttaatcctcacagcaaccctacgggataatatcgatgtgcaccatttctatagaaatgggctctatctttaaaagaattcagacagcttgttaatctacctccccttccccttgctaaaaagggtgtgaaaagttgcggtcattgagatcagagaaagaagtgcactgggggggtcaaccaatgacgttttttgtcaaactgaagctttgcttagttcctagtcaagagctctgcttagtgatctatctgcccagggcttagggaagtccctgagcttatttgtttctcagccgaactgcctcaactccagtggggaactgtggcaagctccagagcagtgacttaagtgtttgtaagtggctcagcccaaaaaacagtcccaagccattttctttccaaggaggtttcaagggaaaggagcactgctgggctctctttgtgaaaagatcnn

SEQ ID NO: 12043 - DNA, 587 bp, Homo sapiens
  misc_feature 556, 557, 558, 559, 560, 561, 562, 563, 564, 565, 566, 567,568, 569, 570, 571, 572, 573, 574, 575, 576, 577, 578, 579,580, 581, 582, 583, 584, 585, 586, 587: n = A,T,C or G
accgcggtggcggccgaggtacgcatctttgaagaaagtagctgtggatatgggtggaagcataaaggatcctagtaactgaataacatcagtaacacattcatgattttatcttcattagcaataggactcaagcaattgaaaaaccattgactttgtaaaaacacatgtgcgtgggccaggcacagtggctcacgcctgtaatcccagcactttgggaggctgaggcgggcagattacttgaggtcaagagtttgagaccagcctgctcaacatggtgaaacccagtctctactaaaaatacaaaaattagctgagtgtgatggcacatgcctgtaatcccagctactggggaggctgaggcaggagaatctcttaaaccgggaggcagaggttgcagtgagacaacatcactgcattgctctccagccttgggcaacgaagtgatctccgtctcaaaacaaacaaacaaacaacaaaccaaaaacaaacaaaagcacatctgcttgctcttgtgtagagagattcccttttttgaattctttgtggcactagnnnnnnnnnnnnnnnnnnnnnnnnnnnnnnnn

SEQ ID NO: 12044 - DNA, 1409 bp, Homo sapiens
  misc_feature 1, 2, 3, 4, 5, 6, 7, 8, 9, 10, 11, 12, 13, 14, 1407, 1408,1409: n = A,T,C or G
nnnnnnnnnnnnnnaattctttatatggttccttttttttttttttttgaggcaggatctcattaggttgacaaggctggacctgaactcctgggctcaagtgatcctcctacctcagcctcccatatagctgagattatagatgtggatcaccatgcctgactagttttctttctttagtagtcaataaggaatacagacttagtagtagtgcctattaattataatttgaggttcataaaacagcctatatcccttatcagcaagtgataacactcaggtaaaatgttaaatatctttatataatccccactagaatgtaaacttcataaaggtagggtctttgtttactgctgcattcccagtacttataacagtgagttattagataataggtaatttataaatatttattgagttaatcttccagccatccctgaattcagcattgtattcacgactctttggaatcaacaaggtttcctagtttagcggagaaacaataatagaataatcttggctattttaaagatttggaatattaaattggaaggagggcaatgattatgtaaatgtatgtattaagggactaatgagaggtgatatatatatctcaacagtagaaagtaaaaatggtgactaaaaaaaaattactaaatttcctttccctgtcatttcattaaatttgtagaatacaaaggaaaaaaatacactgaaacatcaatcctgtgggaaaaaattccatgcctttgaaaatatcaaaataaatctatttaaaaaggcagtaacctacacaaaggtcttatcacaaagaaaagctacttccctggtacgttagcataattttgaattatttcagctaagtagatgttaaagacttgactcaagagtggctgaaaaagaaaggattctctattcccctgattctctatcactatattgactatatagtttctttttgtaagatgcgttcattctgactattcttaccagcatttattcttactagcatttgtgacccagaattttcagagcaaacaagcaagcaaaaagcaaaattaatttaaatttcatttataattacttaattttcattcattgaaaagtcatcattctaaaatgagatttctattttaattataattacagatgctccttgacttacgatggggttacatttcttgtttttttgttttttgtttttttgtttttttgttttttgagacagggtcttgctctgttgtccaggctggagtgtagtggcacaatcatggctcactgcagccttgacctctcaggctcaagtgatccgtgcccctcagcctcctgagtagatgggaccacaggtgcatgtcaccatgcctggctaatttttgatttttttgtatatatggggttttgccatgnnn

SEQ ID NO: 12045 - DNA, 496 bp, Homo sapiens
  misc_feature 491, 492, 493, 494, 495, 496: n = A,T,C or G
acttttcactctcctacatgtctcagtttgaacaataaattatacagtcaccagtcccaggaaaagatgaaatatgaaaaagatgccagcagatttagcaattgctatttacacatccctggcattgtctaactctgctctgtatagccaggtctctaaccatcatctggactggaaccatatcttctaccaaaagcatgaggaaggctgggcatggtggctcacaccagtaatcccagcactttgggaggccaaggcagcaggactgcttgaagtcaggagtttgagaccagcctgggcaacgtagaaagaccacatctctacagaaaattttttaaaaattagccacacatggtagtgtgtgcctgtagtcccagctagtcaggaggctgaggtgggaggatcgcttgagcagaggaggttgaggctacggtgaaccatgattgtgccactgcactccagcctggatgacagagtaaaacctgtctcannnnnn

SEQ ID NO: 12046 - DNA, 551 bp, Homo sapiens
  misc_feature 550, 551: n = A,T,C or G
acatttttttttttttttttttttatttttatttttagtagagacggggtttcaccgagttagccaggatggtctcgatctcctggcctcatgatccgcccgcctcggcctcccaaagtcctgggattacaggcatgagtcaccaagcccggccagcagcaataatgttttaccaatatgagcatcaagcaaccgtggttccctagagcaccttccaattgtgagctctcagtttatgtgtgtttttactcaccatctgtaacatcacaccttcaaaacagacccttggcccatagatagaagataaaagaagctataatctctccttttcccaaaaacaaattttcttaggaaatttgatttatttttgagaaacctaatattcttgtttaaaatacaactcttccaaattctgtggtcaacagtgagatcctatggacacctttgatgataaaaattaaaatattctttaactcaagggacacagaacctaggcacggtttccccaggcactcagtccaggtgcttctcagatgaacctgggtatgcnn

SEQ ID NO: 12047 - DNA, 451 bp, Homo sapiens
tccaccgcggtggctgccgaggtacattttatcccattcctcactccaaggaaggaagttaattaaagtctcatctagcagacattcctcccccagctgtgtctagtcacgaggagaatgacgattgtgtgcatctgggcaaaacattaaagaggaaagttctgcaaaaattaggtatggtttggaaataagaaataaacatagtctacatattttgcagaaacaacattaaagaagccccaggccagccctgtcgcttgggggcctcccaggtggaggcagcaaatagttcaaagaggagctgttggagtatcagtctagctcctaaaatgagactgtaagatccttgagcacaagggcccacattttctccatctctgggatgtgttccccacccagacctccaggtgaacgtgcttacccagacctccagatgaacgtgcttacaggt

SEQ ID NO: 12048 - DNA, 544 bp, Homo sapiens
  misc_feature 1, 2, 3, 544: n = A,T,C or G
nnnacttactactgggcaaaaaatgacgtttaattacatttgctgattatattaaaatgggaaagtggtgacaaatgacacatggtattgtgctgggttttagcaaaaatgaaattctaggtgtgggagacaggtaattcaaactaatattgattgggattctgtctcagcgagttgatattcaggagcttgttttatgtagtttgctctaaaggagtcatttttcttgcctgagaaaagcaacaatgataaaaaagtaggcacatttggaggctgtttataattctatattttgtgaattcataaaacttattgtaatgtagaagtcgcttgacagactttaggtggtcaaaaagggtcaaaatggaagtaaaaatataatctggtcatttatttattctacgcatatttatcttgcctaatctgtgccaagcactgttctaacagtttagaatattggtgaacaaaacagactaattcctgacactccatgaaacttaaattctagcaaaattatttcctcttgggttttttttcctttccn

SEQ ID NO: 12049 - DNA, 452 bp, Homo sapiens
acgcgggcttctcctcatatctacatgactccatcctccatttctcttggtctctctcaaacataccttacacatgagaccctccctgaccactctatatactctatataaaataacctcacccccaccctgagacgttctttcctccatactactcattctactttactttttttctcaataatattaccacactctgacatactacatatttactcgcttattatttgtctctcacacctgtaatcctagcactttgggaggccgaggcaggcggatcacgaggtcaggagattgagaccatcctggccaacgtggtgaaaccctgtgtctactaaggtttcaaaaattagctgggcgtggtggcgcatgcctgtggtcccagctcctcaggaggctgaggcagaagggtcccttgaacccaggaggcagaggttgcaatgagccgaaat

SEQ ID NO: 12050 - DNA, 1137 bp, Homo sapiens
  misc_feature 1, 2, 3, 4, 5, 6, 7, 8, 9, 10, 11, 12, 13, 14, 15, 16, 1136,1137: n = A,T,C or G
nnnnnnnnnnnnnnnnaacccatgaggggagtcatcctcagggctgaggcatatgaaatctggggtacttttaagtagctgcagcactgttctctcacttttgctattcatttgcttagctaaccctttcctcgttgactgcaagggcagtgctgagggcagctctgtggccacaatcgctccttgcctacatgagcctcataggtgaacaaccatcctgttggtcttggacacatccctggttggtcttgaacacaggagcgacgcttcttgggggtgctgcaaggaggagattgcattgagaaaaggtccagggaggacccaggtaactcctggcaattgcaggtcaaaaatttggtaggaggaaagaaaaccaggcaaaggaagggaatggaaaggcagaggcaggaagtgatccacaagagttgcccgaggcaggaagagattcaggggagcacaaccgtgccacacagcctgcctgtcttggctttgactggcttgaagcagcatctgccctgtcccttctttaggtgcctgtcactgtttggaaggcagcccctgggtctgatttggggggcatcgtagggaacctgggtgctccctattgtactttgtaatgccaggtcttattctgagtgttttctttcccacagctggagagacagggggtcctgcttgtggaattcgaggctccacttgtcgcaggcccaaagctgccagcccagcagcagagagtggtcttagaagaggatgtcattcctctctcaccatctgtaggatactcactgagaccaggggataaggtgctggcactctgggagccaggccaacagcagtatggccctggcactgttcttttgggcttggagatgagagatccccagagaggtaagagaagctgctctgacccatcagtgcccagaaggagccaggctgtaatcaggccagaggagagagccaaggctgcgtctacagcttaggggtttctaaggcattaagaagagaatttttcccccttgcttgctgcttaatcttgagggcagcaacagatgcctcaagatgcacagtgtatctttcagattattaaaaaaaaaattgtaatcagggtaaatggcctaaaactctcatatctatgnn

SEQ ID NO: 12051 - DNA, 832 bp, Homo sapiens
  misc_feature 1, 2, 3, 4, 5, 6, 7, 825, 826, 827, 828, 829, 830, 831, 832: n = A,T,C or G
nnnnnnncgagagtcttctagaattaattaacgcggggctctgggccaagtggagcaattgaccagtctggaagggcctcatcgttcattgtcaaagtttattgattgattgagtgacagagtgagactgtgtctcaaaaacaaacaaacaaaaaaaccccaaaacaacaacaacaaaaactaagctggataatagttttcttcccaggcatatatgagcatcagagacccaaggattataggtagggaaaaaatgtaggcaactgtattgaaggtgctctgatttttaagaaaattttaaaaattcactggatatgatgtatttggggtgattctttctttctttttttttttttttttttaacctagcagtaaagtacaggcccagttgggtcctacttaaagttttcctgtttgacaatttatcaggaattattattgcttaagatagctttgaagtaaattgtctgcgtcaaagaccttcctccacttctctcacttacctagctcttggcaactgtttccaaaatgtttgcactaactccatagattcatgtctgaaggattagatactccaggaacatctattgggagaaagtttaactacaactgttgtccatttttcaattaatgtgccagtcactaatcaaaaaaacagatgctgtcgttttcctcatccactacttgggacacctaaagatagatggacagatacttaagaggctgcctccttcttctgagatagggcttttcatcagggctgtgccacagggtgtgatgctgtgtgatagcagatggctctgcttcatgcccattactttttgnnnnnnnn

SEQ ID NO: 12052 - DNA, 448 bp, Homo sapiens
  misc_feature 445, 446, 447, 448: n = A,T,C or G
actaaagcatgttaagctttcttccatgatggaatttataactcaagagaaataaaatcagattatgaattctaaattctaaggaatgagaaaagaatgtgggatagaagagacattgcggtcaagaggtggtgtgtgaagtttgaaagttctgttgccaaacatatgcaactctcattcaagagaaaaacaatctgcaaagactttgaagaatgagagaaacatgattcttaggagcaggctttcagattctcgatgatggatcatgtagacggcagatattatccagcaaaatcaggataattcctgagtcggaggctgcattccagcctctatgtcccaggctggagcagtggcaggatctcagctcattgcaacctctgcctcccgggctcaagcaatcctactatcttggcctcccgagtagctgagactacaggtgtgnnnn

SEQ ID NO: 12053 - DNA, 454 bp, Homo sapiens
actgccatttctttctttttttaaagaagatatgtttacaaaataggtgaccaactaaggtaggtgtgtgtgaagagaggcagtgagagagaggggatcctgaaattcttttcagtaaaggaaaaagataattttagggatgtttttaaaaatatataacttgatgaattttttatagcatgagtattatttaggtgctgtcctagaccagtgtggcgtataggctatagaagattggtcctgaatgctaacggcagggatgagtgtaagatcatcaaaacttatttgtgggaaggagagctactgacagagccgtgtattacatgactccagtctgggctgataggcctgccttaaagcatagctagagggcaggcacggtggctcatgcctgtaatctcagcactttgggaggctgaggcgggcaagtcacttgaagccaggagtttgagac

SEQ ID NO: 12054 - DNA, 1007 bp, Homo sapiens
  misc_feature 1, 2, 1007: n = A,T,C or G
nnaagacccctaccacacacctcaaagtaacttgaaatacattatgctcccagtgtggttgtaatattatcatcttattatcaccaattcccttgcatggtggctttgctgagcagctgtttcacagacaagccaatttcttttaagtattgctctatcagactctgaaaccagttctaccagaagggttcttggtaatgaatgttaatgagcagacaagtatcctttctctgacagaggctcactaatcctttgagtaagtatgggtgaattacaggagaaattttatttaagttaaattgatctgctactaagtagagaaaacttattttcttattttaatgaaaatcaagaaaaaatatttaatggggatgtaaattacagctccctgggaaacatttttgtcttctgactggaggacacagtagctcagtagactggttcaactgcatagtgtgcttaacactagcaaactcatgatctccagtgaggcctgatcttcagtgggacagtgggaaatggagtagaaaccactcactctctctgggatttggtaccagcagattctttatgttccttagtgataagtaatagggataaaaaattattctttcttcttccactgagccagtgtaagagttcctttttttttccaaaacaaataagatagtaaagccataagaacagcacttgtatgctttttgtattctaagaatatgagaaaaatgatttcagtgaacctttatctgaaaggatataaccatgtcctgatggaatactgcgatgggcaggtagaagggaatgagatgggccaggcgcagtggcttacgcctgtaatcccagcactttaggaggccgaggctggcagatcagaaggccaggagttcaagaccagcctggcccgcatggtgaaaccccgtctctactaaaaaaaatacaaaaaattagctgggcacgggggcatgcgcctgtaatcccaactactcgggaggctgaagcaggagaan

SEQ ID NO: 12055 - DNA, 583 bp, Homo sapiens
  misc_feature 1, 2, 3, 4, 582, 583: n = A,T,C or G
nnnnatatgactctaatcttaacctcataacctatttagtaacaaatgtgtaaacagaaagccatggaacaccgactgtaatgaagctagtaaaaagcctgaaagggaagattacaaacaacggtatgcatactgtatataatgcagttcagatattttaggcttgaaaatggatttattccttcctatttatgtatttattttataataggtaatagtatagaatgcaaaaggcttttatttaatgaaaatcagctttcctacctttgcctccaactgctcagctcctctatagaactgtttccagttttttctctgccttttcaaagatgatatatttccaaacatacacttactatacagacaataactttttaaccaaaaagcaccatattatacacattggttagcatcttccttctccccttaatattggattgaaacattattctccaacatttttgttaatttgcatttttaaaaaaggaaagaaaagccgggcatggtggctcatacctgcaatcccagcacttcaggagcccaggcagatggatcactggtcgagggtagtagtaggcgcann

SEQ ID NO: 12056 - DNA, 455 bp, Homo sapiens
  misc_feature 453, 454, 455: n = A,T,C or G
acaggagacatttcccatcgctattaggaaatgggcatagataagaattttcaagtgtttccaagatccccaaactcaaaccatcctaccactgcttatccatcgacatcagtggcttttacatcagacaaaggtggagtaaatcaaacataccacccatggcttcttgagtagcatgaggaatgaaataagaatttttttttttttgagacggggtctcgctctgttgcccaggccagagtgcagtggcacaatctctggtcactgcaacctctgcctccccggctcaagcaattctcatgcctcagcctcccaggtggtgggaattactggtgcctgccaccacgccaggttaacttgtgtgtgtgtgtgtgtgtgtgtgtgtgtgtatttttagtagagatggggtttcaggatgttggccaggctggtctcaaactcctgacctcaagnnn

SEQ ID NO: 12057 - DNA, 664 bp, Homo sapiens
acaggaggaagatactcttcctgaaccattgctcagcactgtctatctgtgcttctctatgcacatcagcttttctctccttggtgaggacatggcagttcctggctcacatactccagagaggcaggaagtttcctctctggcttcaatatagaaaatcctggtgggagatgagttactgtgattggctcattctgggctctgtgcccacctctgtagccagagggatggagatttttacccaaggaaggaggggagggatgctgggcttacaaaacatcaccttccagcttcacagattagagatggtgcaggtggaagaccaagttcctggattaggtactcaaggtgaaggcaacccgccatacttgaaagcaattggaaaaatcaaatctgtagtcccagctactgggaaggctgaggtgggaggatcacttgagccctggaggcaaaggttgcagtgagctgaaatcgtactactgtactccagcctgggcgacagcgagaccctgcctcaaaaaaaaaaaaaaaaagaaattatacacacacatgttattttaaaaagtatttccaagtggaaaacttgttgtcttgttccaatgctctgagaaccatttggtagttggtgtgaagttttgataaagtactagataaagacggacgc

SEQ ID NO: 12058 - DNA, 1331 bp, Homo sapiens
  misc_feature 1331: n = A,T,C or G
acttggaccatccacagcccagcaaggcagagcaggatgcttctattcctcctgacacccatgaggccctgcttcagacagcccttttctcctcctcctcctcccaccaggcctgtgtctcctccccaaaaggcaaaagaggcaccaaacacccaagcccaggtcaggagcctcccatccctcagaactcccttcccctaggaagcagatcacagaaatggggtgggcctggtggctgttcagaaagtcccaggcccctgagagaggagggctctattgtgaagccatttagctcttcccaacactcatcactgctgcatttatctaggccatatctaacacataccactggggatcctagggctaggcactgcgtggagccaaagggaacgtggcctcacacccaaggagatccaagtctgatgcagaaggccccgcctcattcttaggtctgactagaagaccctccccccgcacaaagaagatgacccccacctttaaggatcccttctcttggagaacaagaatttattgttttcttttcttctctatcccaagcccatctctgatgatgaagccagtgatggggaagaaacccaggttagtgcagcctgatctggaagccctcatcagtggccactaccccacctcccttgagggagattgtgagcctagcccagcccctgctgtcctggataagtgggtctgtgcacagccctcaagccagaaggcgaccaatcacaacctccatatcacagagaagctggaagttctggccaaagcctacagtgttcagggagacaagtggagggccctgggctatgccaaggccatcaatgccctcaagagcttccataagcctgtcacctcgtaccaggaggcctgcagtatccctgggattgggaagcggatggctgagaaaatcatagagatcctggagagcgggcatttgcggaagctggaccatatcagtgagagcgtgcctgtcttggagctcttctccaacatctggggagctgggaccaagactgcccagatgtggtaccaacaggtcacaccctggctcagcccctacttcagttttgctgtgtctcagagttcctgccccagatgtgtgctgtgctctgccccagatccctatgctgtgctctgatgggaatgcacccacagtatagggagaccatttttcaagcggaccaggactcatatagacccctcagctcccagaacagccttgttgcttggtatccttaagaaggagtagacagggacaagaagtatgtttctcagtctccccagaccagcaagcggacgcgtgggtcgactccctn

SEQ ID NO: 12059 - DNA, 535 bp, Homo sapiens
  misc_feature 528, 529, 530, 531, 532, 533, 534, 535: n = A,T,C or G
actttctttatgctcttgactgtgtcttctgcaggcaggacagacttacaaatcatgcagggcttgccccttcagtccttctgtcatttctagttagctctcacgttgctaatattccatgacgccgtccagtaacctgggctgccctcgctcctgaccgcctctcccccagcctggtcagggatacccctagagcagaggagaaaactgagctccaagcccagagcttccagcagctgagtggctcctgttgagagcctggctgtcccaactgtggcagcattcgcagattctgggcatctaaggcttaccagatacaaaggatggaagcagaaatatgcacagttcaaaaatgttgcttttagcttctagtgtgaaacttacagtaggagatcacagactgttttgcccctggaatatgtaggtcttttgtgagacaagggggagggaggaagcgaggaaagagtgagagagaagggagagagaaatgggtgagagtgcaaaaagtagatttcaaaaaaaattcannnnnnnn

SEQ ID NO: 12060 - DNA, 320 bp, Homo sapiens
  misc_feature 1, 318, 319, 320: n = A,T,C or G
ncctcagaacagtggactcagaattgagggttggggcagagatggcaatctgtttaacaggtttcccaggtgatacttacacacactaaaatttgagaaccactggtttggataaaccagaaagaattaaattataaaactgacattgaggaggtaatctgtgagagaaaagtgagcttgctatccacaccaaactctatccctggtagcaacttcacatctggttagtgggtatgtattacaccttctggcaaaaatctgaaaaaatataactgaggaacaggaacaacactggctaacagagagacaaacattccnnn

SEQ ID NO: 12061 - DNA, 577 bp, Homo sapiens
gtgcaatgatcatgtattacttatcaatcagacaaatacataagctctactttaaaactgtttatttatctaccaggttaacgacaaatactgaaactcagtcttggcctgaacctggtgacctggagctggtggaaggcctggtgagagacagctcagacactggctcactctatcctggctgaagcctgactcctggtggacagaaacatcagcgacagacttctattttcaaacgtctacatacacatcttagggaaagtttatttatcccctcattttgtcattcaacaaatatgtactgatcacattctacatgccaagcatgatgggaatgtaaaaataaatttgagatgacgtctttgaggaaaacggcttctctctactttcgttcgcattttcttgtgtttcaatagtagggtatagtgtggtagttttcttcatgtaagtcctactcctcagttacaattcagtttctttccaggttgctactgagaatggaatattcttcttggtgtcttttctgattacagtagtggcccggaagctatggattttcatgggttgtttccatgtg

SEQ ID NO: 12062 - DNA, 380 bp, Homo sapiens
acttaaaagctcgtgggcctcagataattggcctcctaaccaaattcagctgctggggcctgatcagaaactgctgggtttctttttccctaagccgatttaattcccaccgccaagccctctgaccttattttctttctttctctggcctaattcctggaaaatggagtctggaaatacctagggactacttgggtgggctccaaagcttcagggagaagagataggactgaaggatgcaaaagggatgaagagagaagccaggcaccaaggccacatcttgtgactccatttacaggaaatataccgtttaggtaaatgcatatcggtggctgccaggggctgggggagacggaactgggagtgactacctcatgggt

SEQ ID NO: 12063 - DNA, 730 bp, Homo sapiens
  misc_feature 1, 2, 3, 4, 5, 6, 722, 723, 724, 725, 726, 727, 728, 729,730: n = A,T,C or G
nnnnnnataaaggccttcgatgcgttgaggatggggtttcagcatgagttttggaggggacacaaacattcagaccttagtagcatccacgccatgtgtgttgagtgaataaatacatgagggcggaagtgaagggtgtggctaggaggggaatccaagcatggaaaggtaagttgggacctttccactgaggcctcaaaggcaagaccccaaggaatttggctacagtgggggcattagggcgacttgcacctctgtgggagctggggttctgggaaaggtatgaagcgacgcagccacggtggatgccatgcctgggatccactcctgactctatctttgtccccctagagtatgcagagaacatcgggggcggccggagcccggagttccgggagaacgagcaaaagcgcatcctgggcttgctggagaacttctagaggcaccttggccctgcgcatcatggactctctcagcttccctcccaggatcagtttctacacaactctgtgtggcttttggacaaattaaagctagttttggcaaaaaaaaaaaaaaaaaaaggcccccggccccttttaaaaatagggggaccccccgggccgggggaatttaattttaagctttttaaaccccgcccccctgggggggggcccggcccccaattttttgtccctttaagggggggtaaatccccccccggggaaaaaaggggcaaaacnnnnnnnnn

SEQ ID NO: 12064 - DNA, 619 bp, Homo sapiens
  misc_feature 1, 2, 619: n = A,T,C or G
nncgtccggccagctactcagtgactagtgggagagtagtgtagacagcgtggattgcaggacaaagggatgagtcatgtcccaggcgggacggcacgacacttcatcacgctgctcagaacaacgtgtgatttcaaacttctgaattatttctggaattttccgtttactctttgcagactttggttgaccttggggagcaaaccgaggaccgcgaaaccacagatcaagggggagctcgtgtcatagcagctctaacttagtgcttacaacatgcaggcactgttctagtcattttgcgtatattcatgaatcctcccacaaccaccgtgttcacgaggaagcggaggcagagggaggtttagtgagttgctggaggcagcccagctggtgagctgaggctcagccgcacgaccgtgctctggccccaaaacactcctcggtaacccccatcctgcccacacaaatggccccggaacacagcggctgctttgagtcagtttctctctcgatgacttttccacgttggcttcgatctgggagttccgttttctgtgtatttgctgtcaatttctatgcctttggatgttagtcattttccgaggtgctaaaaggggcn

SEQ ID NO: 12065 - DNA, 3343 bp, Homo sapiens
ccacgcgtccgcccacgcgtgggcggacgcgtggggtcggcggcacaaaatggcggcggcggcggcggcggctggtgctgcagggtcggcagctcccgcggcagcggccggcgccccgggatctgggggcgcaccctcagggtcgcagggggtgctgatcggggacaggctgtactccggggtgctcatcaccttggagaactgcctcctgcctgacgacaagctccgtttcacgccgtccatgtcgagcggcctcgacaccgacacagagaccgacctccgcgtggtgggctgcgagctcatccaggcggccggtatcctgctccgcctgccgcaggtggccatggctaccgggcaggtgttgttccagcggttcttttataccaagtccttcgtgaagcactccatggagcatgtgtcaatggcctgtgtccacctggcttccaagatagaagaggccccaagacgcatacgggacgtcatcaatgtgtttcaccgccttcgacagctgagagacaaaaaaccctgtgctctctctctggcaggaagcccgtgcctctactactggatcaagattatgttaatttaaagaaccaaattataaaggcggaaagacgagttctcaaagagttgggtttctgcgtccatgtgaagcatcctcataagataatcgttatgtaccttcaggtgttagagtgtgagcgtaaccaacacctggtccagacctcatgggtagcctctgagggtaagtgactaagacttctcctctgctgtccaagcgctttggtgcagggacagcggcatcttcagccaatccagtgcaggctctccaccgaaggctggctctagactggtggtacgcacatagcatagccatggccgactcctgctgtggttctctgacgattgtgcttcttgttaatcctctgtcgtgctttggtaatcgtattgattagagttggtaactgtcttgacttgaattttgtccctttaaaactgctgtacctgtatgataaagatgcagtacctttctcttaaaaaaaaatgctatggaaagctgtgagaattgaagagacaaattggctgtgtcagtgtggggttatgtcatgatttctagaagccctgaagttgctcttttgagcagctttgcatgacacgctctggtaaaaggtgtgcatctttaaattatttcatggatactttgaaaaatattgtatcacttcaaatacagcaataagtttatatgttctcaagatttcatttgtttttaagaattttaagttcgtggattaatatcactacttgaatactgacagttgttgattagacaccgaaaggttactgattgttgaatgtatctgtgttagagctgtgcactggcacgcttgcatcaggggctggggccacacggccgccacacagattcccccgtgatgcctggagctgcttccagagccgggtgtctccaagaggcacctgtaggacttcccatttagaaatctcttgagtgggtttgtatgttaccttctccaaggtttatttaggacagagatattgctggaaggtcatgggtcagattccctcacaacccacctcgtctgcgggtgcagccccactccaaggctccccgttattggggtatgtgaggagcagtaaatataaaaccagttcaactgtcctcatggaatcaccctttctgtttttgcagtattcataaagctagtgtaaggtctggttttagtctattaaatcttagagatctaaaggaaatgctcaaaatgtagccaggttttaaatgctttaacttttaaaaaaatgtaaatttttgtatgtttatagcttctaaatatgaaagttaaagaatgtactgtgatgaaatgttcagtattatgttgcttctcagtatcatgttgcttctcagtattgtgttgcttctgattctatgaatgttcattttaagaccccttgttgaaatgggacagttggcagcggctctgatgagcccgagaagaggcctgcccttgggtgcggagtctccctccgcacgatgctcccacgcgtccaacttgcacccaaggggcttttccctcttccaagtggactccttcaaggaagctgcagctcggtcagcagagaaggggcctgccgccagcgccctggaggaagaggaagaggaacccaagaggatggcttgtctcccagcagccacaccggctttgtgctcagccagttcatttgagtttgcatgtttctctgcactatggattttgagcatttagatttctttaatcaaaagcgttttagtgactccagtagacattttctttctgaggcatcgtgctttgcatgagagcaggccaaggttgaggggaaaagtaaagttaaagtcggttctctttcatagcaacacgtattgtctgacattcagccagctttttttttctaataatttctgtgcctttctgtcctgtatttactgtatttagaaaaagcagctagaatatttctccattaactcttgagattcacaggactgtctagctctgagtcctagcaatagactccttagaggagtagtacgtttatctagattttctctagataatgcaggcggaagacctgggttcccgggtggggcattgcagttcttcctgtgtttggcttccaggaattacatgaacgacagccttcgcaccgacgtcttcgtgcggttccagccagagagcatcgcctgtgcctgcatttatcttgctgcccggacgctggagatccctttgcccaatcgtccccattggtttcttttgtttggagcaactgaagaagaaattcaggaaatctgcttaaagatcttgcagctttatgctcggaaaaaggttgatctcacacacctggagggtgaagtggaaaaaagaaagcacgctatcgaagaggcaaaggcccaagcccggggcctgttgcctgggggcacacaggtgctggatggtacctcggggttctctcctgcccccaagctggcctggagtgcagtggcgctatctgggatcactgcaagctccgcctaccagattctggtgattcttgtgcctcagccttccaagtagctgggattgcaggcgcccaccaccacgctcagagtctcgctgtgttgccagtggaatcccccaaagaaggtaaagggagcaagccttccccactgtctgtgaagaacaccaagaggaggctggagggcgccaagaaagccaaggcggacagccccgtgaacggcttgccaaaggggcgagagagtcggagtcggagccggagccgtgagcagagctactcgaggtccccatcccgatcagcg

SEQ ID NO: 12066 - DNA, 519 bp, Homo sapiens
  misc_feature 518, 519: n = A,T,C or G
acagctgcatgtgcctttggggggctaagtaaggactggcctatctgagcacaccttccagggacatttatatgccctgtccaccgtcaccagtgataacatcaagggcctgaacagaggaccatcccagctgctggcacctgtatatgttattcatgaacctagagactgacccacttagaactgtgagggccctcacgtgacatccaagggcctgacgatagatgtgcctcgccctcagctaccacctccagacactgttggagtctaggcattggctggccatacctgcagctgctgacacacacacacacacacacacacacacctttcaggggctcaataatggacctaccttgcctgccactggcacctgtgggcacttcccaggggcccagggactggctcgtccaccctgcctccaccactattgtcccccacatgcatagctcaggaccccaagggatagcccactgatactgctgacaccatgcataccacctggagacccaaggacnn

SEQ ID NO: 12067 - DNA, 296 bp, Homo sapiens
acatgggaaaagaggacaaagtggtgagttaaatcagctagtctgtagcaaggcatgtttccccagggactcaggtccccgcttcaagagaacctgttctggagaccccttccttgactgtgtctgctgtgctgggctgggacttagtggacagagacagcagcctgtaagccccttttcccaagtaaggagcaagggcacattgacatagaagcaagctgacatttcccaagggacgtaggaagtgcctgcacttcatgttttcagatgagtctgcaaaggaaaacagcagtggt

SEQ ID NO: 12068 - DNA, 497 bp, Homo sapiens
  misc_feature 478, 496, 497: n = A,T,C or G
accatgcaattacagagcaacttcagctaatggggactccagcatcttggcatcctcgctgggtggagcagaagcgagcatggagcttccactcataaaccctttggcttgctagccacaactgatcacctagttttacgtaagtgcaaggggtggctggaagtagaggttccaagaaggtgcagaaagctgtctattagtgagcattaataatgtatgttagtgtttaacaagaagttgctggtaaagcgttttgtgcagtggctatcacatggaaaattttccaataaaagaaatatactattacagttataaataatgtccattagaataagcattacataactccttcaaatcaaaagacatatatttgaatatgtgatagcaatcaaatattatctaaaattaagaaggtgggtccataggaactgaatatatatttttaaaaatggaaattgaaggagaaagaaagacgtcncagtttttgcttactgann

SEQ ID NO: 12069 - DNA, 366 bp, Homo sapiens
  misc_feature 362, 363, 364, 365, 366: n = A,T,C or G
acttttttttttttttttttttttttctgttttgttttgtcataaataagggtatcacagggtagaagtaggatagaacataggcctaaaacccctataagcccattgtctgagctgacctccacagactggtgagttttatggttctcatcagacccgcatctatttaagacaaactgtgctgtgggtccctgaaatgaaaaccggatgagggtctcctttcgtcttgctttatgcccttcagagttgacttgtaaccaagagggagcattctcccttggtctctgcctctgggggtgtgattttcaggtcacgttcagtagctagtctaaaagcactgggaatcctgagccatgtcaaannnnn

SEQ ID NO: 12070 - DNA, 899 bp, Homo sapiens
  misc_feature 1, 2, 38, 897, 898, 899: n = A,T,C or G
nnagccaccaccggcagagtttggtgagccaaggctgnatttgccagctgattctgttataagctccaggtgagaagcccagaacggaaaaggctcctgaggccacctctcagtacgagttgattcttccttgatagaggaattctgctttgattctcacccaggacccgggagattttgttttcaggacactagcacataaggttaagagccagtgtagaagctcactgtaatcatgaaggtgaagaagagagtagaaccatggggatttacttcgtgttccagggaaagtgtggatttgaaggctcccagcatctcccctcctgcttcctccttccttcacttccagtgaaacactccttatgtgccgggctgcttgtcagtagcagagtagcctgcactaggtgctgacccttccctctttttctgttctttggcaatttctaccacataggctttttgctgactctggcaaatttgcattgtatgtcattattgccccgggttttctcgccacaaacccatgctcatcctgccgtcccgattccatctccgggtgtcacctagatgcgcttgctctgcttgtcaccattttttttttttttttttttttttttgagacggagtcttgctctgtcgcccaggctggaatgcagtggcgtaatcttggctcactgcaacctccgcctcccgggttcaagcggattctcctgcctcagcttatcatgtgtgaggaaaaaaaaaaaaatcacagcaagcaaggtggtgggccagagcctgcaagaggctgggacagctgtcattagtgagcagagaaagaagaccaggcccaagacacacatgcagctctaacaggtggccactctctggccctggtccccagcgcccactgtgtannn

SEQ ID NO: 12071 - DNA, 1599 bp, Homo sapiens
  misc_feature 1, 2, 3, 4, 5, 6, 7, 8, 9, 1586, 1598, 1599: n = A,T,C or G
nnnnnnnnngttaacgcctgtaatcccagcactttgggaggccaaggtgggaggatcacgaggtcaggagatcgagaccatcctggctaacacggtgaaaccccgtctctattaaaaatacaaaaaaaaaattgcctggcgtggtggtgggcgcctgtagtcccagctactcgggaggctgaggcaggagaatggcgtgaacctgggaggcggggctagcagtgagctgagattgcgccaccgcactccagtctgggggacagagcgagactccgtctcaaaaacagacaaacaaataaacaaacaaaaattcctaaaatatcctatattgcacagggcagcccctccgaccccaacaaattatgtgctctaaaatgtcaacaagtctgaggctgagaaaccttgctccaggggaacacgggggcatggtagagacaagaacaagctattaggagagagagcatgcactcaccatgaccagtaggctgtctcaggtggaaagtaaggtcttagagaatgaagacagtatgggaggaagatgatggggctgaggaaggcagtgggagatctggctgtgactcctggttcaagggatccctctttagtagatcccaaatcaaatgctggtgtggtcagcttagtgttccagctaaacgcagtttgcccctcatgagaaccatgcaaaagtccaaatgaggccaacaatcctcaggtggaagtcggggttacaggctgccctgctggtagatgctgctggtgcctcgactatactcccatggcaccacttcagcgcccaccaccttgtcttctgactgccaacacctgcattcctttgcctggaggattactcttggctgcccaagtgatagtcctgaaatgacagggaatcatttgcctctgaaggcagtccccaacaaatgcctgacagattttggtgaataaatacctactcccttgcctctaggatgggtcaaccacaagacaagcattccatgctgtataagagtcccccagtgtgactaagctccaggtgcccacaatgcttaactgatttgataatgcccactttactggctgctgtcccttcctggctcttccccaatttcctactggtactttctttacctcccccctaaaaatcacttgcacttgaattttcatctcagagtttgcttctggggagcccaaactgatggtcagtcttttgaaagaatattgcactggaaagcacatgatcctcaggttcctctgatgtaagagctctctgggtccacagtatcccttcccttaggaggggcctcaggattactagagattggccaatttttccatccccaaagtcccaggcacagaatcctcagaggacccacttccttcagaccattagaaatacaacttcaggaacatttcattctctcccattgacagaagcaaaaccacatattttgctcaaggatggcagggatcaaatgactctggagcacaaacatactccttattagggccaatgtccctaaagtcaaacttgtacaagaactctaatgagtaacaacacttggctccaagaagggactcttactataatnctaagacggacnn

SEQ ID NO: 12072 - DNA, 476 bp, Homo sapiens
  misc_feature 474, 475, 476: n = A,T,C or G
actgttttgtagagacagggttttgtcatgttggccaggctggtcttaaactcctgacctcaggtgatccacccgcctcggcctcccaaggtgctgggattacaggcatgagccactgtgcccggcttatttcctcttttaaaacttactattattattgtcattctcaaactattatctcataaacgttatattgtctatatcagatattcagtgtgggctatgttttttaaataacagatggtatttgaatatataaaagatataaatccttttcaaaatgttgctttgtctatttttctgaaaagtttgacaaccatctgtagagcttttgcagaagacttttttcttccctcacttttagtctctttaaaatcaatgactatttttattctgcttggtcaggcaagtaggcctttgattttacaacagctgtattcccatgggacacacacaaacacacatacatataannn

SEQ ID NO: 12073 - DNA, 908 bp, Homo sapiens
acggtaatacatacaccaagaacagagacagttacaaaaacaagtaagtgttgatataggcggacccacaaacaagaatgtaaacataatcagatagaaattatctgctaaaatacatttgtctatgccaataggcattttacttaacaataggttatcaaagagtcaatctttgagaacatatttcatattttctcttcattatctaagaaatgtgagctattgaaacacaatatatcttaggcaacttttttttttctttccagaaaatctggctctgaactgaatacatgtagtgctttggtttataaagattatagaacgtatttttttttcttacaagggttgcccagacttatttgggatggtgaggttctaccatataggaacgaggcagtagtagcatacatactgaagcaactgctgtgcttacagactagtaagcacaatgggaaacccagctcttaagatgatcattcaggaatgttgttaagacagacaggaagtatttcagatttacggtgttctaaaagaaaagctattgtgcttatggaaaattgcttgcgttactttcacccactacaaaataaatggaataagagtttctaaattcctcttctcatggaagaaataagtatcacagatgattccaaaataatggattcggggacaggctagtgtaaattagtcaataatttattcatttagcttctgttgataatcaactccatattaatctctgctatgcatattctaaaattgtggtcacctttagtatatcttagatgactacataatattaaaatgacacaatagaaaacacaaattgagattcctttaaaaaatttactgtcaatctctacaagcactaagtaaaatttttatatcataagtcagaattctggagt

SEQ ID NO: 12074 - DNA, 731 bp, Homo sapiens
acgcggagggaaggcagctcttcaaaggaaaggatgcttggagacagaacactggacttctttcttgcgagccttccccaacctccccaggagtcaagcgcttcctcctgggtgcttccggaagtcgtcattaatacctctcttccagcatgagttatggcaccactgtggtttttctgatgatgtgccttctcatccatccaattcaagttcccagcaggcagtgattttgtctgtctgccctccatatccaccctccaccctttccccactgctctcccatgtggatggcaccctggtgtcctgtgccctctggcttctgggggcatttggccaatgcggctcaccatcagcaggagatgagagctgagctcttggtctctctggcagcttccctacagggttcctgtgagctggtggcctcctgactaaaggcgacagcctctctgtcaggaagtcccccacatagcttcaggttctggaagcagctcccttccctcagccttgcccaccttgttctgttgttcgtggccctggagtctgcactatctccttagggttccctatactctgcccacactgaatcaatatgtcctttattaaactcttctcctacgacccaatcggggtgtgccctccaccaccctggttcctgcctggactgtggcacacaatgtcctgttcatcttcattgccccaggatccagctcagtgccttccccaccacaggt

SEQ ID NO: 12075 - DNA, 564 bp, Homo sapiens
  misc_feature 1, 564: n = A,T,C or G
natgaggagactgtacctcgtaggaggagtcagttaggtgtacacgactaacaaagtaccagcaagttcctttcaaaggtctgtggaccttcacagagtttaagctataaatcaatagttgctgggcctcaggggaaaggagaattggtgaatcctggcagcctcacagactttagaaatcagaaggcccagacagattctaattgtaaatgaggctgtaggtttgtttttggatttttgttttctacttttagtaacatccagaatgagttactgcccttccaaggaaggccatccattccccaagcaattcagtgtttgaattgtgatgctgcatgccccagtctcattacaaacaaacagagcagtgctgcggcaacctggcaacgtccttaaatgaccccctccacactctgccaggccctgggtgtctccaccagcatacaggctgtgtagaaagcagctctcctagtgaccagggtcactgctgcagtttcagtgtttctccacaaaatatggccctcgaagaggctgctcagcttacagaaacctggcaggtggccn

SEQ ID NO: 12076 - DNA, 475 bp, Homo sapiens
  misc_feature 472, 473, 474, 475: n = A,T,C or G
acagatactgttaagttacctctaaagccctgtcagtaaacttgtcagaaaataaaacagaatgtcattattaggaaaacaagaaagcccaaactctctagtttttttgtcttaataaactgaaattttatgtgtggtttctgctgaaatgttaatttccaagcatagttttaatgaatatgctttacagaaaaaaaaatcatgtttgtatttcacaataaaaattctgaaaatgaattttcttcacattagtctcgatgtgcaaaaataccttgggattcttttaaaaaaatcttgttattttaattttttttataggccgaagaagaattaaatttctatttcactaaacaaaaaacagtcattgtttatatctggaaaaaacattttaaaatgtcactctgatcaataaaattagacatatgtgttgttatataaatgtatttttttccccaaaaatatttacttggannnn

SEQ ID NO: 12077 - DNA, 887 bp, Homo sapiens
  misc_feature 1, 875, 876, 877, 878, 879, 880, 881, 882, 883, 884, 885,886, 887: n = A,T,C or G
nacaaagacttcatgtgacaccagtacgtaaaagccactagtttgggtgatccaagtgtacttagcactggttttcaagctgaaaagtaagtataagtcagcaataaatagttgccatttatgaatacacaggacaaagaaaattgagcacctagtggctgatgtttgcaaaatattaaataacttaagttcattgaatacaattagagtcaaattaatgaagcttagagatctagtgttatttaaactactagtagtgggccaagtgttgccattaacatttttttaatgatgaaatagaatagtaaaaatatgtttattttacctaataggttcattctagctttaaaaaaagtgttgtttcatgaagcttttgtgtattttgcatatatagataccccagtgtaaactgtatttgttactttggctcatagtccaaaaactcttgaaagccactaatctagcccagtgccttcatttcataggtggcaaaattaaacctatgggtcatctgatttgccaaaattcactcagggagttagtgataaaatccttggggcttcagactccaaggccagagattttttaaaaaacaaaccaggcgggacatggtggctcatgcctgtaatcccagcactttgggagactgaggcgggcggatcacctgaagtcagagttcgagaccagcctggccaacatggcgaaatccgtctttaaataaagtacaacggccgccacagcatggtggcgggtgcctgtggtcccagctgctctggaggctgaggcaggagaattgcttgagcccgggaggtggaggttgcggtgagccgaggtcggcgccactgcactccagcctgagcgacaagctcaggacnnnnnnnnnnnnn

SEQ ID NO: 12078 - DNA, 555 bp, Homo sapiens
  misc_feature 548, 549, 550, 551, 552, 553, 554, 555: n = A,T,C or G
acctctgctgcatcaacagggtgcagtggaagctaagcctccactcccacttaatatcaatgaggtggaatgaggtgctctgaagacatactggtgacactcagcttcttcttttccactgtcatggtgtcactggggcccagaagggagctgaacttctatcaccatcgtgcagtaacaaagttgtgggactcagccctcctcctccttctcccaggtggcagtgaagaccatcgggaaagtgaccttctacctcaactcaagacaatcaagacaatgaaagcaagttggtgccctgcttttgctaggaagggtcagcagcaccaagtggggagctgaatgttcaccccactgatttgcaatgaggcactatgagtaagtgacccatttttattggtgttttattggtgggtgcccaacagaaagttaaacatacacaccgatctagccttcattaaaaactgacacttaaaagataccacactcaagagaaatcattatgtggggattattttgacattgatgttaaagcagtcctgaaaaatgcnnnnnnnn

SEQ ID NO: 12079 - DNA, 1184 bp, Homo sapiens
  misc_feature 1, 2, 1184: n = A,T,C or G
nnaagatgggagagatgaagagtgttgtttctccttggtgacatccccaagcaacctcagatatgctcttccttggggcctctggttttgttgataaattgtccttgttgagacagttgggggggtgtatatttcaggctgcatgccaaccaacacactgcccagggacgggatgggaaatgaaccacacacatctagttctcctggtcactgttgtactgctccatcctgaacaagagagtgtggaagagtgggtctacaggtaagccattataaccaaactaccctcacagtttagcctcacaagggatcctttatgctaagaagaatgcccagctgatggggattaacaagaaaagcagaggggaggggggtcgctggaagcccaagagaaggaaattttttaaaaaatacaagtttcctgtcctacacaagcagtatgaattttgttatcccaacgggagtcctgatggtaaaatctagtttcaaagtaggatggggaaatggatcaagccttaccatggcaaagctgggtgggacctcctaggcgtctgtgggaccttgggctctccggatactgtgtcttggtttggggactattttcattctgtctcaagcctaggtttgtagatgcccttggccatgatacttactagctgtgtgattcagtacagaggacaagccccactttattcggagttaacctatggtgcagtggccttagaaaaacttaagagtaaaaagctaccataaaaaatgctggttatatgtatgaccagacggtcaactcctccttcttctctctctttgctataacagcacctgttggcttctaagtgcacagagttctcacaacaatgtgccaaaaccgccacccttcccatcctggcacccacctccccccaccccaggagacctgcatatcagatattacttcctgctgtctatgaccacaccaccttggcagttaacatcaaaagcaaacacatggggagaacagaaggcactggagcagcgggggaagaacaagcataggtaatgtttcataaacatttttctggtgcccaggtgcaaaaaccttggaacttcacatgtatttcagctgatcatctaaggacccaccttctctctcccaagatagtgagctgaaggcccttccctgcctccactcccagtgctcctgn

SEQ ID NO: 12080 - DNA, 550 bp, Homo sapiens
  misc_feature 547, 548, 549, 550: n = A,T,C or G
acaaaatttgggggccccacctcacatcaggcaagggcagctcatttaaactctatttttatctctcctacacaatataccaagctgtctacaaggattgagtgaatccagatttcaaggtaaaaagaaagactaactgccacattaagccaaatctagaagcatgaaaaagatctacccctacagtaattaatctgaatcttgggccttcaaacctccaaaatttaggcccaatatactagaactttaggcgttcctctttggaaaaagaaaaccagaactagatacttgtagcccacacaaccaacctgaagactcttgaatcaggcatggctctctcggtaaataattaagaacaggctcagccaggcgcagtggctcatgcctgtaatcccagcactttgggagaccgaggcgggcggatcatgaagtcagaagatcgagaccatcctggccaacatggtgaaaccccatttctactaaaaatacaaaaattaactgggtgtggtggcgtgtgcctgtaatcccagctactcgggacgctgannnn

SEQ ID NO: 12081 - DNA, 375 bp, Homo sapiens
ggtccacttctctgggacacattgccttctgttttctccagcatgcgcttgctccagctcctgttcagggccagccctgccaccctgctcctggttctctgcctgcagttgggggccaacaaagctcaggacaacacgtgagccatgcccttctcctccccacaaaaaaaattgcagggagggctcctctcccagtctggaaattacatatctctttctgagaatttctttcaacttcccagaactctagtcccaggagctcccatggatctcctgccaggttccacttcttgtcctcttaggaagccccaccaactcctctcacatttttgctgggtgtttctgcattgccagtggaaataaagctccaaatgt

SEQ ID NO: 12082 - DNA, 548 bp, Homo sapiens
  misc_feature 533, 534, 535, 536, 537, 538, 539, 540, 541, 542, 543, 544,545, 546, 547, 548: n = A,T,C or G
acccaaatcttagcccaacccctggtatagagtagttcctgggcaggtcattgaagagggacatttgtgcctggagatgggaatgtgtaggacttgtaggtgggaatgtcaggttgtccagggtcactttaatggaagggggagaaaaggaagagtttgaggccagacttggaggcccttggagaatgtggtaaggagaaagattagacttgattatgaacacactggagaatgacttgtgttttttgagcaggggagtgatatgcttagatacttgttttggacaacagaaaaaaatggagccagaggaactaatatctttgtgtatatgaacttattcatttattcaaaatttattgcagaccaaccaggcttttttttttgagactgaatcttgctctgtcacccaggctagagtgcaatggcatgatctcagctcactgcaacctccgcctcctgggctcaagcaattctcctgcctcatcttcttgaacagcttggattacaggcattcgccaccacatcccgctaannnnnnnnnnnnnnnn

SEQ ID NO: 12083 - DNA, 868 bp, Homo sapiens
  misc_feature 1: n = A,T,C or G
ncgtggcggccgcccgggcaggtacgagtggaggacagggacagagccctctgtggtggaacgaccccacctcgaggagcttcctgagcaggtggcagaagatgcggtaagatgggccttgtgatgagctgtaggagtggagtgggagctgcttgtcccctccccacccccaacagcccaacccaagacccagagagaagaagggaggatttctgtgagagtgactgtaggtagaagggcccaggaggccctactcctttatttttctgagtataggtgagtgagtgccacagaggctttgcaaggtggttcgctttgaactcggaacctccatcatgtgagctctctgaagatgggctttctttggggtagcttagaggccactgcatttgaacagtgtgctctctacagaagcagctgaggcctgtgggaaggcagccccaccctcctttttaaattaatttatttttgagactgggccttgctctgttgcgcaggctggagtgcagtggcatgatccttgctgactgcaacctctgcctttcagcctcaagcgatcctcccaagtcagcctccaagatagctgggattacaggtttgcaccaccactcctagctaattttttattaacatctttgtagggacaggattttgccatattgcccaggctggtctcaaactcctgggctcaagcaatccactatcctcggcctcccaaagtgctgggactaaaggcgtgagcccttgggctagcagtaattatttaaacgaattatttaggagctccagatggaagggcccggtttgccacccggcaaggacagaagctgaatctacctccggatttccctccagagcccagctgggt

SEQ ID NO: 12084 - DNA, 539 bp, Homo sapiens
acgcggggagctcattccactgaaggtgattgtgacagatgagtttcaataaataagccccttcacatgacatacatgtgaaaaataacttttggtttataataaaatgcttgttttacacattcttatcctatttggttataatataaattcttaaatgtaacaattatacttccagaatgtgttatttgaattacttggttattttatctttttttatgagaatttgttcccttctcattttctaaccacatttaaattgatactgtttgagtataaacttagtatttcccttcatgctataaataagttactatcttttttttttttaacttttccatttgttctttttgttgtagacagggtcttgctctgtcattcaggctggagtgcagtggtgcaatcacagctcactgccgactccacttcctaggctccagcgatcctcccttagcttcctgaatagctgggaccatatgtgtgcaccaccacgcctggctgatttttgtattttttgtaggcatggggtttcaccatat

SEQ ID NO: 12085 - DNA, 565 bp, Homo sapiens
  misc_feature 565: n = A,T,C or G
actttttttttttttttttttttttttttttgagacagtgtctcgctcttggggcccaggctggagtgcagtggtgctactgcggctcactgcaacctctgcctcctgggttcaagcgattctcctgcttcagcctcccaagtagctgggattacaggtgctcatcaccacgcccatctaatttttctatttttaatagagaccaggtttcatcatgttggccaggctcttctctctactgggataatttgattagctcctttatgttccagcttgaacgtatgtatggtaggttaatcctcccaaatcactggggaagccatttatcattgaaattttacaaatggggaagctgaggcgaagtgattttctcaatgtcacacagagaaaaagtagtttcagtaggactcaaaaccagggctttgagtcaagttaacgacttttccaccattttacagctgccttcatgggtaaagcaacttagttctcttaaagacacaggaccaacatgcaggagactcagacagttgtaggtgcctgagaataacagcagcaagccagcaan

SEQ ID NO: 12086 - DNA, 319 bp, Homo sapiens
ccgggcaggtacatacaaacccccttgccttctgttcattctccctcacagcagccaaagtgggcaaaccagaaaatggactggccagccttaccagtgtgcctgtctgaccagcgggcgacctggtcactgccccagagggtcaagggaaacctattctccttggccacattccttgagatggtgatcacagaggacactcagttgccacatcaggactttgatattcagatggaaaaggcttatatgttgatttgagttagtaattagggcttttaaactgctcttgtcgacataaacacatacactattattcagt

SEQ ID NO: 12087 - DNA, 416 bp, Homo sapiens
  misc_feature 416: n = A,T,C or G
actgaggctggtgcactccacattcccacccacatcctgccacatgttggtgagagtctggggagccccagcctactggcacgccttgttccctctgaatttctggagcttatttatttttaccacctccctctctgctttctgtgtccattccttctgctccttttaggtaactgcagccagagaaaggatgctgataggatttttctgaagaaaggtgtttttgatcaagagagttaaaatcacagaatgaagtttggcttgttatacctttaaattctgtggctcatgaagcatgataaccaagtagtgtgcatgttgtttcaagcagtggccctttcctaaagctaagtcatcatttctcaagagatcatgtggactggataagctcatcatttaaaagcttagttttctan

SEQ ID NO: 12088 - DNA, 493 bp, Homo sapiens
  misc_feature 493: n = A,T,C or G
actctactagagattacacattatagaatagtgcagaaagcaagccacatgaaagggtcaatttaatgtcgcatcctgcagaggtgaggagttgatctccaactattctcattggttacacaatcacattgaggtatttaaatcctggcaggtgggagcctttgcttcctttgctcaacggtgaattcacatggtggtgtggtaggcagaggttgcacggcattctctaatagctacaacttacctagtcttatccagtataggtatcaggtaagtgattacacatgttcagatacatcaatttaacagtaatcaaagagttcttttaacttaaaactcagggaagtcaggtctgtcttctcaagctgagaagaaccaaagccatggtatagacataaccatacacaggtaatgtaaaactataagctgaaaacaggtattagaaaaaaacacgagaagatgcagttatgagagggttgcagatgctaatgan

SEQ ID NO: 12089 - DNA, 428 bp, Homo sapiens
  misc_feature 1, 2, 3, 4, 5, 6, 428: n = A,T,C or G
nnnnnngaggaaaaaaaaccctccaattatatctgggggtgctgatacagcaatgttatctggtgtgactcctgtgaggcttttgctggtttttggaaatgctctaatccagtcattggacaggttcctggaagagcagggttggtccttgatcacagctgaaaaggtgtggaactgattcatagggctgcttcaggatacacagctaagactttcagctctgtttctgggttcacggcatttatgccttcaaatttttgggcgggcaggactgctcccagactctagcggacagggaatggcgctggttacagggctacttttatgattcatagtgggaataaaagtccagccagcattgcctttaggtgtgctttttggcaggtttaagggctaggaaaaaactgcccctggacttttggttgcan

SEQ ID NO: 12090 - DNA, 558 bp, Homo sapiens
  misc_feature 557, 558: n = A,T,C or G
acgcgggacaactagaagatcactgtattcaatactctaatccctgatatatcatgaatgctgaaagaggatttagactctactacacagccgccctgaaagagctgcaggaggcacagggaattatattaacatagtggattgcacgttagggacagaaatggaccaaggagcacatgagaagtccacattgatagaggtgcctggcatgggctctccttctctgcccagatggtgttggtgtgacctgatgggtggcaccttcttgacaaggatccttgctttagatatttggaatattttatgttatcaagctatttagaaattttaagtcactgcaaaagtgctcattccaaattctgtttcttgcctttgtcttgaatccatatctgaatatttaggaagatttggtattggtatagagaggtatcaatttggcaaagatccttcttttgccaaattcctggaagtggaattgctgggtcaaggacagtgcacctgaaaatgtggacaggtaatgccagatttccccacccccctttttaataacagtgaann

SEQ ID NO: 12091 - DNA, 391 bp, Homo sapiens
aggtactgacactacccttgctgtgtcgaccaaaaatgtttccagacgtgtcaccccagctgagaaccactgatttagaagaagggaaatcagggcggtgatatgactggaaatcatgttttttgaaaaatagttgagggaactagggtggtttaatttgaagaagactaaatatagtgatatcatttcagtatttgaaaggtggtgtttggcctgttctccatcactctggaggaagaaacagaggcactgagtgaaagttctaggagattagatttagactcaaaatactttggagaaactttccaacagagctcgcggagactggcctgcaaatgcatgtgcaagcagggcctgggtaaacacacagggggtgggaaaagtttctagt

SEQ ID NO: 12092 - DNA, 624 bp, Homo sapiens
acacaaaaacgtgaattatttgaagcagcagctagaaataatcttttcccttcgagcccccatgacccactgattctctctcttgtatcttgtgttgcagtgactcaacaaatactcactgggcactgaccacatgcctctcccagagcataggctgcatcctaccctatgtcacagttataacccatcctggctgtgaagccccctgaggccactcacctctgcctgccctctacagtgcttgccacggctataccgatgttggttgcaggaagaacacagaagcatggccaccctgattttaccatggcacatgtggcagggtctgggccctgagatgttcttctagttggggctgggagaacgagcgaggggccaggccctcctctacactgctgcatccatcagctcaaccgttcattcattcttcagtctcatatttatatatacttcattccatacatccttacaataatctgtcttggagggattattttcctcattttagagtaaggaaactgacagaggtaaagtattcaaagccaaaaactaagttattatttaatttaaactaacatcaaaacccgaggtctgaggtcagctatgacatgttacctcccgcgt

SEQ ID NO: 12093 - DNA, 406 bp, Homo sapiens
  misc_feature 1, 2, 3, 396, 397, 398, 399, 400, 401, 402, 403, 404, 405,406: n = A,T,C or G
nnnactcagagaaggaacatggggccatgaagacctccagaaaaatataatttttttgtttctttataggctgaacagatgagaaattacaatgtttgcattcatgacacctggaggaaaacaaacctacttactatttttaaacaaaaagaaaggcagtttgctcatgtaagaggaagaaacgaagagagccaacgagagtgagcttgagctcaaagcagattaaatatgctttaatagctgcatagaaacctgaagctcataaattttccttcatgtgcctaggaggacagggaattgcatatttatgagtttcgtgttggaaatctgtaactgtatctttaacaatatacaacactttttgaagtagcattccaaggactgcctgtttgacannnnnnnnnnn

SEQ ID NO: 12094 - DNA, 451 bp, Homo sapiens
  misc_feature 447, 448, 449, 450, 451: n = A,T,C or G
actttctggtctggggcaaattacactaataactacaatcccccaccctccccaacaaatgagtatgataatataatcatgcgtcttggaggatttcttggataagtaattttaaacagtccaaatataaaaaatgaatactaaatcaatagcatgcttaatccccactaggtccaactcagattacttcttttggatggaagcttcacgcctttgtggtgtcccatatcttagcttttcagagaattctgtcctcacagtgttgtttatagacagtgatggaagagaaaaatcatcacagtaaacatggagagtatgatgttccgaattttcatttgtccctgtcgctgaaccactctacagcttctgaataagtaaactgaataacccgcaataaactggtttctcccataaaaaatcagttgcataaaagggccagttaatgannnnn

SEQ ID NO: 12095 - DNA, 348 bp, Homo sapiens
acgcgggaggtcatggaaagtaagaattattactatcaaggggctgatgggccataggagggaaggaattaattagaggagctaacagaccaacaaacaaacaaacaaacgagcaaaaaacccaggtcccaggacagggaatcctgatggggcggaggtggtatctccgcagttactgagagaggggctgtggtcagtttcttccccttgaagatgtttcttccccttgaagatgagaatgatgttaatatccactatctggagttgttctgaagatgaaatgacataatccatgcaccaagcatgtggtaagtgctcaactatagtattaacagaaattcatagtgc

SEQ ID NO: 12096 - DNA, 359 bp, Homo sapiens
acggcttagctggacatcactccgaattaaacaaaaagaaacctcttgtgagcttagacttaacccaatctagaggcagaggctttgttgagatgacctcctggggtcttttgcagtttacagttcagatcctttgcttggttgttaagatatgtgtgtggggctccctgtaagagccaagaagctagcgctagtgaagaatgtggactgttgtctctgcgtgtttgtatcagtgtgctgtaggaaagatcaagctagcccacggcctctagggcctgtgccacagggctccttcccgtgctcagtatgcgtgcctttaatcacaacccagccctcttcactgagagccctctggtgcc

SEQ ID NO: 12097 - DNA, 1993 bp, Homo sapiens
  misc_feature 1, 2: n = A,T,C or G
nncagggggagtgcgggaggttttttctctagatagtctagcggccgccctttttttttttttttttttttatgcttcctagaatgaaaacttctgtttattaccataacttactaaaagaccaaaattaatttgcatatggaaaagcagaagtaacctcaaatgaagtaagaattgcatgcatagataaactgtcaagttgaggaaaatgaggaatgatgatgttcctgcatatgagctaggtattatgcacaagtggggcatcagaatgattccatgtggcatgttgtggaatagagtaggaacaatgtattataaaaaatatatcttcttttatgaacttccaccacaagcagaatcacacatgccgtctctgaatcaccatcaggactgtaaacagctgtacaggacgactcttagttgcatagggctgttctgtatcttgatgaacatccagcagccctgatgcctcaattctaaatgccagtggtgtcccccgaccctcgtgatgacaaaaactccttcatgacttccagagtatccttgcttagcaaaaagtaggagatccacaaaggtggaagaaactaaagaacaaatgatagaatgaaggactcaatgaatgaacaagctgaatgaggagaacaatcagaatgtcaagagagcatcctgaagatcaggaatgcgagaggacctggcccaggtcccggcaaacagcactcaggacattccagttaaatggagagtggaaacaaacagtatacttcatttgatgctgtccgaggacccaggggctttgctgtatcccacacccctgatcttgcctctgagccccttgattcctggccggcttcaccacacacttcaacggactggttagattgttggtccagagcactctgtggctgccataagtgggaaaggagcatgcgtaccttcttcagtttctgcaccgctggagggcatagctgttctttcctctggcctggcttctggctcaaaggccttgacaagaaaggctctatcccaaaagtatttccggaagagtttaatatctgcctccaacaaatgctcggctgtgtggttcagggtcagggtcagcgtttccgatgagtgaatgtaatgcaaggaggcttcttcactgagctgcactcgggagaagcttggggaccatctgccctgaaaatttgtgacgtcttccaccagcttggagtgtccttcacgtaaagctaagtctaatggtgtggcaccctcttcgttgggtaaagccaagcctggactccccccgggagacacaagaagaactgggaaagtttagccaggccccatctcatagccaggtgtagaagagattctctgtgagaagatacttcaagtgaagaacttcccaacacagtccactctagaggcaattccagatgggtcagagccagcacgagctcctcatccaaggcaggcagtgctcctgccgtcaaggcaaatggggtcagcagggtctggtggctgcaggctgtgaggcgattggcctgcgtcaccagcagacgagccagcctgcaagccatgttgtccacgtaggtcactgagccagagcccatggtcaccggagagtaaccttccgagcagaggcacacagataccgtcaccgtctcctgaagcccatggcctgggacgctggactggagaacgttatcctcgatgcgctctgcaatcatgacatgtcgctgatgagatccgtcataagtaaagtaaaactcagcatcttcaggaagatacacatttttgtcaaacttcgcatagatcatcatctgcccgtaaagaggtgcttcgctgcagctcaactccatggctttcgcatctggagcgatggccccgcagcctccagaacccaggcgaggctctgcccccgcgccctgcctgagggcgcctcggaacgcgcccccagccagccgccgcccggagtccggaaggctctccccggcggacgcggggtcgactc

SEQ ID NO: 12098 - DNA, 522 bp, Homo sapiens
  misc_feature 522: n = A,T,C or G
acaggaaaggagacttagtcggaaaaaagtcccctataaagggaggggaccaggagggtgctgtcctggaaatcccaggaggaaaatggtcaacacccccagcactccacagagagttgaagtgaaggtgtgtgttgcatctggcaactggaaactcatggatgacttgagcatgaacaggtgccccagggtgggggtgtcataacccgggagagagtgaagcaaggacttggagaacaggggtggtggccactctctgtgggcagctaaatacagcagcagcgcagctatgatggccttgcctctgcacattcgtggctggcccgtcagccctcctccctgaatcatatccccttactcactgttgctcactttgttgtctgcttcattgcccaaattggcaatgacagtttccttttcacctccctctggaagctcaaatttcttccgtagccttatgactgttcctttgtgacatgtttaggtttggagtttcttttactgtaaagccctgaccgagcn

SEQ ID NO: 12099 - DNA, 530 bp, Homo sapiens
  misc_feature 530: n = A,T,C or G
acattataacaaagtttttaacatggacttcagttgaatatttaaaaacaaactatttttggtaataaatatttttatcagtttctcggtcaaatctgtcactaatactgtgtcactgatacttttctgaatatgattttccatctggttttactagttttaattttttcataaaattgcagtattttgcagagttacattttatacttgtggttgttaacttctacagttgatgcttcactataaccaataatgtttttagttgctaacatactttatatgtgctgctgtccccagttagctcaggaaaaattttgctagatggagaatattcttaattctaatttttttcttattgaaaattataggctgggcgcagtggcttatgcctgtaatcccagcattttcggaggccgaggcagatggatcacctgaggtcaggagttcaagactagcctggccaacgtgatgaagcccccgtctctactaaaaatacacacacacacacacaaaaattagccaggtgtggn

SEQ ID NO: 12100 - DNA, 415 bp, Homo sapiens
  misc_feature 398, 399, 400, 401, 402, 403, 404, 405, 406, 407, 408, 409,410, 411, 412, 413, 414, 415: n = A,T,C or G
gcgaattggagctccaccgcgtcgagcggccgcccgggcaggtacttttttttttttttttttttttctttggattttcaagtcagtgaaccaggcaatcaccgacactgcccgcgcattatgggcctaattctgcagaggtctgacaaacctgcccagagacagaagattaagctattccaaattacccagacggaggcaagcccagattgggctctctgggacagaggtgggggtggggggacctttcatttctgctctttggagacctccaagactaaacagtttaggccacatcttgaagaaaattgccttatcctttcacctttaaggggattccggggcaatcagttgatttgggagcacgcggaggtaaacgcacaacacgccaggatggnnnnnnnnnnnnnnnnnn

SEQ ID NO: 12101 - DNA, 466 bp, Homo sapiens
  misc_feature 464, 465, 466: n = A,T,C or G
acgcgggctcccaaagtgctgggattacaggcgtgagccaccacgcctggcctcacctgggactcttaagtgatctattcagggacaaaatcaggatggtagtgcacagacaggatcttgacattgatctggaataacgaatcatgctattttgttatccagaattctttgacaatttttgtcttgccctttccctttcaacccttcctttaaaaaaagaaaacgaaagtagaaactattctgatctttattaaatggttaatagactataatgacagtcagcaagaaaaatttttctattccttctaggagggcttagaaagttcatgttgcaacttagctctttaagaattgttgtagtatgggaaatatgctggttttcagctgtgtggaattagaaaggctttaggatgtaaataatgcctttcagtgaatcaaacagctctttttttacatgataaagnnn

SEQ ID NO: 12102 - DNA, 1348 bp, Homo sapiens
  misc_feature 1, 2, 3, 4, 5, 6, 7, 8: n = A,T,C or G
nnnnnnnnaatcgttataacagttttattcaagtctctgtgtgctctggcattgagaccaggctgagatcagcattacactgtaatacaataagaggtttagccattgaaccaagcctgcttggcatccctagttaacaatttacagtacctcgaaagaaaaaaaaaaaaaagccaaaaaaaaaagagcctcagtaatcaaggtaaatcatattgcaatgcagtattttttaaaaatcagagttattgaaaaattccacgatgaatacagtatcaaaattttaagtcaggctttgtctgggttggtgtccaggtgtgaaggatctcaggaacaggcagcacactatttctgaaacctggccttggacttcagtgagcgcagggcaaggaacaccacggccctggggccctcgctccccagggctccgcttgtgactactctgacctctgggttcagaatgcccagacgtctatccctcatgttccggtaggagaggcctgtctgcgcacccctggaatggtattctgctgtccaatcctgagacacctaactagttagacacctatctcgatagacacctgtcatgtccacatctgccaatcagcctagtaaaactaggtgatgagtgctttcaaagagggcaggtcagaccagacaggtaggaagatgggtcaggtgaaaggcaggtctgtttccaagggttaacaaagagaggtgtggaaaagctcagctcctataaccagctgggccccaaagctcttctctctatccagctcaaggcccaaagcaggctccccgtaggggatggggaaccacagacagtaagaatcaggaaggaccagtcccaccggctcctgatcatggagtgagcccaacacgaagagcaaagccagggctccctaggcagcctacagaggcccccgtacttccagggcccaagacgggaaatggatgaggaagcgggtggacatgactgtcaatatctcatcaggacaaaatgagaaagagcagtctgagaggaagtccataagagactcacctggcctgcacggctaaccataagtcccgggctgagtcatgataattaggcacctaaaccctgttaattagccttaatcggcaggatttcagcttcctcctcctgccttccaacaccagcacctgagtggtgagcacccacccaggtagcaatgccagggaaaagcccaggactgaggtcctctccagaaatagcaatggattttcctttcatatgtgaattttcattaatttgaattcctaatctaggaatacgctgatccgacagaagagatgcatttggtaatgcgtttctaacaatagtatacct

SEQ ID NO: 12103 - DNA, 397 bp, Homo sapiens
acgcggggaaggcagcgatggcgatttttagtgtgtatgtggtgaacaaagctggcggcttgatttaccagttggacagctacgcgccacgggctgaggctgagaaaactttcagttatccgctggatctgctgctcaagctacacgatgagcgtgtgttggttgctttcggccagcgggacggcatccgagtgggtcatgcagtgctggccatcaatggcatggacgtgaatggcaggtactgagaatcaagacagagtagccattcatataacccacttggccttttatgaatgtttttcaaagaggctatttaactcaggttattctactctatgggtaatattgcatttggtaaggggaaaaccccacaccctaaaacttaaagattcacggt

SEQ ID NO: 12104 - DNA, 350 bp, Homo sapiens
accaacgtagggctttgattcagaagagtgtgctgtgaggaggcaggtgccaggcggattttatcatgacctgggtgaaagccatctgccctgcagagggagctgtttcagaactcctaataggaaagtcaaacgtccagcacagccagtgcaagagtggtcccaccagcacagtcctggcaaaactcttgactgtgtagccttcaaatctgattctctggatctctgggtggtcccatgaactatataataacatttgatgaaactttttttctgttagctggtgtagattctgtgatgtgtaattgagaatcctaactgaacccacaattttgctcttgatctttttt

SEQ ID NO: 12105 - DNA, 342 bp, Homo sapiens
acatttcaattcccagtggtgcaggctgggagggccatgaggagggagggaaacagacctgtgcctgcagctgctttcttggccacctctgtcctcctccttggtgttctttcctcttagggctggaggcctgctctcaccacctgggaaggagtctggagaaagacgggtcctccctggctccgtggcggcagagccgggattacccactgacattatagctggcagccgtgggctgttggcaccctttaaaagaacacgatggcaattttccagctaaattctcccaattaggcagttagagaaacattatccacctcagcataaagctgatgaaatgga

SEQ ID NO: 12106 - DNA, 598 bp, Homo sapiens
acggagagtggatggcccttctcactagtatttctttttgaaagatgtatgtggccgggcacagtggctcacacctgtaatcccagcactttaggaggccaaggtgggcagatcacctgaggtcagaagttcaaaaccagcctggccaacatggcaaaacccaatgtctattgaaaatacaaaaattagcagggcgtggtggtgggtgcttgtaatcccagctacttgggaggctgaggcaggagaatcgcttgaacccggggggtggaggttgcagtgagccgagattgcaccactgcactccagcctgggcaacaagagcgaaactccatctcaaagaaaaaaaagatgtatgcttcattttgtgacttacagagaatttactttggtttttgcctgctcatggtttttggcttttggcaaaaccatttcctgtgtggcttttcctgatgtgcctttcttgttcctgtgactgtttggtggaactattagaggagtgtctcttccagtccacctaatcaaaatcactgaaaatgaggcctagagggtttcatttaaaacaaacaacaaaaaaaaaaaaaaaagaaaaagaaaaagt

SEQ ID NO: 12107 - DNA, 583 bp, Homo sapiens
  misc_feature 578, 579, 580, 581, 582, 583: n = A,T,C or G
acataaagtgtgtgttgttttttaattattttgaactattcagtatattgaaaaattcaatttttgtttttctctgcatttgggcttgttccttttgctagttttctgattgatttgcatagaccattgactggatgttgtattttttttttctcaaagctaaactgtatgaaaaatcaagacttaaaaaaggtaaatggaggcagttgcacaattacatttgtttaatgagcttttacattttaaaacttttaattaatgttatactatttcagaaattcaactgtagttataaaattataaagaatgcatttgttatttaaagtgagatatgcgtgcagacacacagaccatggtcttcccttcttcctctggtctactgcttctgccttatatcccctagattccttctcactccccaaaaggcagaggttaagaagaaagttaaaatatcaagacacactaaactgtttttgtggtgagtcaagctgcagtgcctcgctgactgggaaacaatgggctgggccttctagaatatagtaggctggagaaacagaaaatacagcttgactgggccnnnnnn

SEQ ID NO: 12108 - DNA, 936 bp, Homo sapiens
  misc_feature 936: n = A,T,C or G
actttctctttttttttttttttttgctgttgttttcttctctgtctttttaactttgcagaaagcccttccagttatacactcagaccctgttcaggacgttggtggccaaacagtccccttttgttaagcgagcgtcccatttttgtttctcttgaaaggtgccctccgggacagcagagcctttctttgggctgtttataattgagccctgaagaaaaacagaaatcattctaaacccaggccaagtgcctccttggcctagctaggcaaagctaaactcacacaagatgaaatctaaccagctggttacctgagaaccaccttcgggagttctccggcttgactgctttcgccttggccaccatctcgagctccagcgacagctgagggtcagggcctctctgtgcagaagagtaggaagagaatcatagctgttggtgaaggttaggttgcattgtttgaaagggtcctatgtcagcttgcaaaatgctatggatctgtaagaatcctgaaagaaatgggttggagaagaaatttatgaccgtaagtctagttgtctttgagtggtgcaatttagccaggaatttttcctctttgcggctcaaggtttcaaaaagttcccttttaaaaaatgcgtgtgtatctatttttttcttagtttacataaaagggtattcatagctttagcccaccttgacatacttctgtcctttctctttttgcctttttctttacacaaattaggagtcatttgagaaaatgaggcatatataggatttgataagttagaggttgtgcagtttcgaattattttattttattctgttataataggtatgggggtaaccttcaggaatcgaaatggaatcttttttccctgttctcaaattatctagtttaggtcttagactcgccttattgcctataagtacn

SEQ ID NO: 12109 - DNA, 527 bp, Homo sapiens
  misc_feature 525, 526, 527: n = A,T,C or G
accacacattgcaggctggaagacaccaagggagacacatgttagttgcaactattgggacaggtgtgtcctgttaacacacaggcagttgctgatgtgcagactgggtttatgaacaacttgcgcatgtggcctatgctgggtgcatgtaaggcagatggcctttgcccctaattctgaaaacatgaacagtgagtgctccaaggatgcacttactcccatgtcaaggcagagaataagcgagttactagagcaaagcagacccgcctggtgtggctttgccttcccaccagccagagggagctttctattcgccctgcagcagtattaaaccctcgtgtcccaggtggagcccaaggcaccttctctggtctcagggtgggtatggacaacagtcacattaatatgaaacccaactactgttataggtaaggagcccagaggccctttgaaaaacaaaccatgagggaagcatgtgtcctcaaaatcctggttgccaagagaaggaatggcttgcagtgagcnnn

SEQ ID NO: 12110 - DNA, 607 bp, Homo sapiens
  misc_feature 596, 597, 598, 599, 600, 601, 602, 603, 604, 605, 606, 607: n = A,T,C or G
actgcaatatgtcatgaagaaccaagagaagctaagcagtggcgatgtaagattggtgggcagacagactgaaagcaagaagaaccgtgaagaggttcctggagaaacccaagcctgaagtgtctaatctaggatgatgggatagtaatggagagaggaacaaatctgaggtaatctgagggaagaaacaacagaatttggtggccgactggatatacaagacgaaaaacagtcaaaggcaggggttgcaaaggcaaaggtggtcatgggccaggcaggaaatatgaatgggagaagcagctaggtggagactggcaagccgtgaaccccggcgccatctaaagtggatgctgaccctgggatggagcccagagtagccagttcttgctctgccttctctctgggtctctccagtctcacttccctccagtccaacctccacgatgtgttcaggtgtcaaagcgaccttttgaaacaaaaacctaattatgtcacatcactgcttaaaatctttaaatggtcccccttggaggctatgtttttcacactgttatttttagcagcaaaaccattccttcaaatgaaaatgtacatgnnnnnnnnnnnn

SEQ ID NO: 12111 - DNA, 465 bp, Homo sapiens
  misc_feature 465: n = A,T,C or G
acgttcaggaattttcccagtgagttatagaaaatactcaaggaatacataatcagaacataacaaactcttcccaagaagagagatcaaaacaaagaaacaaacaaaaactttaagacagcagtaagcttcagtgtcaaatcgcttgaggaaaggataagaaaggaaaattagaggccagtttccctcacgattatacatacagtaagtcccccaccctcccccaaaatcttcaagagtcaaatccagcgacatgttaaaaaaaggtgatgttaaaaacatcatgaaaatgttgtttatccaagtaaacagttccatgttgaaaatctattaataaaatttgccgcaataagaaattcaacaaaaaaatcatatgaccacctttaaagatgtagaaaagggacgcaggtggatcacctgaggttgggagttctagaccagcctgaccaagcatggaaaaacacn

SEQ ID NO: 12112 - DNA, 631 bp, Homo sapiens
cggccgaggtacttgagggcatcattaaaatcagccagtgttcagtgagagacttgatgatggatttaatagtattaaatgggcaaaaatgcccttggcctttacatgctcatttaaaaacatacaaaagagcagtaattcaggcagttatacttctctcaaagattttgctctaaatcacagatggcagcgggaggccacggctgtgtgctggctcacaccccactcactccaaccgaagccagaagtgctcgttgggtcataattagcaaaccacccgcaaactcgactctttaaatcagaggccagtgactgccaggctggggcatagacgggagaaaacaagcagaaatggtcaaggtgctctctggagcctgccttcggatagctgtgacccccacgttaggcatcaagacagggttccacacctgcgccgccacccctgcagtgtgagcgctgtattttgctttctgagaaagcctcacggtttggctctttggtgcatgaggctttaaggcgatgtgccccctgcccagctgttgcccagctcccagcccttgccacagacagcatacatctctgttttagaaacaaatcatttagtcacttaatcatgaattcccgatgatgt

SEQ ID NO: 12113 - DNA, 546 bp, Homo sapiens
  misc_feature 545, 546: n = A,T,C or G
accaccacacctggctaatttggtatttttagcagagacggtgtttcaccgtgttggctaggctggtgtcaaattcctgacctcaggtgatccaccggcctcagcctcccaaagtgctgggattacaggcgtgagccactgtgcctgacccataacatctttaactttcaaaaagatgcactgtttctgctgggggtttcttttactaatttgattagagaattctttgttttgtccatgatatttggagtttttctcgtgggggagaatgcaggttttctcttgatggtaataattctacagtagaattagaattcttcttcactatcaaagagtctttatcttctgtaaagaatctcatgatatggtatgtgaaacccaaccagccaacacattaggaagttccagttgaagtttctgaaatcaaagaagccacctgcgtccttcctctcttgaaaatatgccacatttgtgggatcttaaaaggagacctgtttttccatttgtctcttctcaagcttagatctatagtaagttaaaaaacnn

SEQ ID NO: 12114 - DNA, 512 bp, Homo sapiens
  misc_feature 509, 510, 511, 512: n = A,T,C or G
acttgtgaattcaaaacagcactcaggcatataggttacattggcaccaggaaacctaagcagtatttccatgaccaaattctaagtgaattcaacaccaaaggagaaaaggaaatgttctttgctctctgtatagattcctcttctgcttgcttgggttttacaaagttcttctaatttttatgtgcgattggacaatgcagttttggtaaagttgctaaaaccataactgttactcttggttttaaatatcaaaccaggtaaaagggagggaggaacttaatgttacagaagggaaaaatgacttaaatatccgaacagacaccatatgggaggctttttactcccctttcctcctttaaaaacagtgtgttatttctccctctagattccagttactatggagggatttaggatttagtgggactagtgttgctgaattagctttgtaagacaagtctgtttactttttatactaattttcatgcttaccactgactctgattagnnnn

SEQ ID NO: 12115 - DNA, 1393 bp, Homo sapiens
  misc_feature 1, 2, 3, 4, 5, 6, 7, 8, 9, 1379, 1380, 1381, 1382, 1383,1384, 1385, 1386, 1387, 1388, 1389, 1390, 1391, 1392, 1393: n = A,T,C or G
nnnnnnnnnttttttttttttttttttttgagacagtgtctcgctctgttgcacaggctggagcacagtagcgccacctcggctcactgcaacctccacctcccaggctcaagcgatttgctgggattacgggtgcataccaacatgccctgccaatttctgtatttttagcagagacagggttttaccatgttggccaggctgttcttgaattcctgacctcaggtgatccgcccacctcgaccacccaaagtgctgggattacaggcgtgagccacctgcgcccagcaaattcttacttttcatatgttgaacgtgcatgcaagtgtgatcctctagttttcttattttctcccactttacaactctttttgtcctcctccgtgggagttttctcaactttatcttccaaccctctaagaatttaatattctgaatttccaactcttctatgaagtgtttcatattctaaacttctagaagctcttgttttctgggcactgcttttttcatagcatcctttcttgtttcaaagatgcaatacctttacttctgaagaaatcagttaactttttacaaaaacttgtcttcttcttgaagtatttccatttccctcttctctttcatattaaggttatcctcaaatgtttggtgatccttaatctcatatttaagattgaggcacttaaaagttgcctagggattctgtcttaatgagtagacatactgtaggattatcaatctgggccacatctgttatcagttagatatttttcctgatctcagcagtttgctgtcacaggatgaatcttttaatctcacagctagatggggcaagaacttgtcagccagtattctcagaactgggagggaaaaagagactgggaataactctcagatcaacatgcagatttttatttaattctccctgttttccagtatgatgcccttaacctgaactatgcctactgttctcaagtaccatttcttcttggatccttcctggcactgtgctaactgctttctacaaatttagcttacataaaacccttgatacacccttgaggtgagtaggtattatctgtagtttacataagatgaaatagagcctcccagcagttaagtaacttgtgtgaagatgggaccctcgttcctgatggttctagaaccttcatccttagtgataataagtaagtacatgaattgcctgaagaagtggtcagagtttatcatagaaaatctagatagtactcagtgtgtggaaaaatgtacacgctcttgcatttatggaaatgataatgttcactatttctgatattctattaactatcttttttttaaactatcttttaaattaactaaaataaaatacaaattannnnnnnnnnnnnnn

SEQ ID NO: 12116 - DNA, 415 bp, Homo sapiens
atcataaagaagccagcagatggtgttatactagctttcgaagttccttcgtctgcctcagctgaactctccctgaagccaaataaggacatctcaacatccacatgggcacacacacgcctgcgcgtgcacacacacacactgctgtttttatgtaacgtgtagctatgctgagttttacctccactctgtcaaaggtggtctttttgttgattgatgaatttgttttctgtctctactaaaaatacaaaaaattagccgggcgtggtggtggacgcctgtagtcccagctactcgggaggctaaggcaggagaatggcgtgaaacctaataggtggagcttgcagtgagcagaggtagtgccactgcactccagcctgggtgagagagtgagactccatcccaaataaaaaaa

SEQ ID NO: 12117 - DNA, 344 bp, Homo sapiens
  misc_feature 1, 2, 3, 4, 5, 6, 7, 343, 344: n = A,T,C or G
nnnnnnnggagtaggaatgttccataagtaagagagatgactagggtttcaagaacaaggaccagcacctatgaaggctctgaggcacagaccactgtgacctgtggagaagtggctcccacagtttcccagaactgcccccttggtcagagtcacggttctcctctggaagagaagctcaagggcagaccctcgtcaggaagcataccagcattttttggaacttccccggtcgctctttagacccctcactgagggatttaatgggaggaccttacacggcctgaacaagccaagtgaagcacttgtctgctattctgttcccctttgtgagactcagagnn

SEQ ID NO: 12118 - DNA, 481 bp, Homo sapiens
  misc_feature 472, 473, 474, 475, 476, 477, 478, 479, 480, 481: n = A,T,C or G
acttttcagatgagcaaaaatgtaaacaattgttaatgttcatggttggcaagagtgtgaagtcatggggatccttgcatcacaagttcttaaaaactgcacatgccttgccctagtaattcactttatagaacttaatttaagaaaatagatgggcatgcccagcactttgggaagtcaaggtgggcggatcacaaggtcaggagtttgagaccagtctgaccaacatggtgaaaccctgtctttactaaaaatacaaaaattagtcgggcatggtggtgcatgcctgtaataccagctacttgggaggctgaggcgggagaattgcttgaacccggaaggcagaagttgcagtaagccgagatggctccatagcactccagcctgggcgacagagcgagacttcgtctcaaaaaaacaaacatacaaacataaagtgcaaaaggaaggcagaaggttttgttggggagannnnnnnnnn

SEQ ID NO: 12119 - DNA, 454 bp, Homo sapiens
  misc_feature 449, 450, 451, 452, 453, 454: n = A,T,C or G
acgcggggccgggcgcggtggcacgtgcctgtagtcccaagtagctgagattacaagcgtgcgccatcacacctggctaattttttgtatttttagtagagatggggtttcaccatgttggtgaacaggctggccttgaactcctgacttcaagtgatccgcccatctcggcctcccaaagtgctgggattaccggcatgagccaccacgcctggcctcgatgacttcttaagaatttagtcagagtattctatttggctacctgttttattatattcctgtctgagaaatggtggtcgggctttcagactgagagagcagcacgtctctttgaactgtcaccccttagcactaataacttctttttgccccatgcataatgtgaagctggattaaggtgcaacttatctacaagcatctaccctattttattgcctcatttccctgannnnnn

SEQ ID NO: 12120 - DNA, 479 bp, Homo sapiens
acgcgggatactctacagcgtgtgcatggctggattcagaatttttggttttaaaaattaagcttttatttatatttacccatcaggtcaccgaatacttggattcaaccaaatgcttgaaagcttcttcatttgggggaaggtgggtttggaggcagaaatccctgcagactccacacccagggttttactaggtcctccgcggcaggtggaaggaaagcttgttgccctgcagttccgtttgcttcaaaaacaagggtgggaagggttcaccaattgatctttgtgcatatccagtgtaggaaaagtgttatttagagtatcattataaaatcggctgcatatggtggctcgtgcctgtaatcccagcactttgggagtccaagatgggcagatcgcttgaagtcggaagtttgagaccagcctggccaacatggtgaaaccctgtctctactaaaaatacaaaaattacccgggca

SEQ ID NO: 12121 - DNA, 485 bp, Homo sapiens
  misc_feature 482, 483, 484, 485: n = A,T,C or G
actatacttccattagagacttttttttttgagatggagtctctctctgtcgctcaggctggagattgcagtgagccaaaattgtgccactgcactcactccaaactgggcgacagagtgagactccgtcttaaaaaataataaaaataaaataaaataaaatggtaaggcacatgttgtagtcattattgagaacaaaagaaaagcaaaattaactgagaatctttgaagttaggtattgttaactactgattgtctaaatccaccacttcagtttgttttaaagtctgcttttctatcaaaattttgaacattcaccgtaaagtatgcctccagaaatgaccactaatatattattaaactattcttaactattccatgcatagtgggagatattgaggtctattgcttgatataagaaattaaactgtatttcttctttcttttcctgctggagggtaatttacaaaataatccatagnnnn

SEQ ID NO: 12122 - DNA, 440 bp, Homo sapiens
  misc_feature 440: n = A,T,C or G
acgcgggacaaaaaagggagttctacccctacatcctcatagctgagtcaccaggctgactgcatggatggctcctccctggagagaggaggaccatctgactgccaagatggggccagcgccacctctttgagcccctcctagggtgctgaaacagcagctgaatggctgctgggcttagcatggctgaggtggcatcatgagagagaggctggggatgatgtgacatggaccttccccgccggaaaccagtcccgcatcaatcccgctgagcccggcagcttcacttgctgtgaactgaggacagctgcaggtcaggttgtcatgtgagctaaggacaaactccagcctgctaaggtattagaatatgtgccctgtgggggatgaagatgaccggaaggaggcaggaagggttgtgggcacgttcaggtccttggtgn

SEQ ID NO: 12123 - DNA, 518 bp, Homo sapiens
  misc_feature 515, 516, 517, 518: n = A,T,C or G
gcgtccgactaattataaaacagcgtagaattgatgggtatacatgtactgtgtcctgttttattaggtctttaagaatgggagttactcgcccagagcaaataaagattaactggcacatagtaggaagcccaaaaggaaccagtgaagcaacagaagatagagtgaatgaataaagacacatgaatgcactaaatcttttgtgcacatggcttttactgattttcacctgtaatgtcctataaggctatagacagtcaaactaaaaaattgctgtcattgggagagaggcgggtggatcacctggggtcaggagttcaagaccagcctgaccaacatggagaaaccccgtctctactaaaaatacaaaaattggccgggcatgatggtgggcgcctgtaatctcaattacttgggagactgaggcaggcgaatcgcttgaaacctgggaggtggcggttgcagtgagccgagatcacaccattgcactccagcctgggcaacagagtgagacnnnn

SEQ ID NO: 12124 - DNA, 864 bp, Homo sapiens
  misc_feature 862, 863, 864: n = A,T,C or G
acgcggggatatttcacatgtgccggtcccaaaggaattccttaactctcccttcctggaaccgaaatgcttccaaagacagagagctcctatatatatttctctgttttccccagaggaccgtgcatgaaaggcgcctttcctggcgcgtgtgtctctgaccctgtggatcttctggacaattcccggaatttcttgcagggcagcacttccccttaagtcgtctctttctcgtttggatagtcagtatttatatagtcactattctcttttggttagccgtctaattttatactgccagtcaagctctactcccttccccctagagtttgaatttattttttttcaaacgctacacaaacccaaataaactcaaccaaagcggactttacctaccttcctacctacctaccaagaaaatatcccacaaaggagagaacggagaagcttgcaatacaggaagaaaaaaaaagaattacagaatggaagggatgtgtgcgctaaaaatgcaggtactcaaaggaaattgggctgatttgtactggacaccgaatttgaggaatacaggatctcaacctttctttgactggattacttttttatccatttggtgtggacgcgtctgaactgatagtgctgctgtactactatgtgtgtgttgcagatcacagaacgtggtggcagatcccaagaaaacgatgcaccgtgtgagctaacagaaacggacggccgttcctgcttaacgggtaatgcgcctaggataggggccgctcacctgtttttgaggagccgtacgattttgtgaaccttccgcacaatatatggaggggggccaaaaacacgcaatatgctcaaaaatcannn

SEQ ID NO: 12125 - DNA, 320 bp, Homo sapiens
  misc_feature 320: n = A,T,C or G
actaattagccagtcatgatctccattcttaccagggtcgttaccctggacttggcactacagggtcttgttgtctttgcttttgccttcttttccagctccttaaagcttttgtaagcacaaagtaacaagaggaaagagaaacatgatgtgaatgtcagaaagaacaaatacttgagaccaccttgaagggaaacttccagtcctttattcattactcgttcattcattcacttatcaaatatttttagggcatgttcaatgtgcctggaaccatgctaattgctaacattacaaatacgacttaattacataaaaan

SEQ ID NO: 12126 - DNA, 268 bp, Homo sapiens
ccgggcaggtacccctgttgcaagtccagtgaaggggtctagggaactctcccgtctcataggagttcctgatgcctccagttgacacaccttttctctgccatatggcactctgtctggacatctggtttactatccttttctttgtccatcagatcttaccactttcctgaaagtatcctcagcgacctcagactgtgtgtcccttttctcaatgggaataatcttaattcttgtgacttcttacatgacagtcccccgcgtacct

SEQ ID NO: 12127 - DNA, 459 bp, Homo sapiens
  misc_feature 1, 2, 3, 4, 5, 6, 7, 8, 9, 10, 11, 12, 13: n = A,T,C or G
nnnnnnnnnnnnnacgatgtacaatttatttagagacacttttaactaagaaaaaataagagaaagaaaataggctcatacttcttggcatatgtcaaaatttgttttgacattccctgaaatgtttgcattcttaaattttccagtaaacaactcagttttggaacactggtgaagttaaaaaaaaatcccctcttaaaggacttcacaaatttacttcttaaaacatagaaagactttttttttccttttcctcacatctcttcagaatattcctgtaggctagagctatagagcacaagatggccaccagccagaatccttaccacagctggtgagtgggttcagaagacaccagagagctgagatgcaaaggaatttaaacagtctatttctgggtaaacaactgtaaagagctttactctcaaacagtgagctgattctaaggtacctgcccgg

SEQ ID NO: 12128 - DNA, 410 bp, Homo sapiens
  misc_feature 409, 410: n = A,T,C or G
acgcgggaggcttggacattttctcctgccctaccgtctttgtggtcccaagtgtcatgccccagtaaatgcttccatgcctgttcctgaacccaaagaactgttattgaatgggacagagactgaatgactaaggaaaccctagctgcctccagccccacacttggctaagctgtaatcagctctgtgtgaggctgggcatggagtaggtgtagtcaatgtcctcctctctgtctcgtctcggttgtatcttcatttggtgccgctctcacggacgcctatcttcctctctgtctgttcctattgtctttccaggctcctggctgtcctttctgtcatagcaaccccagtgattttgataatgtcagcgagagcccaaagctgtcgcccatctgtgatagttggatann

SEQ ID NO: 12129 - DNA, 254 bp, Homo sapiens
acgcgggggagccttacaggcttacaatacaaacttgaacagtcaggatgtttcactgcaaatctttacagaagtgctcttcgactgatagtcattgtggaggaaaagaaacaaatgctgaactaggaggcaacttggggttttaatatgttccttaagtttgcatcctcccaccttccctggatgaaaaccactggtgatgtgatttaattcttttggctgagtgagatagacaagaggaatgcagaaatggt

SEQ ID NO: 12130 - DNA, 440 bp, Homo sapiens
  misc_feature 1, 54, 439, 440: n = A,T,C or G
natagggagtcgacccacgcgtccgagcaccatggcggttggcaagaacaagcnccttacgaaaggctgtaaaatgttttaattaataatatttatattatatttttttagggtgttcctcttccatgtaatctttcaggctcggaattgtcatcttcctcaggcaaatagtttttcaccttagagccagcaaggccaaaccgcccagtcacccgacttcccacagtctcagcaggtacacagggcggggagcctcgggagcggctcccttagcaggacctgagggtttcgggagagtcctggctttgcacttagttttcccgctgcctggctgcctccgtggcggttgtactgctttttatgcaggatgtaggatcgaaggcaaatcatcctttccctacgtcccctgccaacccctgccgctctcctctattttgtnn

SEQ ID NO: 12131 - DNA, 202 bp, Homo sapiens
aggtactcatcacgttgaagggtcatcatatgtgtgcccatttttttctctgcaggaaagtgagcttctggaaggctgtatctgagtcctgttcctccaatattcaatgaatgctgtctgaatggatcaatcaaatggagctatggcctcttctgattatgacagctgatcactaatatgatgtgacctccccatttcatgt

SEQ ID NO: 12132 - DNA, 449 bp, Homo sapiens
  misc_feature 446, 447, 448, 449: n = A,T,C or G
actttacagtttacaggtgttatttcattacattttgcactacggttctagcatagccattgttatttttattcacagacagaaaaaaatgaggttgtctcactcatataacctggcctctctcagctctggttgctgtggagagtagcataagtgatatctcttcaatggtggttctactgcacaaagagaaaacaaaacgttgtcttctggccttccaatggcagaatttgacctgcttttggctttgaaatgcctcatatgatattcttctagcagatttgtctaattatattttgcttgggctaagattaaaattaattggtcttttcatgatcacacatcaggagagtaataggaccaggcacctgagaccaagccagggattaaagattggttatggataatccactagccagagagtctgaatattgggggagatgagnnnn

SEQ ID NO: 12133 - DNA, 380 bp, Homo sapiens
  misc_feature 1, 380: n = A,T,C or G
nactgtcagtaatttttaaacccgcttaattcttggagatcaaattaactagtttatattttgcttcccagttcctgcaccttctgtttgcatactccttgtctcataaggggtttgagtatgcactccagctgaacagatgagccacactcctgtcacatatcctgcaagggggtcagggaactctcccatttcagcatgtgtgattttccagtggtggcgttcagaagtgtgtctcccaatggcttctcagcctgtcgcaggtgttctctggatgggtctgccttcatggtgcctctcctctcccaggagactggagaaaatgaagccttttccagagtttttgaggttgctaatgccaaattatgcaagccccgagn

SEQ ID NO: 12134 - DNA, 247 bp, Homo sapiens
ccgggcaggtaccttcagtccccagcctctcacagtagggctttgctcagtataccccagtgtccctcagcgttcttagcacttgtcctgacagtgtcccagatccgatatcaactgcatgaaatttgccaatgagggtgctattagtttctgtagaacgtcatcaaaccagagttccccaaacctgaattctcttccattatccattggttgcatttttaatcacgtattccaggacctgctctgt

SEQ ID NO: 12135 - DNA, 283 bp, Homo sapiens
  misc_feature 1, 2, 3, 4, 53, 281, 282, 283: n = A,T,C or G
nnnncattcaggtctgatctgggaccccgtgttgttgcgcgttaagagcacantaaaaaataaataaaatattcatcttcttgcaatccaagccagtctggagaagatggaccccttactctgagctggtcagaaatatgtagatccccttcctcatgattcatccatctctcgtgatccctcaaacttttccctggagatcttagctagaaaatgtctatccagccaaaagaattaaatcacatcaccagtggttttcaatccagggaaagtgggaagannn

SEQ ID NO: 12136 - DNA, 1368 bp, Homo sapiens
  misc_feature 1, 2, 3, 4, 26, 1367, 1368: n = A,T,C or G
nnnnccatagcgtatcccctcatggntcctactggacccccttgggcccattggccccccttggtctcgggacgcgcgccattgtgttggtacggctggaatacggctgcgagaagacgacagaaggggactgcgataggaatcatgtctggtcgcggcaaaggcggaaaaggcttggggaagggtggtgctaagcgccatcgtaaggtgctccgggataacatccagggcattacaaaaccggctattcgccgtttggctcggcgcggtggcgtcaagcgcatttccggtcttatctatgaggagactcgaggtgtgcttaaggttttcttagagaacgttattcgagacgccgtcacctatacggagcacgccaagcgcaaaactgtcacagccatggatgtagtatatgccctaaaacgtcagggcgcactctgtatggcttcggcggctgaatctaagaatacgcggtctcctgagaactaaaaaaaaaaaaaaaaaaaaaaaacatgtcggccgtcgggccccaggcgactctcgactctagactcgagcaagcttatgcatgcggccgcaattcggctgccggaagccgcccgcgtccgcacggctgcggaagacggacagaaggggactgcgataggaatcatgtctggtcgcggcaaaggcggaaaaggcttggggaagggtggtgctaagcgccatcgtaaggtgctccgggataacatccagggcattacaaaaccggctattcgccgtttggctcggcgcggtggcgtcaagcgcatttccggtcttatctatgaggagactcgaggtgtgcttaaggttttcttagagaacgttattcgagacgccgtcacctatacggagcacgccaagcgcaaaactgtcacagccatggatgtagtatatgccctaaaacgtcaggggcgcactctgtatggcttcggcggctgaatctaagaatacgcggtctcctgagaacttcaaaaaaaaaaaaaaaaaaaaaaaaaaatgcggccgcaattcgagctcacttggccaattcgccctatagtgagtcgtattacaattcactggccgtcgttttacaacgtcgtgactgggccctggcgttacccaacttaatcgccttgcagcacatccccctttcgccagctggcgtaatagcgaagaggcccgcaccgatcgcccttcccaacagttgcgcagcctgaatggcgaatggaaattggaagcgttaatattttgttaaaattcgcgttaaatttttgttaatcaactaattttttaaccataggccgaaatcggcaaaatccttataatcgatagacgagatagggtggtgttgtccatttgctccnn

SEQ ID NO: 12137 - DNA, 402 bp, Homo sapiens
  misc_feature 381, 382, 383, 384, 385, 386, 387, 388, 389, 390, 391, 392,393, 394, 395, 396, 397, 398, 399, 400, 401, 402: n = A,T,C or G
actagaaacctagcaggcattaataattgttgaggcaatgactctgaggctatatctgggccttgtcattatttatcatttatatttgtatttttttctgaaatttgagggccaagaaaacattgactttgactgaggaggtcacatctgtgccatctctgcaaatcaatcagcaccactgaaataactacttagcattctgctgagctttccctgctcagtagagacaaatatactcatcccccacctcagtgagcttgtttaggcaaccaggattagagctgctcaagttcccaacgtctcctgccacatcgggttctcaaaatggaaagaatggtttatgccaaatcacttttcctgtctgaaggaccactgaatggnnnnnnnnnnnnnnnnnnnnnn

SEQ ID NO: 12138 - DNA, 407 bp, Homo sapiens
acagtgacactgtcacggcccactgcagccttgacctcccaggcccaagctatcctcagcctcctgagtagctgggagcacagacgcgcgtcaccaaaccaggctaatgaatttttttttttgtagaggcagcatttcactacgttgtccaagctggtctcaaactcctgggctcaagtgatcttcccgcctcggcctcccaaagtgctgggaccacaggcaagagccaccacacccggccttttattttatcccaactgtaataaacagtttccttcacatgctctgtgcttcccacttccatatgtttgctcaagctgctgttgcctgcatcaccactaaggttcccacatgtgtcggatgtttcacctggcgccttcagctgcagctcctccgtctccccgcgt

SEQ ID NO: 12139 - DNA, 807 bp, Homo sapiens
  misc_feature 1, 800, 801, 802, 803, 804, 805, 806, 807: n = A,T,C or G
nacgaggaattcccacaggcgttcagaagtttttttctgccctgtaaaagttcccaaatgggtagactagtttatattttgatggccattagtatccggagttctctgtcatggttctgatgccaggggcacatactggcatttaggacccaattgtttgcaaggagttttggaagtctaactgcagcccttttctggaggctggacttgacttggggagggggagaagtacttgctcttttctaagatttgcctccaaattgctactgaagcacattacctgtcttactatgaataattgtaattgtttctcagtgagcatgctagctactttagatatattatgtaatttaatcttcagaatctgtgacagagaaaaaaaaatctttgtttcataaacgaggaaactgaagtcctcagagggtaaagtcagttctttgcccagcacacaaatcacgttgtggtgaaactgacattaagcttgggtttctctgactccaaaggccatgcagtctgcaagactgcggcatttgttggcatttgcaccacgtagtagcactgcaggcagccagggaaaggggagctgagataggtgagggtggtcctcatggaggcgattctgtgtgcttgcatcctggaaccccttcattccctatgtgctgtacccaaagcctgactaacatatactgttacaaagcagcagaagactctccaagacttcaggtttgaattcttgtccctctaatcagatgacagatttcacacttggcagagtacaatactgaaggtcttaactgggnnnnnnnn

SEQ ID NO: 12140 - DNA, 566 bp, Homo sapiens
ccgggcaggtacctggatgttagagggatttgtctagacaggcagatagatatgatccagtgccaacactgtaatgctggctgaaatccagatggttgtttgattgttaataaaatctatcttgtgggtgggtgggtgtcaggccttcatcattatatggtgcctgtcagatttatctacagacagaaccctgaaaacagcttgtgcctgccccgcatttttgaccccttgccaagatactgtactgaaatctatcaaaatcaggcaacctgggacaaatgcttcgagattccaaggcttaatagcaacagtgctgacttctaagatggagaagattctcaggaagggcatccttgtccggtggggaaaaattctagattaagaggtgaaccagatgctagctctggctctgccgctaatctgagtccctctgggctgtaaaagggggagattgggttagaatggttccttcttactctgaaattctactctaatcaactctggtcaaggtatgggtgacttctggttctaatacctataaaaaacctaggtgttcttcccccttc

SEQ ID NO: 12141 - DNA, 1001 bp, Homo sapiens
  misc_feature 1, 2, 3, 4, 1001: n = A,T,C or G
nnnngtgatcggcgagcacccggagctctcaccctccagtgcgacgagcgaaagacttcctccagggcttcctcacggggaatgccggaaagagcaaacaaaaaaggcgctggtgtaggctccaaaataaacacatctgaattcatgatggcatcgacagaggctcttatggattaaaagtttcaaaacaaacaaataacgcttttgggaaaagggtttgaatgcaccctcaggcacgaccatggagaaggggggggacctacaatggagattccggacttcgagcaactcgtgtccttgagccatctaaaccagtgtgcgctatgcagggccgtctctgtgatatggtggtcaatgtgcaaggacaagcttttcgggctcacaaagtggtgctggctgccagctccccctatttccgggatcacatgtccttgaatgagatgagtacagtctccatttcagtcatcaagaaccctactgttttgaacagctcctttctttctgttacacagggcggatatgcctgcaactggcagatatcatcagctacctaacagctgccagttttctgcaaatgcagcatattatagacaaatgtacacagatcctggagggcattcatttcaaaattaatgtggctgaggtttgaagcagaattaagtcaaaccaaggtacaaagcatcaagagagacctccagagtctcacaggggttacaccaaaatctcaaccgctcccttagcccacgacataataccccaaagggaaaccggcgaggtcagggttaggtgctgtgctggatatcaagagagctaagtcctcctgaggagtccaccagccctcagatcattgaaccaagttctgatgtagagagccgggagcccattcttcggatcaaccgagcaggacagtggtatgtggagacaggagtggcggaccgtgggggtcggagtgatgatgaagttagagttcttggagcagtacacatcaaaactgaaaatcn

SEQ ID NO: 12142 - DNA, 735 bp, Homo sapiens
actttttttttttttttttcaggtgtgaaatattgctattaatagtgtctatctcatagggtggctaagatgattaaatgagatgatatagtttaagttctcaaaaaagccaacaatgattgttacctttcttttaggtgttgggtatcagcctcaatttctaaagaagaatctcttttgcctcccaattgtgctgaattggaaaccttacctatgtatttatttattcattcaaaaaccatctattataaaccatatttgtgccaaactctaagccagttactgaaaacacataagtcaataacagcacaatccttatcctccaagaattcataatccagtcagggaaaaggagacacacagataaagagaggagggatagagcgaaaacattggagaaatcaggagcataccaacaccctaatttttcacagcagggagccagtcaattcagtccaacactgaaatacatagcttaataactacatgtttccaaaccattgtttcataatctatttccttaatcttagaaagattactgtcttgtggtaagaagacattaacttcaaatttggtatttcttttatttcactttagtttatttttcttctataaaatcaaaataaattacagtcttttaatttaaatagcattttcaacatatttttctttcttttattctctctatccagttcatttaagcatgcaaaatgcttagggaggagtcttaaattg

SEQ ID NO: 12143 - DNA, 1919 bp, Homo sapiens
gtcggcccgggtgttctgcaagctggtcaaaaaggggaagcggcccagatatgttaagttctatggccgctgcagggtctgtgaaggcggcgttgcaggtggccgaggtgctggaagccatcgtgagctgctgcgtggggcccgagggacggcaagttttgtgtacgaagcccactggcgaggtgcttctcagccggaatggaggccgcctcctggaggcgctacacttagagcatcccatagccaggtacccgcgtcccacacgctaacccgtagccgggcaccccaggcagcctctgtggagctcttgtcccatcctgaggcgatgcgtacttagaaagactgacctcgggtgaaaccgctgtatgctcggaattagagccctgcccaagggaacactcctgcaccccaaatcttaccaattctcaagaccacttctccccactccacccaacggtggaatcttggaatagagcagagttttttccaagaaagaaaaaaactaaggatgtatccaaggaacaatattctcattttatgcttatggctgtgtaaacatggttttaagatgtgggaagccagccttctgaaaatgagttgctttatttcttttttgtacaggatgatagtggactgtgtttccagtccatctcacaagaaacaggagatggtgcaaaaacatttattatctttctttgccatttgcttagaggacttcatgcaatcacagacagagaaaaggatcctttgatgtgtgaaaacattcaaacccatggaaggcattggaaaaattgttctcggtggaaatttatttcccaggctctcctaacgtttcagacacaaatattagacggtattatggaccagtacctaagtagacactttttgtctatcttttcgtctgctaaagagagaacattgtgtaggagctctttagagttgctcttagaagcatacttttgtggaagagtgggaagaaataatcataaatttatttcacagttgatgtgtgactactttttcaagtgtatgacttgtaaaagtgggattggtgtatttgagttagtggatgaccattttgtagagttgaatgttggtgtcactggccttcctgtttcagattccaggatcatagctggtcttgtgcttcagaaagatttttctgtgtaccgcccagcagatggtgacatgcgaatggtgatagtaacagaaaccattcagcctcttttttccacttctggatcagagtttattctaaattcagaagcacagtttcagacatctcaattttggattatggaaaagacaaaagcaataatgaaacatctacatagtcagaatgtaaaattgctcatatctagtgtgaaacaaccagatttagttagttattatgcaggggtgaatggcatatcagtggttgagtgtttatcatcagaagaagtttctcttatccggaggatcattggtctttctccatttgtaccaccacaggccttttcgcagtgtgaaatacctaacactgctttggtgaaattttgtaaacctcttatccttagatccaaaagatatgttcatctaggcttgattagcacatgtgcatttataccacactctatagttcttgtggcccagtgcattggtctcattgaacaacatgaggattctcttaatgggaggcatttaaatgcttcgggcacatttaagaccttgtctaatttatgccaaacaatgaccaatggcttcagtcttatttatagacgggggaaagtttagggcccgacaggaaggagcaaaggctataggcagtgggaacaaatcatggaactccatatagacccggggccgctgttaatgttgtggccgagcagttcgaggcgatgagaaaagataaaaagattggaataaaaataacagacaac

SEQ ID NO: 12144 - DNA, 432 bp, Homo sapiens
  misc_feature 431, 432: n = A,T,C or G
acgcggggagttgtggggagattagctccctgctcagcctctctgatacaactgggcagctagtttttgcttctgcaacaagacataggtttatgatgagcttcctgttcatctctgctgaaactagggaaagtggttctaggttggaggcgttagcagcattttggctggggtatatgggaggcaatatggaaaccatcaaacttgttctcacgtcattctgcaagtcctggtgtcctgaggtgtgctgaagccctatccccaagatgactatatttggagacaggatttttggaggaatatttcatcttttggttgacaaattcaaagcattcaagtttattaaggacacatgcacctgtctgttcatcacagtgctattcacaatagccaaaacatggaaacatcctaagtgcccatcaacagtggann

SEQ ID NO: 12145 - DNA, 1384 bp, Homo sapiens
acgcggggatagttgaaatggagggcggggaagtcaggcagtggtttctgaaagccaagaacttagtagcactgtgccattctcttgcctgatccagtgccattcccttcacttgatatctgtttactttagaggaggcagtttttgagaaaggatcataaatatcctggcccagtgccccaggagctatgacaagcaaaggaacatacttgcctggagatagcctttgcgatatttaaatgtccgtggatacagaaatctctgcaggcaagttgctccagagcatattgcaggacaagcctgtaacgaatagttaaattcacggcatctggattcctaatccttttccgaaatggcaggtgtgagtgcctgtataaaatattctatgtttaccttcaacttcttgttctggctatgtggtatcttgatcctagcattagcaatatgggtacgagtaagcaatgactctcaagcaatttttggttctgaagatgtaggctctagctcctacgttgctgtggacatattgattgctgtaggtgccatcatcatgattctgggcttcctggcatgctgcggtgctataaaagaaagtcgctgcatgcttctgttgtttttcataggcttgcttctgatcctgctcctgcaggtggcgacaggtatcctaggagctgttttcaaatctaagtctgatcgcattgtgaatgaaactctctatgaaaacacaaagcttttgagcgccacaggggaaagtgaaaaacaattccaggaagccataattgtgtttcaagaagagtttaaatgctgcggtttggtcaatggagctgctgattggggaaataattttcaacactatcctgaattatgtgcctgtctagataagcagagaccatgccaaagctataatggaaaacaagtttacaaagagacctgtatttctttcataaaagacttcttggcaaaaaatttgattatagttattggaatatcatttggactggcagttattgagatactgggtttggtgttttctatggtcctgtattgccagatcgggaacaaatgaatctgtggatgcatcaacctatcgtcagtcaaacccctttaaaatgttgctttggctttgtaaatttaaatatgtaagtgctatataagtcaggagcagctgtctttttaaaatgtctcggctagctagaccacagatatcttctagacatattgaacacatttaagatttgagggatataagggaaaatgatatgaatgtgtatttttactcaaaataaaagtaactgtttacgttgaaaaaaaaaaaaaaaaaaaaaaaaaaagccgcggccgagttctagacctgcccgggcggccgctcgagccctatagtgag

SEQ ID NO: 12146 - DNA, 1468 bp, Homo sapiens
  misc_feature 1465, 1466, 1467, 1468: n = A,T,C or G
cgcgtccggtcgcgggggcgcgacgttcggttcgctgtgtgtgtcgccggctccttgagggtccatgtgatttttacgccagtgctgctgaactgtgcagggtagggagctggcacagtccgattaattgtccttgggtcgaggtgtctcgtcggaccctttggggctcagtggagaattaaggcagagtcactgtaattatttctaataccaattccaaaatagtgactcttggacaatagtgcaattatatggaattatggctggttataagcctgtagctattcagacatatcctatacttggtgaaaaaatcacccaagatacactgtactggaacaactataagacccctgttcagattaaggaatttggtgcagtttcaaaagtagacttttctcctcagcctccatataattatgctgtcacagcttcctcaagaattcacatttatggccgatactcccaagaacctataaaaaccttttctcgatttaaagacacagcatactgtgctacttttcgacaagatggtagattgcttgtggctggcagtgaagatggtggagttcaactttttgatataagtgggagggctcccctcaggcagtttgaaggccatacaaaagcagttcatacagtagattttacagctgacaaatatcacgtggtctctggggctgatgattatacagttaaattatgggatattccaaactccaaagaaattttgacatttaaagaacactctgattatgtgaggtgtggatgtgctagcaaacttaatccggatctctttataacaggatcatatgatcatactgtgaagatgtttgatgcacgaacgagtgagagtgttctctccgttgagcatgggcagccagtggagagtgtcctacttttcccctctggaggtcttctggtgtcagcaggaggtcgttatgttaaagtctgggacatgttaaaaggaggacaattgctagtatctttgaaaaatcatcacaaaaccgtgacatgtttatgtctaagcagctctggacagaggttactctctggctcactggatcaggaaggtgaaaccgtatacagcaccaaattcctacaagtaatacacaagtttgatttatgcggcttcattttgagtcttgccttggcacatgaaagaatgagaccaataagtttggagggaatgacccaatggaatacatgagttgttaaacacctccggaaatcctgcagcacagaaaggaatcaacgtccccaaaaagaagaaaggcctggatattcggaacctttttttaaaggagaacataccatgaaggcacgggatgaccatttgagttaaaggcacagacagagcacctacaatttgttgaacgggattgacaattggagtcccaaggaccataagagtgtgccatggtgttaaaccgatagggccctaaggtagaaggctgcagcatgnnnn

SEQ ID NO: 12147 - DNA, 464 bp, Homo sapiens
  misc_feature 428, 429, 430, 431, 432, 433, 434, 435, 436, 437, 438, 439,440, 441, 442, 443, 444, 445, 446, 447, 448, 449, 450, 451,452, 453, 454, 455, 456, 457, 458, 459, 460, 461, 462, 463,464: n = A,T,C or G
acagggcaacatcatgggaatgtggagcctgggggcacgcagagtaaccacagaaacaagaagttcaaccaggttcccctccggactgaaggaccctgccttccccaggaccctccggaagcagcggacacagcagatccagcccatggaccaaatctgaccaccgcctgtttttgtgtggcctgagagctaagaacagtttttacatttgtttacagcttgtaaaacaaaacaaaacaaagcataaccagagaagaattcgcaacagagaccatatgcgggctggcaaagcttaaaatactatggggacctttacatcaaagatttgcagataaaacccagaggaaaacataggaaccaaatctttatgaccttggattaagcaaaggtttcatggatatgacacccaaagcataagcaaaatgcannnnnnnnnnnnnnnnnnnnnnnnnnnnnnnnnnnnn

SEQ ID NO: 12148 - DNA, 738 bp, Homo sapiens
acttttttttttttttttttttttttatggaaccaaacccaggatttgagttttgtttaatgactgggctaaaaatcacaatggagaatgaatataaaggaaaaaaaaaacagggatgattttaaaaaatattatcctttccccccatgacttcatgacagggagagttaagcgagctctgttgaaatccatctgttttaagtggctttagtcagggccttttgttttacaaggaaatggcaattacgactggttttgataaggatgctctgacagaatctttttcttcatgggactgcttttcatgatgcagcaccttgcagtatttctctttctttgaaatcactggtattgccctttattaaaatccacttgccttattcttatttaggaattactatgttaccaaagtttcagaatcttccagactgaaagagccatgaatgaactttttgtctgactccaaatgcaccagtttctttattctccttctacactggcctcgttgttgcagcccaaaatggcagctgtatggttcaagtgggtatcctctctcaaatctctgacttcaccttaagaatacagtggaaatccctgagcttccacctactgaacattagcacaaactcccacacacactcacttttgggcctgtctgaggacaggctccttcctctgtctaccgagctctctgctctttcctttgccttcatcatggttacagtttttcccccgcgt

SEQ ID NO: 12149 - DNA, 291 bp, Homo sapiens
gtggcggccgcccgggcaggtacgcgggtggcctacatgggggtgcccgctcatctcatcttaagtgagcagtaattattcaacaaactattgttttgcctggtcattttcccttcggttttgtcattacaaaaattcaaacattctaaacagagatgactatacctcaactttgtaacccctctggagttagaatactaactccctttgacaatcagaatgaaactgttctcagaacagaacctactcagaggagttctcagatatgataaacgaagggtggaagaaggt

SEQ ID NO: 12150 - DNA, 243 bp, Homo sapiens
actttttttttttttttttttttttttttgactaaaaaaagaaagagcttcctcatctagtgggagcatcgctccatcatgctccagatcccgttcctgctcccacacacctagggagttgcacttgttttatgtaagagctgctttctaagcagcctggacgctgaatggctttctcaaaagtgaaaaatgggcactattctgatagtccatctttccatcagttcagctaactttcactgt

SEQ ID NO: 12151 - DNA, 292 bp, Homo sapiens
aggtacagtcagaggagaagacatagcagaagctcaggaaaactatgtttgttatgctcccccatcctagttacagcaatacagcaggcacccatgtttcacagggtcacacagggaagcacaaaccttggtcaggaggccgaggggcagaaactcagggatagcctaggccaggccattattggaatttctgcagggaagttaaggcagagcaggggagcagtttaggactggctagtttgcataatttcagtgggctctaagctgaaagaatgatctccagttacctggt

SEQ ID NO: 12152 - DNA, 839 bp, Homo sapiens
  misc_feature 1, 2, 40: n = A,T,C or G
nnacatgttggaaaaaaggtatgcataaagccaaagaccntcagattcttgccctgaggaaagtccaaccgttgaccttccttgcccaagaatgaatgattaaaaagttgaaaagctgtgtttgtagatcgttcaggccttcgtctgcaactatcaggaaatatgggtaactctcttccaagaaacttccccactcttttgataagcatctcgaaaatgttgttcgaacatcaatggtggtattcttctgaagatgaagaattaaagcagttctcaaagaaagaagttcagggaagttgaaatacgcatactcggcatccttgaagaaaactatggtgaattgtcctcctttgctaataagatccacaagatagcgttcaaccagatagaagaaatggaggttctgcccaggcttaaatgatatctcacagatacatgtgataagtaatgaatccccatcaatcaaaaaaaattcagattcaacaaaatcattgaataaactggaatattcagcttttggcatttcattcaaaattaactgggacatttcctgtgaaaatgttgtaagaacatttctttccattcttgctgctgcctgtgcctccaacctgaactggcaagtattaaaggtagcaaataccctttattttggtacctctaagtggcagttcttaatgaaaatggcagtccgcggactcaggaccggtggtgtccaaagacccgcgagctgtgcgccccgcggggagggagtgaaacagagacctagcgcagagcccaggtggaagttccaggttaccccagacctggcctaggactcggccccccgcgtacctgcccgg

SEQ ID NO: 12153 - DNA, 524 bp, Homo sapiens
  misc_feature 523, 524: n = A,T,C or G
acgcgggggggtggatatccaaattcagaataatatgtcctatgagaatggcagctgtaatacatatgaattacagctctttgtcattaaaataacctgacagctttctcttacagcatggtaacagcaatacacttaatatgaagtttgaggatttcagggcacctagagttatcaagatcaatgagagaaaaccataaagtaaatgggacttcttgtgtgttttgtaaactggctctgaaggcaacttcaagaaacttgaaaatacagaagcatgaaaatattgttgaagaataatgctgcgcttgtatatccaagaaacttttattttttttttgagaaagactcttgctttttccgcccaggccagagtgcactggggcaatcttggctcactgcaagctccgcctcccgggttcacgccattctcctgcctcagcctccccagtagctgggaatacaggcgcccgccaccacgcccggctaattttttgtatttttagtagagacggggttttaccann

SEQ ID NO: 12154 - DNA, 445 bp, Homo sapiens
aggtactataagcccaggtgcacgaattcagctttaaacatctattttagtggtaactgatcaatcttggtgagctctaaaatactgcaattgcctcaacattacccttttatggacagttccaaattaacttatttttctatgggaataccactttgcttagatatcagaaaaagcttctgattcaacactctaccttctgcatcctgttgaacaccatatacatcagtttgagtattaccgactgctgtaacaaacaagaccctcaatttcagggagtttacaaattagaaattaaatttgcgaaagtaaaatgtggatgttgccggacagctggtagatatgctccacatagtgattcagtggcaatatcaccttccttcttgtagttttgacattgctttgagtctcagaactttctgtgacagccattattcacccgcgt

SEQ ID NO: 12155 - DNA, 863 bp, Homo sapiens
  misc_feature 861, 862, 863: n = A,T,C or G
acgcggggttccaacagaacacagtttgaatcagtggaatcaggaaagtagttctccactctcaaatgcttgttctgacctagtcactgtgataccatcactgccatcatattgttcttcagagtgccaaactttcgcaaaaataaatcattcaaatggcactcaagcagttgcccggcaagatgcgacattatattgcacccaaagaagtcctgtttgtgaagaaagttatccgtctgtgactctaagaactgctgaagaagaatcagttcccttatggaaaagaggtcctaatgtcctgcatcaaaataagagggctacagggtctactgttatgagaagaaaacgaattgctgaaactaagcggagaaatattttagagcagaaaagacaaaaccctggatctgtaggacagaagtacagtgagcaaattaataattttggacaaagtgtcctgctaagttcaagtgagccaaaacaaactacaaggggtacttcttatattgaagaagtttcagatagtacttctgagtttttgatggctgaaaacttagtgaaagcatcagtgccggaggatgagattctgactgtcttgaatagcaaacagatacagaaatcaaatctacctttaaataaaactcaacaattcaacatctgcacactgtcagctgaagaacagaagatcctagagtcccttaatgatctcaatgaaagactacattatatacaagaatccatttgcaaaaacccatccatcaaaaatactttacaaataataccacttctggagaagagatgaagaagctctttttttcttgttttaggaaacttctgattttatgtacacatcagcaccaggannn

SEQ ID NO: 12156 - DNA, 542 bp, Homo sapiens
  misc_feature 542: n = A,T,C or G
acgcgggaagcgtggtttctgcccgcgaaggcctacagcctcataaggcttccacagttcaaagaagtcccttatgtattgtggattaggagaaatacatacatgacagaaaatgctaactccaataacattttctcattctttcatccaaaaaacaatcctctatgatgttgaaggagttgtaatagaaacaaaagtatatttaagaataactagaccaattccaggtaatatatgtatctatttcactctgaaagtcacatgactccgcactcaagtgtggaccatgcacagtaacttccttttaaaagctacagcatatgttaaagaaaaaaaattcttgacacttgttaaagaacaggaaagcagactttatataggaccattgcagtaggtatagaaaccacagcaatggggttttgcaatgaaggttgagctcaactcctaatacaagaaggaaaaaaagtggggatttatagctaaggatctatcccttgactccttgagggtgagggaatcacaggatgagaaattactaacan

SEQ ID NO: 12157 - DNA, 543 bp, Homo sapiens
  misc_feature 1, 506, 517, 541, 542, 543: n = A,T,C or G
nggccggccgctcgggcaggtactccatagaccatgaagcaaagataaaattcatctatacacagactgaactttgtcttcattaacactctaggctaagggtcatagctaatcagctacaactgtaatgtcctgataattgtgaattaactgcagggcacccagcaaaaggtttagttataatctaatagctgtctgtagagattagcctaataaagggattttttaaaaaagaatctggccgggcatggtggctcaatcctgtaatcccagcactttgggaggccgaggtgggtggatcacctgagatcgggagtccaagaccagcctggccaacatggtgaaaccccatgtctactaaaaatacaaaaattatccaggcgttttggtgagcacccacaatcccagctacttgtgaggctgaggcaggaggatcacttaagcctaagaggcagaggttgcagtgagccgagatcatgccactggactccaggctccgtcttttnaaaaaaaattnaaaggaatctatcaatcaaccacnnn

SEQ ID NO: 12158 - DNA, 500 bp, Homo sapiens
  misc_feature 500: n = A,T,C or G
tcacgggacgaggtcaggaaagatatgaaaatcaaatattttaatgattgctttaaaaacatctcttttatcccacggctacaggactacatagataaaaatcagacaaaaagtctgattcttcaggttgataaataattacaaagttgaattcacaaccactgcatgttcttttaatgaaattgctagagcattgatccagaaagagtagtatccttagaatgggaatggggacagctaggtgaatccagatgtgattgtatcgtgaatccccaaaccaattgagcccttttttatcccagcagaagcaaactcattttcctttttaataagactgtcctctttgcatgcatagcctgtaatgacctcagctgagacagttacattgcaaagggttgctaattttctccatgcccttcatttgccaactctcattgcctctagacctctaattagattcatatcctagcatgttcaatggggacaagcacaaagccagn

SEQ ID NO: 12159 - DNA, 461 bp, Homo sapiens
  misc_feature 461: n = A,T,C or G
acccattctctcacacccactacccacagaaatccagcctcacttagaatcctggaattacataagtttctggttggaaagggatttacataaatcccatagctcttcccattctgggtctgtgatcttgaatgaagctattaaaaaaaaaaaaaaaagcgggcaggtccaaccaggaggtccaagctcagtcccacccaggcctggtgttccccgcatgcacaattggcttcccaggttctagcagtgctctgcccaacacagcaaatgcacttagggaaggctccaggcagcctttaatctatttcacaattcactttctgtgtaggctgttctggatgggaccaggaaacagccccaaggtcaggaataaggacacaacccccctcagatccgaggggctggcacaactctatggcttcatggctttatgtcaatgaaaaatttattcatagaaaacn

SEQ ID NO: 12160 - DNA, 515 bp, Homo sapiens
  misc_feature 506, 507, 508, 509, 510, 511, 512, 513, 514, 515: n = A,T,C or G
acgcgggtgcattttaagaatacattatccgcaacaggctggttcagttaacattttaaaagtgcaattccaggcttacagaatgttaaagtggatggagtcttatatcagctggtctcatggttttcagattgctcggagactccaaagctgttccaaggaggtgactcaatattaatatttttacatggctgggcatggtggctcacgcctgtaatcccagcactttgggaggccgaggagggtggatcacctgaagtcaggagttcgagactagcctggccaacatggtgaaaccccgtctctcctaaaaatacaaaaattagctgggtatggtggggggccgcctgtaatttcagctacttgggaggctgaggcaggagaatcacttaaacccaggaggaggaggttgcagtgagccaagattgcaccattgcactccagcctgggcaacaagagggaaactccgcctaaaaaaaaaaaaaaaaaaaaaaagtacctgcccnnnnnnnnnn

SEQ ID NO: 12161 - DNA, 542 bp, Homo sapiens
  misc_feature 1, 539, 540, 541, 542: n = A,T,C or G
nccaccgcggtggccggccgcccgggcaggtactctttttttttttttttgtcggggcggaaaggttagattagctttaaattttaatgcaaggcttcagagctttcacagcccaggtcctttcctatttgttaactgttggagtggtgtctctaacatttttataaactgcagcaaggacggaccttctgctgaacctcaacgacttccttaatggcttccatcctcccaccattaccatggaagtcactattttctacaccaactcatcagctcttccctggaaattctggaacacaaagaaaatagtctctctctggacacctgggtcataatatgaaaaacatggggctggcagccatgttgtgccacctggaccaaacagcagagactgctggtccatgacagaaaaggattaactcacaaacactgagggagtggattgctggaaaagaggcggaagacaaaagagagaaagaaagagtgtcctcctggccccatccatgcagcatcctagcccaatccctggctcctaaccnnnn

SEQ ID NO: 12162 - DNA, 292 bp, Homo sapiens
acctacctctggggtttgttaaaaaaaatcagaaacttgtaaaactcttagaatagttcctgacacatagtatgcactcaataaatgttagatgtttttgttattattattgtgacacaggagggaatgatgaagggagaagggatactcttgagttgaccaaagaatgttactttagggaataagagttacagtttggctttgccatctccacccaattttcaggcagccccagaaatctctttttctccaaatgcatcttgtgcatgtctgttttatgtgttctctctgt

SEQ ID NO: 12163 - DNA, 282 bp, Homo sapiens
  misc_feature 277, 278, 279, 280, 281, 282: n = A,T,C or G
acctgcttgtcgattctctgtaacagggctgtctgttcagcatggaaattattgataaaataaaaatggctattagattgcgacgtgatccataatcacaaacaatggtggacattcctctcttagatcctcggccatgcatcaagtcgtttcttttttcccctggccgtaatttatattgcgctgacacttgggctcattaggtttatcctttctgctcagaggcacgagcggtgaggaccagcaagaagttcgggaggaagagaggagagatgannnnnn

SEQ ID NO: 12164 - DNA, 623 bp, Homo sapiens
  misc_feature 623: n = A,T,C or G
acagatttctttcatgttaacatcttatgtatccacaatatatttaccaaaactaagaaattaacattgatataacattactaactgaactgaagtctttatttggatttctccagttttttcacgaatgcccaattctgttccaggaccccagccaggatactgtgatgttctcagtcaccatgactcctaagagccttctcttcagtggtgcatttcacagggttctaaaacacactttcaaaccagcagaaggaaagggaaaaaagttaacaaaacatatggtaaataggatatataaaataagatacaaataagtcctaaagtaacagtatgaataataactataaataaaatgtcagtagctaaataaaaaggcagaaaatatctaggcagaaactcttagtcttgatactgagaactgtgaggaatatacttaaaaggatagagaaagactgaaaagaaacagacagataaatgatatagcaggtaaatatgaaccaagaaagagtagtgatattaacagctaaaaaatataattgaaggtaaaaccatcatattatcaaagagagatatagcatatgataaaatgcacaaacacacacacacgcacacacatgcan

SEQ ID NO: 12165 - DNA, 566 bp, Homo sapiens
  misc_feature 565, 566: n = A,T,C or G
accttctgttttacagaaagcctttgggaacttgagtcaaagcattactacttgggattttatctaaggaaggtaaatgaagatttgaggggagacagttagttcaatatgaaagaggaattggcttaaaacacaattttactatggaaaatttcagacataaacaagagtagagaaacagtatagtgaatccccttctacacatctcccagctttcacagttaccaactcatgaccaatcttattttctcttccctagcaatgctgtccaccttctccctcagattattttgaagcaaatctcagaggttgtattaattcatgtttcaatatctgtgtatatctctaatagatttttaaaaagaaaacctaacctcagtggcatttttacacctaaaatatgttaacaattccttagtatccttaaaaacttagacagtgttcaaatttccctgatcgacctcatgatttttttttcgtttgtttgttcaaaattaagatccaaataaaggtccaaaagccgggcatggtggcttacacctgtaatctcagtgttctgggaaann

SEQ ID NO: 12166 - DNA, 499 bp, Homo sapiens
  misc_feature 499: n = A,T,C or G
actttttttttttttttttttttttttttttgagtagagacggggtttttccacattggtcaggctggtctcgaactcccgacctcaggtgatcttcccgcctcagcctcccaaagtgctgggattacaggcgtgagccactgctcccggccactgctaaccttaatacaatgcaatatgtgctatgatcattgacaaataaatggttaagtgaacgcggaggatggagaaatcatttcaatgaaagggggagatctgtaaggttttacagaggaagcagaatttaagctgggccttgcaaagcaaagatgggactataggcatctggacagaggtaacggtgagagcaaatgcctatgtgctttcaagtatggtcagggcacagaattcaggacccatggacaggggcacaggatgcccaaggaaaagaaaacacagtgagacgagaagctggaaagaaactcaaagtggaaagccctggatgccaacctttcatccn

SEQ ID NO: 12167 - DNA, 758 bp, Homo sapiens
  misc_feature 1, 2, 3, 4, 758: n = A,T,C or G
nnnngcacattctatacatgtaacaacatattgcatgtgctttataaatatgtaaaatattatgtaaatcgattttaaatcttcttttagcaatttcaaaatatacagtgcattttagtttattatactcatcattttttgcactagatcaatctcatgcctcctgtgtatctgaaacttgggtactttctgatcaacaccttccctttctccatccacattgctgccccagcctaagacacattttcactcatattaggtgacatttaaattatagaaactaatggttttagtatacaacaagcaaataaacatcattaacgttaaatacatttattagaaagtttgactaattagggatagaaataaatgggcagcatttttggccagaaaacaaaagataatgattattttcaattaccagacccaaggatttgaaatggaaaggtttaggcctaaaatacgttattgaatttatgacagcagaaattcagatcatattttctgatcattgtaagtaatataaattattgactaatatgtaaccaacaaataatatctagctacattcaaattttattaaggtttttaaaaattaacttctgggttaaatggaagattcaaactgagattgcatttatggattgagggaaatgttaatgaggaagtatatgatgaaagccaaaacctaaattcaaaataagtaattttgccaatattaagttacttctatagaaaaacagggaagtattatcacn

SEQ ID NO: 12168 - DNA, 866 bp, Homo sapiens
  misc_feature 1, 2, 3, 4, 5, 6, 866: n = A,T,C or G
nnnnnnggcttgatcttggctcactgcgatctgtgcctcgcaagaaaaaacaattctcctgcctcagcctctggagtggctgggattacaggcgcccaccatcacgcccggccaattttttgtatttttagtagagacagggtttcaccatgttggccaggctggcctcgaactcttgacctcaggtgatccacctgccttggcctcccaaagtgctgggattaccgacgtaagccaccgagaccggccacaaaagagtcttttatggagaaatagagaatggaataaagcccgaaaaattcaatttactgctcataaatggccatgcttcttcttaacatggtccccttactgcaaaggctatatatctaaaaatgagagaaaagcaatcacactgttgcttatgagcaatctacatgaaatacaaaaattccccttctgaaaaattataacaatttgttattgaagatgggtatgtaaaatttcccacctgtgtaactttttttatacaagccaaacctaacaggaatctctaattatcataccatgaggatggcttaacaagggtgttgccagcccacaaatgcaatttgattctcagcatgaaggcaagactggcaatttacaaactccagcaacaagtaactatgaatattaagatcttaatttacacaatggagaactcattgctcttagaataaaaaaaggaacattttgaggatcctgttgctggatgtggagtaaaaaaaattatggtaatgattctgacaattgttgaagcacatacatacctgaatatcagggtactttttagaattattctgctcacaatggggaaatattttacttaaataagcagcctgaan

SEQ ID NO: 12169 - DNA, 605 bp, Homo sapiens
  misc_feature 605: n = A,T,C or G
acgcgggggcccagctcagttcctcattttataagtaatgtttaagagcaatgacccactcctactttcagcaaagaggtgcacatagcatagacccatataagaggaaggatctgagaaggagttagaaaaaagtgttggagaggctgcgagaaaacaaggcaggtgtcctggctgagggcaggaaggagacattgcgatggaaattgtgccccattttcttggaggattgggaagaggacctgtggactgggcggcccacacaactgctgtaacctcaggcagttttcaagcagattgaccttcctgctggaacacggcacatgaggtgaagttctcctctacccagggttgcttggccttgcctccaccatgcctgacactggcgctctgctgggaggaaaaagcttgctctgttgctggctgtgtggaacagagagggaagtggcagacagtctgggcccagcacttgggtatcgtgctctagccaatgcgactcaatctctccagttcagacctgcccctggaaaaaaaagaacccagaccctcatcatgaatgctttcctaaggagaaaaatgaacagctggacaatgctcctggtcan

SEQ ID NO: 12170 - DNA, 410 bp, Homo sapiens
  misc_feature 409, 410: n = A,T,C or G
actaatatgtgttcctctgagggctgctgagtatagaactgaactggcagaagggctatttttttttttcagtctgatatgccgaaagcaggaatcctctaatctggtaacttttgttggattggaacactagaatctgaatttatacagtggccacatgaagggaaaggacatgaaaatgtgaaaaactctggtagaagaaatgactcatttcttcattgctgatccaggcattgaatttgactatccactggaggccaagtgctgcctgggtttggttttaaagatacagagggttaggataggtgctttggcaatggtgatgggaatccaatatgaaaagaaaaagaggtacagggaaactgcgaatggctcattaaatcagttatggttcctttgggcgctcgcnn

SEQ ID NO: 12171 - DNA, 589 bp, Homo sapiens
  misc_feature 1, 2, 3: n = A,T,C or G
nnnagagcccaggcttttaagacagtgctgccttactcagcccaatccttaatgccactgatacaaaaggctgcaccttccgcttctattaccacatgtttggaaagcgcatttataggttggcaatctaccaacgaatctggagtgactcaaggggacagctgctgtggcagatatttgggaatcaaggcaacagatggattaggaaacacctcaacatttccagcaggcagccctttcagatattggtggaggcttcagtgggagatggcttcactgcagatattgcgattgatgatctgtcatttatggactgcaccctctaccctggtaatttgccagcagacctcccaactccaccagaaacgtcagttcctgtaacattacctccacacaactgcacagacaatgaatttatctgcaggtctgatggtcactgcattgaaaaaatgcagaaatgtgattttaaatatgactgccctgacaaatcagatgaagcatcctgtgttatggaagtttgcagctttgagaaaagaagcctgtgtaaatggtatcaaccaatcccagtacctcggccgccaccgcggtg

SEQ ID NO: 12172 - DNA, 405 bp, Homo sapiens
  misc_feature 398, 399, 400, 401, 402, 403, 404, 405: n = A,T,C or G
tccaccgcggtggcggccgaggtacgggttttcatgccgaattagccatcaagacatggttatcctggctgttttatgggaatgccctacctctctccttgccctgcttatcaaattagctcagggtggctaggttttacaaccatctgcagtaggcatggttggtagctacaggtggactttgcttagaaatcggaagctacgacgatttcaccctcacagtcttttttgttggtttgcttgatgattaagacatagtttggaaattccctgtcttccccttctctgcctcctagatgactaatttgagcagtgtttattgcagctgtattgtgttgggtggctatgttctgctattgaaaaaagtccacccagcctgaaatgctgtctcatgtagnnnnnnnn

SEQ ID NO: 12173 - DNA, 397 bp, Homo sapiens
actggatttccttcgattggcccccagatccattctttcccctcctctgctcagctctgtgctgacatgtgtgaatcaccggtcctttttaaatagaagactttgagtttgttttgtcaatgggagaatggaatccttagatcagcacacagaaggcgagagaactctggatatttcctcctctcctcctttatgtttcagtgacacttttctggcagtgtctgtatcccttcccactgggtgacccctcctctaggactctggctatcactggcaaccctaaaataatatttcctccccatcttcttaagctcaaggactggtagcagttcctgtctattacttgcctatcatcattatcccttgtttctttcacagtgcctgcacctttgtaact

SEQ ID NO: 12174 - DNA, 545 bp, Homo sapiens
  misc_feature 538, 539, 540, 541, 542, 543, 544, 545: n = A,T,C or G
tccaccgcggtggcggccgagtacatgcctgtaatcctcagcctctcgtgtagctggaataacaagccggccgccaccatgcttagcttatttttatatttttaatagagacggggtttcaccatgtgggccaggctgatcttgaactcctgaccttagatgatctgtctgcctcggcctcccaaagtgctgggattacaggcttgaaccaccaagcccggcctgacatttttcttttaaatcttttatcaaaccagctttcatttcttgtcagatgtcacttttcagcaacctgttgctatattctctgttaggagaacttttttttttctggccagactgagagaaaggaatgaaaggatggaagaattacaagatcaggcactgctgtctgtctgttccacggatgtaaccacagcacaacgcgtggctcacggtacctgcccgggcggccgaggtacttgagagtgaggaggccacctcccctgcattggtcctgttctggctgagtattcagcacagatcttggtcgtcgggnnnnnnnn

SEQ ID NO: 12175 - DNA, 278 bp, Homo sapiens
acgcgggtatggttctgtgaatttggacaaacacgcagctaggcagtcatcaccacagtcaagattctgtcgccttcaacaatcctgtcctttgaagtcagcccactgctcacatcactgagctcttccccattcccgtagttcagccatttctatggtgtcattagtggaatcatgcagattgtagcctttgagtctggtttctttcacctaatgcgttggagatccatccaggaccttgtatgtgtcaatagttccttcctttttattgctgaggt

SEQ ID NO: 12176 - DNA, 2154 bp, Homo sapiens
  misc_feature 1, 2, 2153, 2154: n = A,T,C or G
nnacccactgggttgccaagctcgcgccggatgcggagcgcggtgctgccggtggagcttcaggtcttgatagactttctgtaaagaaggaatgatttggtgatggagtgttcccactgaccgatggactcaaagaagagaagctcaacagaggcagaaggatccaaggaaagaggcctggtccatatctggcaggcaggatcctttcccataacaccagagagattgccaggctggggaggaaagactgttttgcaggcagccctcggagtgaaacatggagttcttctgactgaagatggtgaggtctacagctttgggactcttccctggagaagtggaccagtggagatttgtccaagtagccccattctagaaaatgccctggttgggcaatatgttattactgtggcaacaggaagcttccatagtggagcagtgacagacaatggtgtcgcgtacatgtggggagagaattctgctggccagtgtgcagtagccaaccagcagtatgtgccggaaccaaatcctgtcagcattgctgattctgaggccagccctttgttagcagtcaggattttacagttggcgtgtggcgaggagcacactctggcattgtcaataagcagagagatttgggcatggggtaccggttgtcagttgggtctcattaccactgccttcccagtgacaaagccgcaaaaggtagaacatcttgctgggcgagtggtgcttcaagttgcctgtggtgctttccacagcttagcccttgtacaatgcctcccttcccaggatctgaagccagtcccagaacgatgcaaccagtgcagccagctcttgattactatgactgacaaagaagaccatgtgattatatcagacagtcattgttgcccattaggtgtgacactgacagaatctcaggcagaaaaccatgccagcactgctctcagcccctccactgaaacccttgacaggcaggaagaagtatttgagaacactcttgtagcaaatgatcagtctgttgctactgaactgaatgcagtaagtgctcagatcacaagcagcgatgccatgtcctctcaacaaaatgtcatgggaacaactgaaatttcctctgccagaaacataccatcataccctgacacccaagcagtcaatgaatacctacggaaactgtcagatcattcagtaagagaggactcagagcatggtgaaaagccaatgccatctcaggtacctgctcaattttataaaataaaagtgtgtctagagttgaactgtatgggcttttctttagaaactttaaaatgagtaaggcttggtagcattttttattttttgagtttgattataattttgttttatcaggcaagcctagataaaggaaagaacctggattaattcaaaatcactctttatgtttgttctggccctttatgatattgaaaggtgtcatgttgggcttgttttataagtaggagcatttcatttttttttcttgctagtactttttttctatggctaaagtactgaattttggtgggccctgaatagtttaatataactagagattcacaaagattcttcttacttgtgtttgtaacactcttcagaattctgtagagaaaagtcttttccttctttaacagggaagattgttttgtggcagatccttcaattgtaggcagatttaaaacttacaggcaattacatgtttcagtttttttcaattatagctgtggtccttactgggcttaatttgaagaggtggctaatattttatctttttgtttgtttgtttttgagatggggtcttgctctgtcacccaggctggagtgcagtaatgcgattgtggctcactgcagcctcgatctcccaggttcaagcgatcctcccatttcagccttccaagtagctgggactatacacatgccaccacacctgctgattttatttttaagtagagtagagcctgttgcccaggctcatctcaaactcctgagctcaagcaatcctcccacctcagcctcccaaagtgttgagattacaggcatgagccatcatgcccagcctattttatatatcttattaaaactattttcattttgaagatttgtggtagaatgaacaaaagtgttttcagtagcann

SEQ ID NO: 12177 - DNA, 302 bp, Homo sapiens
  misc_feature 302: n = A,T,C or G
acttacagatattgacccattcctgtaaaattcttgcagtcagagtttctacagacctgaatattaggaaaatgcaggtttagtcctaaaaaggataccgtgatgcagccattgatgtagcagtgactggctcccctaggctcaaacaatgcattgacctttagagggcagccaagtggagctcacgcaggttaattccagtgcatggccttgttagatcacatcatatcccctgcctagtgccagacacttaatgcaggaatagtatggtttcaggagcccctctctgtccaaaatttggn

SEQ ID NO: 12178 - DNA, 2397 bp, Homo sapiens
  misc_feature 2167: n = A,T,C or G
ctatagggagtcgacccacgcgtccgcggacgcgtccgctcagaggaaggggcggttggtgcggcctccattgttcgtgttttaaggcgccatgaggggtgacagaggccgtggtcgtggtgggcgctttggttccagaggaggcccaggaggagggttcaggccctttgtaccacatatcccatttgacttctatttgttgtttacttctatttgtgtgaaatggcctttccccgggtcaagccagcacctgatgaaacttccttcagtgaggccttgctgaagaggaatcaggacctggctcccaattctgctgaacaggcatctatcctttctctggtgacaaaaataaacaatgtgattgataatctgattgtggctccagggacatttgaagtgcaaattgaagaagttcgacaggtgggatcctataaaaaggggacaatgactacaggacacaatgtggctgacctggtggtgatactcaagattctgccaacgttggaagctgttgctgccctggggaacaaagtcgtggaaagcctaagagcacaggatccttctgaagttttaaccatgctgaccaacgaaactggctttgaaatcagttcttctgatgctacagtgaagattctcattacaacagtgccacccaatcttcgaaaactggatccagaactccatttggatatcaaagtattgcagagtgccttagcagccatccgacatgccccgctgggttcgaggaaaatgcttctcagtccacagttaaagttctcatcagactactgaaggacttgaggattcgttttcctgggctttgagccccctcacaccctgggatccttgacctactagggccattatgcttgtgatgaacaaccccaccagacaggcctttgggccctaaacgttggcatacagggcgctgcttgcagattctggctggcaggactgttcctgccaggttcagtgggtatcactgacccctgtgagagtggcaactttagagtacacacagtcatgaccctagaacagcaggacatggtctgctatacagctcagactctcgtccgaatcctctcacatggtggctttaggaagatccttggccaggagggtgatgccagctatcttgcttctgaaatatctacctgggatggagtgatagtaacaccttcagaaaaggcttatgagaagccaccagagaagaaggaaggagaggaagaagaggagaatacagaagaaccacctcaaggagaggaagaagaaagcatggaaactcaggagtgacattcccttcactccttttcctacccaagggggaagactggagcctaagctgcctgctactgggctttacatggtgacagacatttccgtgggatagggaagatagcaggaagaaaagtaaactccatagaagtgtcattccactgggttttgatattggcttagctgccagtctcccatttgtgacctatgccatccatctataatggaggataccaacatttcttcctaatattctataatctccaactcctgaaaacccctctctcaactaatactttgctgttgaaatgttgtgaaatgttaagtgtctggaaatttttttttctaagaaaaactattaaagtacttcctagtagggctaaaaaaaaaaaaaaaaaaaaaaaaaaaaaaaaaacaaaaaaaaaaaaaaaaaaaaaaaaaaaaaaaaaaaaaaaaaaggggggggggggcgccataaaaaaacaaaccaccggaggggggggcgacccaaaatagacagggcaacccccagattttttgtgtgtaaaaaaaagcgcggccccccaaatagagggaacatctaaaataaaagaaagcagcgaggcggcggggcggcgtatacaacaccacgcgggcgggcggggagaagacacggcacttccggcgactttgcgggggaaggaaacccccatctgggcggggggggagacaaagggggggaagcacaccccagaagaaaataagcagccgcgaggcaacatacaacagggcgtgggcggcggtgggcacacccccccgcgctatatgtcgcgggggtcaggaaaaaaatcgggcgcgaggtgtgtgccttcgtgcaacatcactcacgcgccggtcgctctttacataaccnagcatgcgtgaaagactgaaccactgcaactaaactcgaactagagtcgtcgaagcgaacgatgaacagaggccagagcagaagacgcagatcacacaggtcaaacctcgcaaaatacaaaggagaagaaacccgaccaaggacagaggacagctacacacgatagaagaacatacggcgaaaacaaagaccaccaacagcgaacgagcagcagagcatgaacagaagac

SEQ ID NO: 12179 - DNA, 3313 bp, Homo sapiens
  misc_feature 3297, 3310, 3311, 3312, 3313: n = A,T,C or G
ttgcggccgcaggaattttttttttttttttttttttgtttttaacattgaaatgtatttttattgatcgataagttatgtaacattagtatgatacaaagcaagtttgatatgacaatggcaaacacataattataatattgtttattttccttagatgttatatttaacatatttacataaaagaccaagatgtaggcaaaagcttcagtaatttgacttcattgagtgctttcagtaaacaataggtttctccagcaaacatcttattgccttaattgaacctccttgaaaaagaaaaccacacactttgtaatgtaaatgttaattgtagtagacaatggttctaggtaaatagcacccctggacatgaagtaaatgaaaggaatacaggcacttaacaatgaaaggttgtttgcacaaacagtgcttcaaatgtaaataaacaagggtcttctcaacggtcactacagtagtaaaactctggcacgtgtacagcagccaaattgagaatttatgtataaagtctctcagactttctaactgaaactaacagtggtttaacaggcttctccagtctgaagtcatataaggaattgaagctacaaaggaaattgtactacttttaaagaaaaattgtatatttgggattgtcaataatctaggccacgtggaagataacaggctattttggatattttctaattgcaatggttatatttctgtgtaaatgcctatacaaatgtttgcttggtgacatatggaaaacttaaggacttttatgaaaaggcgacaatggggacctccaaagcgccaaagtttctgctaggcatagtgttatttttagattacattaaaatggctatttagacccatctagctgagactattccaaaacaaactttttatcatattgttatcataatcaactttctacaggctaatgactttatagttttacttctagtgtatatctactagcacaattagaccaagttcctagatgtatcatgttaagaggtaaaaagcctcatgaaattataataacgactgttatatagagatatgtattttatctctatacacatttgcccacccaaaacaaaagcaaaaatgtggtcacaaggccataatctcatggactgagattttgacattaggggcaggcagtcatgggactttcttggaattgctttctactagcttgccttgaattctgaaaatctcaaacaacgaagaaagccaaacttaattatggccagattaaacagtggttaaaaaattaacagaagcagactatgtagcagctacagaccagttggtgctgccatttgggaagctgcagatggctgtgggtgggaaatgcctttactttcttaagcgatggagatgagtatggtgtgtgcacttgatgtttttttcatacccccaccccccaacagggctgtctgtcataggctgcccggccccgctttatcacttgcccccgagcgtgggaatcggagcgtcctgccgttcacatctcctgcattccgtttagcggaatcaattaggcaagacagaccctcagattccccaccccctttccatttttgtcaggtctatatacgtcctaattatttcagtttgggatgccagagctgtttcctggatagacctgatcatccttaaacaaaaagagaggaggcgcacacgtgggttgtggcgtaaatgtcactttcatttccaatgctaggcgcagagtaagacagaacatttttttaacactttgacaagaggggaggcgatctcgtctccatcatgtctttctgcttcagtagcttcctcaaggaaaccctcttggaacagagaagcatctgtccttgtattttgaatagaagaataaaaatcagcccttgctttttttttttttttttttcattttgcctgctagctctaagtcctcagtagatacaaattattaaccttccagtataaacttttctgaaagtctaatttcgtacaaattgacatacagcccaaatacatgtaaagtaatttccaagcacaatcttcaaattttgagagggaggtgcctcccaaaggaactgcccaagtctacatattatggaatcatttttaaactaggtaccagacatctctgcaacacctttctaagaaaaaaatccctgatataacttttgccttaaaatagaacaaactgcacatgcatctttactcattatcactatacacttctcctttgcagctgcaacaacccctctcaagacatatctggaaccttgatattttagcatgtgtgtgtcatttaattttctctcatcccacctttaatcataaggaaaaaaacaaaacaaaaacaaagttagattcaataagtattcctgacctttctggtttttactgtctctcggctgtagtctttcattctcacacgctccccggcgatcttgaaggagtttttactttcggttatctagctttatgaagaccaatacactcatacagctagataaccaaagataacaactcgcttcccacacaggcctctgtcttcctcttgccagactccaggtcctgatcctttctggcagtaccgaagagtggtcgtccaggatacttgccgcgcttaagattcctccttttatgtaaatatgacctggtttctgtttgtgtgtgtgcgcggctaaaacatccaaacgagatctgttgccttcagagtttattccgaacttttctttttcctttcagcaagtaatctccggcagcgttagccaacaattcatctattaatatcagaaaataaaaccagctattaaggtgcagcaagctgttacgagtgagcagcagcatccgtcccttcacaggcctctatttgcattgtaaattgcttctttctcacgcaagactctttagcctctctctatagagatgtataaagccaacggcaatttccagcgcaggttaaggaggaaggaaaaaaaaatcccattctatagaagtgacagctgattcaaggatctgttcctgatcctttttggttaggcaccatgagctttttaccaagcggtggcagcttgattgcacatatcttgtgtgtatgtgttttagggggaagatcctcgatttcacagggcttctaggctgggaaggagaagatgccgtcttgctggcctgctgctgcccccggtctttggttggttggattgtctattcattttatgcttctttgcagtctcatctcgagcgaggccctggcaaatggtggcccagaagcatcaagtttcctctcccagncgttgtgcctcgnnnn

SEQ ID NO: 12180 - DNA, 391 bp, Homo sapiens
acgcgggggggggtggtggggaagaaaaaaagaaaaagaaaaattaagcattaacacgtaagatacccagaaaagagggcttactcaatcaatcgagaaaacgcacggagtctctgctgtgataggcagcaagctgagggggctgttaagagaacagcaagacaaacagaggacacatctggtgtatcagggagcaggacacacagtctgggtcaatgggtgcacagatgggacatatgcaatgagagacagcatggaaagacaggctgcctgacgggcctgacaggttctgaatgctgggccttaggtggtcggcaggagaaagtcagggcttcacagccaggacacgacacaaagagacaaaactgtataaagaggagggaccagctgt

SEQ ID NO: 12181 - DNA, 16559 bp, Homo sapiens
  misc_feature 1, 2, 3, 4, 16558, 16559: n = A,T,C or G
nnnnacagaaccccagagaaaaacgctgccaattcgttgctttattgttccctgcctggggacctcaatagccttttccattaaccttcccttcttacgcaacggttaatgacttttggggttgttttgctttctgtttctgctgagtcactaaattttgcctctttgtccccaggtgctgctcagcataaaagttaaaagtgcaattcaggaagtactgggattctgtgtagagccgaggaaaccatttccctaagagaagctctgttccttggcttgtccttccttcccgggaaggaagcttccgaggaacgaagggagaagctttgttttgcctgcagaagcagccctgtgctcggctgagggttctcagctggctgtgaactgcggagcattgtaggcgcctggctggctcaggccaatgcagaagtctctcccttctccaaagacccaaatccccacagaaccagcttcgagttactttcccttcaaggggattaaaataattgtgatttgtggcgctctccgttcgcggtggtattttcctgttgtgttaaatgcctcttattaagtaatagatgtgatttatgtgaacgacgaaggggtgtgtggtggattcggtgattaatcagtgaattcccatccgctggcatctctcactgcccctcttgcgtgatgtaagatcagacgtaccctgcattgaaaagtcaagacacacgggcgtctcgctcgcgctcacacacgctctgcctcctctctcccgcacgcgcgcatccctccaccttccacatcctgctccaggcaggagaaggctgactggctggactcattgagctgaagaatttccagtgacatttgtaaatgacgccgctcgattccaggctccaagcggccgctgccgccgccgccgccgccgggccgaaggtgccgccgagcagtctccagcgcaggcttccttaccgggcgaccacaatgtccgagtttctcctcgccttactcactctctcgggattattgccgattgccagggtgctgaccgtgggagccgaccgagatcagcagttgtgtgatcctggtgaatttctttgccacgatcacgtgacttgtgtctcccagagctggctgtgtgatggggaccctgactgccctgatgattcagacgagtctttagatacctgtcccgaggaggtagaaatcaagtgccccttgaatcacattgcttgccttggtaccaacaaatgtgttcatttatcccagctgtgcaatggtgtcttggactgcccagatgggtatgacgaaggagtacattgtcaggaactgttatccaattgccaacagctgaattgtcagtataaatgtacaatggtcagaaatagtacaagatgttactgtgaggatggattcgaaataacagaagatgggagaagctgtaaagatcaagatgaatgtgctgtttatggtacatgcagccagacctgcagaaacacacatggatcctacacttgcagttgtgtggaaggctacctaatgcagccagacaacagatcttgcaaggctaaaattgaacctacagatagaccacctatactattaattgcaaattttgaaacaattgaggttttctatcttaatggaagtaaaatggcaactctaagctcagtcaatggaaatgaaattcatactctggattttatttataatgaagatatgatttgttggattgaatcaagagaatcttcaaatcaactcaaatgtatccagataacaaaagcaggaggattaacagatgaatggacaatcaatattcttcaatccttccacaatgtgcaacaaatggcgattgactggctcactcgaaatctctattttgtggaccatgtcggtgaccggatctttgtttgtaattccaacggttctgtatgtgtcaccctgattgatctggagcttcacaatcctaaagcaatagcagtagatccaatagcaggaaaacttttctttactgactacgggaatgtcgccaaagtggagagatgtgacatggatgggatgaaccgaacaaggataattgattcaaagacagagcagccagctgcactggcactagacctagtcaacaaattggtttactgggtagatctttacttggactatgtgggagtagtggactatcaaggaaaaaatagacacactgtcattcaaggcagacaagtcagacatctttatggtataactgtgtttgaagattatttgtatgcaaccaattctgataactacaatatcgtaaggataaaccgatttaatgggactgatattcactcattaattaaaattgagaatgcttggggaatccgaatttatcaaaaaagaactcaaccaacagtcagaagccatgcatgtgaagtcgatccatatggaatgccagggggctgttcacacatctgtctactcagcagcagttacaaaactcggacttgtcgctgcaggactggcttcaacttgggaagtgatggcaggtcatgcaaaagaccaaagaatgagttgttcctcttttatgggaaaggacgcccaggaattgttagaggaatggacttgaataccaagatagctgatgaatacatgatccccatagaaaatctggtaaaccctcgtgctttagactttcacgcagaaaccaattacatctactttgctgacaccaccagtttcctaattggccggcagaagatagatggcacagagagagaaaccatcctgaaagatgatctggataatgtagagggcattgctgtggactggattggaaataatctttactggaccaatgatggccataggaaaaccattaatgtggccaggctggaaaaagcttctcagagtcggaagactcttttagagggtgaaatgtctcatcccagaggaattgtggtggatccagttaatggttggatgtattggacagactgggaggaagatgaaatagatgacagcgtgggaaggattgagaaggcctggatggatggattcaatcggcagatttttgtgacttcaaagatgctgtggccaaacggtttaactctggactttcacaccaacacattatactggtgtgatgcctattacgatcatattgaaaaagtatttttgaatgggactcacaggaagattgtttacagtgggagagagttgaaccaccctttcggactgtcgcatcatggaaattatgtgttctggactgattatatgaatggttccatttttcaactagatttgataacaagtgaggtgacattgctgaggcatgaaagaccacccctatttgggcttcagatttatgatccacgaaagcaacaaggtgacaatatgtgccgagtaaataatgggggctgtagtacactttgcttggctatcccaggaggccgggtgtgtgcttgtgccgataatcaacttttggatgaaaatgggacaacttgcacatttaatcctggagaagcactacctcacatatgtaaagctggagagtttcgctgcaaaaacagacactgtatccaagctcggtggaaatgtgatggcgacgatgactgcctagacggaagcgatgaggattcagtaaactgcttcaatcatagctgtcctgatgatcagtttaaatgccagaataatcgctgcatccccaagagatggctttgtgatggagctaatgactgtgggagcaatgaagatgaatccaatcaaacttgcacagccagaacatgccaggtagaccagttttcttgcggaaatgggcgttgcattcccagagcatggctgtgtgacagggaagacgactgtggtgaccagacagatgaaatggcatcttgtgaattcccaacttgtgagccactaacccaattcgtatgcaaaagtggaagatgcattagcagcaaatggcactgcgactctgatgacgactgtggggacgggagtgatgaggtgggctgtgttcactcttgctttgataatcagttcagatgttccagtggcagatgcatcccaggccactgggcctgtgatggtgacaatgactgtggggacttcagtgatgaagcccagatcaattgtactaaagaagagattcattctcctgctggttgtaacggaaatgaatttcagtgccaccctgatggtaattgcgttcctgatttgtggcgctgtgatggagaaaaagactgtgaagatggtagtgatgaaaaaggttgcaatggtaccatacgattgtgtgaccacaaaaccaagttttcctgttggagtacagggagatgcatcaacaaagcatgggtgtgtgatggagatattgattgcgaagatcagtcagatgaagatgactgtgacagtttcttgtgtggaccacccaagcatccttgtgctaatgacacctcagtctgcctgcagccagagaaactctgcaatgggaaaaaggattgtcctgatggctctgatgaaggctatctctgtgatgagtgttcgctgaacaatggaggctgtagcaaccactgttctgttgttcctggaagaggaattgtctgttcctgccctgaaggacttcaactcaacaaagacaataaaacatgtgaaattgtggattattgtagcaatcatctaaagtgcagccaagtatgtgagcagcacaagcacacagtcaagtgctcatgttatgaaggttggaagctggatgtagacggtgaaagttgtacaagtgttgatccttttgaagcattcatcatcttttctattcgtcatgagatcagaaggattgatcttcacaaaagagactatagtctacttgttcctggattgagaaacacaatagcacttgattttcacttcaatcaaagtttactttattggacagatgttgtagaagacagaatataccggggaaagctttctgaaagtggaggtgtcagtgccattgaagtggttgtggagcatggcctggctactccagaaggcctgacagtcgactggatagcaggaaacatatactggatagacagcaatctggaccaaatcgaagtggccaaactagatggctccctaagaactacactaatagcaggagccatggaacaccccagggccattgctttggacccaagatatggaattcttttctggacagactgggatgcaaattttcctcgcattgaatctgcctctatgagtggtgctgggagaaaaaccatctataaagacatgaaaactggggcttggcctaatggactaactgtggaccactttgagaaaaggatagtgtggacagacgccaggtcagatgctatttattcagccctctatgatggaacaaacatgatagaaatcatccgaggtcatgaatacctttcccatccctttgctgtgtctctatatgggagtgaagtctactggacagactggaggaccaacacattgtccaaagccaataagtggacagggcagaatgtcagtgtgattcagaaaaccagtgcacagccatttgaccttcagatataccatcccagtcgccagccacaggctcccaatccttgtgcagctaatgatggcaaaggcccctgctctcacatgtgtctaatcaatcacaataggagtgctgcctgtgcgtgcccccacttgatgaagctttcttcagacaagaagacctgctatgaaatgaaaaaatttcttctttatgcaagacgttctgaaatcagaggagtggatattgacaatccatactttaacttcatcacggcatttacagtccctgatattgatgacgttactgtgatagacttcgatgcatctgaggaacgtttatactggacagatattaaaacacaaaccattaaacgagcttttattaacggaactgggttagaaactgttatttcaagagatattcagagtatcagagggctagcagtggattgggtgtcacgtaatttatactggattagctcagaatttgatgaaacgcaaattaatgtggcaaggctagatggctctttgaaaacctcaattatccatggaatcgataagccacagtgtcttgcagctcacccagtcaggggaaaactctactggaccgatggaaacacaattaacatggcaaatatggatggcagtaatagcaagattctgtttcagaatcagaaggagccagttggtctatcgatagactatgtggaaaacaagctttattggatcagttcggggaatggaaccataaatagatgcaacctggatggtggtaatttagaagtaatcgagtcaatgagaagaattaacaaaagctacagccctaaccatcatggataagaaactgtggtgggcagaccaaaacttagcccagctaggaacctgcagcaaaagagacggaagaaaccccaccatcctacggaataagacttctggggtagttcatatgaaagtctatgataaagaagcacagcaaggcagcaattcctgccaactaaacaatggtggatgctctcaactttgtttaccaacatctgaaactacaaggacttgtatgtgtacagtgggatattatctccaaaagaaccgtatgtcatgtcaaggtatagaatcatttcttatgtactctgttcatgaaggaatcaggggaatacctcttgaaccaagtgacaaaatggatgctttgatgcctatatcaggaacttcatttgccgtgggaatagatttccatgcagaaaatgataccatctactggacagacatgggcttcaataaaattagcagagctaaaagagatcagacttggaaagaagatatcattaccaatggcttgggaagagtggaagggatagctgttgactggattgctggtaacatatattggacagatcatggtttcaacttaattgaagttgcaagactcaatggttctttccgttatgtaattatttcccaaggcctggatcaaccaagatctatagctgtgcacccagagaaaggcctcttgttctggactgaatggggacaaatgccctgtattggaaaggctcgcttggatggctcagagaaggttgtccttgtaagcatgggaatagcatggccgaatggcatctccatcgactatgaggaaaataaattgtactggtgtgatgctcgcacagacaagatagagagaatcgaccttgagactggagggaatcgcgagatggtgctgtcaggaagcaatgtggatatgttttcagttgcagtctttggggcttacatctactggtctgacagagcacatgcaaacgggtctgtcagaaggggccacaagaatgatgccacagaaacgataaccatgagaaccggccttggagtcaacctgaaggaggttaaaatatttaaccgagtaagagagaaagggaccaatgtttgtgccagggacaatggtggctgtaagcaactctgtctttatcgaggaaattcccggagaacttgtgcttgtgcccatggatatttggcagaagatggagttacttgcctgaggcatgaaggctatttactgtattcaggaagaacaatattaaaaagtatacatctttctgatgaaaccaatttaaattccccaataaggccatatgagaatccacgttatttcaagaatgtcatagccttggcttttgactataatcaaagaagaaaaggtaccaaccgaatcttttacagtgatgcacactttggaaatatacagcttattaaagacaactgggaagacagacaagtaattgttgaaaatgtgggttctgtggaaggacttgcctatcacagagcctgggatacactgtactggacaagctctaccacctcatccatcaccagacacactgtggaccagactcggcctggagcatttgacagggaagctgtcatcaccatgtcagaagatgaccatccacatgtgctagccttggatgaatgtcaaaatttaatgttttggaccaactggaatgaacaacatccaagtatcatgagatctactctgactgggaaaaatgctcaagtggtggtcagtacagacatactcactccaaatggacttactatcgactaccgtgcagagaagctgtatttctcagatggcagtctaggaaaaattgaaaggtgtgaatacgatggatcccagagacatgtgatagttaaatctgggccagggactttcctcagtttggctgtttatgacaattatatattctggtcggactggggaagaagagctatactgcggtccaacaagtacacaggaggagatacaaaaattcttcgttccgatattccacatcagccaatgggaatcatagctgttgccaatgacaccaatagctgtgaactttctccatgtgcattattgaatggaggctgccatgacttgtgccttttaactcccaatgggagagtgaattgttcctgcagaggggaccgaatattgctagaggacaacagatgtgtgactaaaaattcctcctgcaacgcttattcggagtttgaatgtggaaatggtgagtgcattgactaccagctcacctgtgatggcattcctcactgtaaagataaatcagatgaaaaactgctctactgtgaaaacagaagctgtcgaagaggcttcaagccatgctataatcgccgctgcattcctcatggcaagttatgtgatggagaaaatgactgcggagacaactctgatgaattagattgtaaagtttcaacctgtgccacggttgagttccgctgtgcagatgggacttgtattccaagatcagcacgatgcaaccagaacatagattgtgcagatgcttcagatgaaaagaactgcaataacacagactgcacacatttctataagcttggagtgaaaaccacagggttcataagatgtaattctacctcactgtgtgttctgccaacctggatatgcgacgggtctaatgactgtggagactattcagatgaattaaagtgcccagttcagaacaaacacaaatgtgaagaaaattattttagttgtcctagtggaagatgcattttgaatacctggatatgcgatggtcagaaagattgtgaggatggacgtgatgaattccactgtgattcttcttgctcttggaaccaatttgcttgttccgcacaaaaatgtatttctaagcattggatttgtgatggagaagatgactgtggggatgggttagatgaaagtgacagcatttgtggtgccataacctgtgctgctgacatgttcagctgccagggctctcgtgcctgcgtgccccgacattggctttgtgatggtgaaagggactgtccagatggaagcgatgagctttccacagcaggctgcgctcccaataatacatgtgatgaaaatgctttcatgtgccataataaagtatgcattcccaagcaatttgtttgtgaccatgatgacgactgtggagatggctctgatgagtcaccgcagtgtggataccgacagtgtggtacagaagaatttagttgtgctgatgggcggtgtcttctaaatactcaatggcagtgtgatggagactttgactgtcctgaccattctgatgaagcacctttaaacccaaagtgtaaaagtgcagaacagtcatgcaacagttcattttttatgtgcaaaaatggcaggtgcattcccagtggaggtctttgtgacaataaggatgactgtggcgatggttcagatgagagaaactgccatataaatgaatgtttgagtaagaaagtcagtggatgttctcaagattgtcaagaccttccggtcagttataagtgcaaatgctggcctggattccaactgaaggatgacggcaaaacatgtgtagacattgatgaatgctcttcaggctttccctgtagccagcaatgcatcaatacatacgggacttacaagtgcctctgtacagatgggtatgaaatacaacctgataacccaaatggctgcaaatcgctctcagatgaagaaccttttttaattcttgctgatcatcatgagataaggaaaattagcactgatggctccaactacacacttttaaaacagggattaaacaatgttattgctatagactttgattacagagaagaattcatctattggatcgattctagccgacccaatggcagtcgcataaatagaatgtgtttaaatggaagtgacattaaggtagttcataacacagcggtccccaatgcacttgctgtcgattggattggaaaaaacctctattggtctgacacagaaaaaagaatcattgaagtatccaaactcaatggcttgtaccctactatactcgttagcaaaaggctgaagtttcccagagacttgtctttagatcctcaagctggatatttgtattggattgactgctgcgagtatcctcatattggccgtgttggaatggatggaaccaatcagagtgttgtcatagaaaccaagatttctagacctatggcactaacaatagattatgttaatcgtagactctactgggccgatgaaaatcacattgaatttagcaacatggatggatctcatagacacaaagtccctaatcaagatattccaggggtgattgcactaacattgtttgaagactacatctactggactgatgggaaaaccaagtcactcagccgtgcccataaaacatcgggagcagacagactctcactgatttactcatggcatgccatcacagatatccaggtgtatcattcttatagacaacctgatgtctccaaacatctctgcatgataaataatggtggttgcagtcatttgtgccttttagcccctggaaaaacccacacttgtgcatgtcccactaacttctatctggcagctgataataggacttgcttatccaactgcacagccagccagtttcgttgcaaaactgacaaatgtattccattctggtggaaatgtgacaccgtggatgactgtggtgatggatctgatgaacctgatgactgtcctgaatttagatgtcagccaggccgatttcagtgtgggactggactctgtgctctaccagctttcatctgtgatggagagaatgattgtggagacaattctgatgaactcaactgtgacacacatgtctgcctgtcaggtcaattcaaatgtaccaagaaccagaaatgtatcccagtaaacttaagatgtaatgggcaagatgactgtggtgatgaggaagatgaaagagactgtcctgaaaacagctgttctccagactatttccagtgtaagactacgaagcattgcatttccaagctgtgggtttgtgacgaggatccagactgtgcagatgcatcagacgaggccaactgcgataaaaagacttgtggacctcatgaattccagtgtaaaaacaacaactgtattcccgatcactggcggtgtgatagccaaaatgactgcagtgataattcagatgaagaaaactgtaagccacagacatgtacattgaaagatttcctctgtgccaatggggactgtgtttcttcaaggttttggtgtgatggagattttgactgtgcagatggctctgatgagagaaattgtgagacaagttgttccaaagatcagttccggtgttccaatggtcagtgtataccagcaaaatggaaatgtgatggccatgaagactgcaaatatggggaagatgagaaaagctgtgagccagcttctcctacttgctcatcacgtgaatatatatgtgccagtgatggatgtatttcagcatctttgaaatgtaatggagaatatgattgtgctgatggttcagatgagatggactgtgtgactgaatgtaaggaagatcagtttcggtgcaaaaataaagcccactgtattccaattagatggctgtgtgatggaattcatgactgtgtggatggcagtgatgaagagaactgtgaaagaggaggaaatatatgtagagctgatgagttcctttgcaataattctctctgcaaactacatttctgggtgtgtgatggagaggacgactgtggagacaactctgatgaagcccctgatatgtgtgtcaaatttctttgtccatccacgagacctcacagatgcagaaataacagaatatgcctacagtcggagcaaatgtgcaatgggattgatgaatgcggtgacaattcagatgaagatcactgtggtggtaagctgacatataaagcaaggccttgtaaaaaggatgagtttgcttgtagtaataaaaaatgcatccctatggatctccagtgtgatcgacttgatgactgcggagatggttcagatgagcaaggatgcagaatagctcctactgaatatacctgtgaagataatgtgaatccatgtggagatgatgcatattgtaatcaaataaaaacatctgttttctgtcgctgtaagcctggatttcagagaaacatgaaaaacagacaatgtgaagaccttaatgaatgtttggtgtttggcacatgttcccatcaatgtataaatgtggaaggatcatataaatgtgtgtgtgaccagaattttcaagaaagaaataacacctgcatagcagaaggctctgaagatcaagttctctacattgctaatgacactgatatcctgggttttatatatccattcaactacagtggcgatcatcaacaaatttctcatattgaacataattcaagaataacagggatggatgtatattatcaaagagatatgattatttggagtactcagtttaatccaggcggaattttctacaaaaggatccatggcagagaaaaaaggcaagcaaacagtggcttgatttgtcctgaatttaaaaggcccagggacattgcagttgactgggtggctggaaacatttactggactgatcattctagaatgcattggttcagttactacactactcactggaccagtctgaggtactctatcaacgtagggcagctgaatggccccaactgcaccagactcttaacaaatatggctggagaaccctatgctattgcagtaaatcctaaaagagggatgatgtactggactgttgttggggatcattcccatatagaagaagcagccatggatggtacactgagaaggattttagtacaaaagaacttacagagacccacaggtttggctgtggattattttagtgaacgcatatattgggctgactttgagctctccatcattggcagtgttctgtatgatggctctaattcagtagtctctgtcagcagcaaacaaggtttattacatccacataggatcgatatctttgaagattatatatatggagcaggacctaaaaatggtgtatttcgagttcaaaaatttggccatggttcagtagagtacttagctttaaatattgataaaacaaaaggtgttttgatatctcatcgttataaacaactagatttacccaatccatgcttggatttagcatgcgaatttctttgcttgctaaatccttctggggccacttgtgtgtgtccagaaggaaaatatttgattaatggcacctgcaatgatgacagcctgttagatgattcatgtaagttaacttgtgaaaatggaggaagatgcattttaaatgagaaaggtgatttgaggtgtcactgttggcccagttattcaggagaaagatgtgaagtcaaccactgtagcaactactgccagaatggaggaacttgcgtaccatcagttctagggagacccacctgcagctgtgcactgggtttcactgggccaaactgtggtaagacagtctgtgaggatttttgtcaaaatggaggaacctgcattgtgactgctggaaaccagccttactgccactgccagccggaatacaccggagacagatgtcagtactacgtgtgccaccactattgtgtgaattctgaatcatgtaccattggggatgatggaagtgttgaatgtgtctgtccaacgcgctatgaaggaccaaaatgtgaggttgacaagtgtgtaaggtgccatggggggcactgcattataaataaagacagtgaagatatattttgcaactgcactaatggaaagattgcctctagctgtcagttatgtgatggctactgttacaatggtggcacatgccagctggaccccgagacaaatgtacctgtgtgtctatgctccaccaactggtcaggcacacagtgtgaaaggccagccccaaagagcagcaagtctgatcatatcagcacaagaagcattgccatcattgtgcctctcgtcctcttggtgactttgataaccaccttagtaattggtttagtgctttgtaaaagaaaaagaaggacaaaaacaattagaagacaacctattatcaatggaggaataaatgtagaaattggcaatccatcttataacatgtatgaggtagatcatgatcacaacgatggaggtcttttagatcctggctttatgatagacccaacaaaggccaggtacatagggggaggacccagtgctttcaagcttccacacacagcgccgcccatctacctaaactctgatttgaaaggaccactaactgctgggccaacaaattactccaatccggtatatgcaaaattatatatggatgggcaaaactgtcgaaactccttaggaagtgttgatgaaaggaaagaactgcttccaaagaaaatagaaattggtataagagagacagtggcataatcagtgatatcttttatatgctgtataaatgtataaaatataaggattacttttgtatgttccaacagtattatacttgttttggcatcagcattacctctttctttatctttttcctggttaattgttttctgagttttttgggttttattttttgctgatgactattgattgaccatttgtatggtatttttatgaaaaagaactgcactacagtacaatttacaacaatgctgctgatatgacacacctttgaatttgttaaaattaaaaacaacgtattcctttgtagtgtgaatatgagcaatctattttatatgaacttttttggttgtacttaatcaacgaggagaatctctgcacttttccattatacggtttgaaggctgtaatacagtgtcattttatttttctgtttaaattgatggaaaaatgattgaatggtcaactctcttctttgtgcccataaagatcgattcagactctgctgaaaatatatagctctcacaagttcagcatcacctgctttgaaattagccttagattgccaaccaatagatgagaattttgaggaaaaaaattaaaaatatgtaaaattaataatttgcatgaacacagatgactacattttccaaaacttagtggactctatgtgatgtactaaatgtatacaccttgtaagcaatagttatatttaggtggtagaacatagcaaaaatataaccgaaagttggccgactgcacttgctatggaataagaccttttattctccctcagtctcgagataaatagccagcctagagcacaacagggcattgggtacttgcatcttaggtatttcttcccagtcacatccattttgtggaagattaacccaaccccttacactacactgaacactaaagaataatatataagcacacaaattggtgacagaatttcaattacgtgaacgcatcctctttgctaggtcaaaaaacaaagggcaaagcagacattttagtatacagagtgattggcaaatattttcaagatttaatatgagcaacccattatttgccctatccaaaatatattcaagggccttccaagttgtagaagaacaatgatcttcccataatcaaaagtggagagtcgaaatgctgtgccagttgctctggtattcaggtttctctgggttttacagaacgcatggaccccattcacgtttggtttgtttatcttcaaatttgagttgaaatgagtgcgatttatttaagttgtatataaaaataaaaggatagcatttttatacaaatatctttaaaggcacaaaagatttattcacaagttttggagggctttttgttcctctgatagacatgactgacttttagctgtcataatgtattaacctaacagatgaaatatgttaaatatgtggttgctctttatccctttgtacaagcattaaaaaaactgctgttttataagaagactttttgttgtactatgtgcatgcatactacctatttctaaactttgccatattgaggcctttataaactattgatttatgtaatactagtgcaattttgcttgaacaatgttatgcatatcataaactttttcaggttcttgtttaagtacattttttaaattgaacagtatttttcattttggttataatatagtcattttgcctatgtttctacaatgaagtgttaaatactttataaaaaattgttgactgacttatttaaatgaaattctacatatttaaaaaaaaaaaaaaagggcgggccgcnn

SEQ ID NO: 12182 - DNA, 1834 bp, Homo sapiens
  misc_feature 1, 2, 1825, 1826, 1827, 1828, 1829, 1830, 1831, 1832, 1833,1834: n = A,T,C or G
nngcgtccgggcgacgcggggccatgtgcaggaccctaacgacaggcgcctccggcccatttacgattatcttgacaatggtaataataaaatggcaattcagcaagcagataaactgttgaagaaacataaggatcttcattgtgctaaggttttaaaggcaattggtttacagagaactggaaagcaagaggaagcctttactcttgcacaggaggtggcagcccttgaacccacagatgacaactcactgcaggcactgactatcctttaccgggagatgcaccgacgctggcatggctctatataagattgtccccaaaaatccctactacttttggtctgtgatgagcttaattatgcaatctatatcggcacaggatgaaaacctctcaaaaacaatgtttctgccccttgctgagagaatggtcgaaaaaatggtgaaagaggacaagatagaagctgaggctgaagttgaactttattatatgatcctggaacgtttgggaaagtaccaggaggccttggatgtcatcagagggaaattaggagagaagttgacaagtgagattcacagtcgggaaaataaatgcatggctatgtacaagaagctgagcaggtggccagagtgcaatgccctttcccggcgcctcttactaaaaaactcagatgactggcagttctatctgacttatttcgattctgtctttcgactgattgaagaggcctggagtcctcctgctgaaggtgaacactctttagaaggagaagtacattattctgcagaaaaagctgtgaagtttatagaagatcggataacggaagaatctaacaagttctcgccatctccgaggaccacatctagctaaattggagctgattaggcgtttacgaagtcaaggttgtaacgatgagtacaaactgggtgatccagaagaattaatgttccagtattttaaaaagtttggcgataaaccttgttgttttacagaccttaaggtgtttgttgacctcttacctgctacacagtgtacaaaatttattaatcagttacttggagttgttcctttgttcgacaccaacagaggataagctggcactgcctgctgacatcacgagctctgcagcaaccatctgtgtgtggtgcagctgacgaggttactttggcttgctacccacaccatgcgactaaacaatcagaacacttgacgtgtgggtcaagacgaattgatgttaacggtacccacattggactgggaacttggggaaaagacggttgcacaccccgaattggcacttctggactattatggccacgtgcggacatgggctaatcgatctctcgcggacccgggggcttgtacaccactgtgtgccgagccttgatagccggaagcgggattatcctatccgatcggggccactcaactgggtggtcagcatcagagtggggcactcaacgagggagtattccagcggctagatagcgaaagggagcttcgccaagtgactgcgctgggccactaccgatgaccagcaattacttgttcgaattctcttgtctttataattgtaggggggcgggggaggccggaggcggcggaggcgcggggggagcggagggggggagggaggggggggggggcgaagggggggcagggggggaggtgaggggggcgggggcagggggctggggaaggacaggggaaggggcggagaagggggagacgaggggagcgcgggagagggaggcgagagggaggagagggaaggggaggggcggtggggcgggtgcggcgcaagggggggaggggcgaaggacgannnnnnnnnn

SEQ ID NO: 12183 - DNA, 283 bp, Homo sapiens
  misc_feature 1, 2: n = A,T,C or G
nnagtgagaaagacatgacatggctgagatggagagaatatgaggtggccacagcagaaaagttgagaacaatttgaaagaggaaaatctgtggccaaattcaaggcaccctaggctgtgatcctggaactgaacatctgatgagtcaatacagggcacggagtaggactttgaagtcctccattggatcttctcggaagatgagggaaatgagagagtgtggagagagattttgtaagtccggtctggaagtggtcattgttcagaatccagccacgtgggt

SEQ ID NO: 12184 - DNA, 1669 bp, Homo sapiens
  misc_feature 1, 1669: n = A,T,C or G
nccgccgggccgccggccggtgaagatatggcggcgtctgcgtctgcagctgcaggggaggaggactgggtccttccctctgaagttgaagtattggagtccatctatctagatgaactacaggtgattaaaggaaatggcagaacttcaccatgggagatctacatcactttgcatcctgccactgcagaggaccaggattcacagtatgtctgcttcactctggtgcttcaggtcccagcagagtatccccatgaggtgccacagatctctatccgaaatccccgaggactttcagatgaacagatccacacgatcttacaggtgctgggccacgtggccaaggctgggctgggcactgccatgctgtatgaactcattgagaaagggaaggaaattctcacagataacaacatccctcatggccagtgtgtcatctgcctctatggtttccaggagaaggaggcctttaccaaaacaccctgttaccactacttccactgccactgccttgctcggtacatccagcacatggagcaagagctgaaggcacaaggacaggagcaggaacaggaacggcagcatgctacaaccaaacagaaggcagtcggtgtgcagtgtccagtgtgcagagagcccctcgtgtatgatcttgcctcactgaaagcagcccctgaaccccaacagcccatggagctgtaccagcccagtgcagagagcttgcgccagcaagaagaacgcaagcggctctaccagaggcagcaggagcgggggggaatcattgaccttgaggctgagcgaaaccgatacttcatcagccttcagcagcctcctgcccctgcggaacctgagtcagctgtagatgtctccaaaggatcccaaccacccagcacccttgcagcagaactatccacctcaccagccgtccaatccactttgccacctcctctgcctgtggcgacccagcacatatgtgagaagattccagggaccaggtcaaatcagcaaaggttgggcgaaacccagaaagctatgctagatccccccaagcccagtcgaggtccctggcgacagcccgaacggaggcacccaaagggaggggagtgccacgcccctaaaggtacccgtgacacccaggaactgccacctcctgaggggcccctcaaggagcccatggacctaaagccagaaccccatagccaaggagttgaaggtcctccacaagagaaggggcctggcagctggcaggggcccccaccccgcaggactcgggactgtgttcgctgggagcgctctaaaggccggacacccggttcttcctaccctcgcctgcctcggggccagggagcataccggcctggtactcggagggagtccctgggcctggaatctaaggatggttcctagcaggacttggtggggggaacagggaattggggatgggagggaggcaataaagatatttggccttctttggctttctttgcttagcagcaaaaaaaaaaaaaaaaaaaaaaaaaaaaaaaaaaaaaaaaaaaaaaaaaaggggcggccgcgggagcttcccgggcctggccgtggaaccaggcagcaacctggacatggaagatgaggaggaggaagagctgaccatggagatgtttgggaacagctccatcaagtttgagcn

SEQ ID NO: 12185 - DNA, 171 bp, Homo sapiens
  misc_feature 171: n = A,T,C or G
actcatcacgttgaagggtcatcatatgtgttcccatttttttctcggcaggaaagtgagcctctgggagtctgtatctgagtcctgttcctccaatattcaatgaatgctgtatggcctcttctgattatgacagctgatcactaatatgatgtgacctccccatttgan

SEQ ID NO: 12186 - DNA, 421 bp, Homo sapiens
  misc_feature 1, 2, 3, 421: n = A,T,C or G
nnncgggggggtctgaagctgaaaactgtaaccatgatgaaggcaaaggaaagagcagagagctcggtagacagaggaaggagcctgtcctcagacaggcccaaaaccagagaacctcttgtcatcaatgaactaatgacatagacagatccaaatgactgccagatctgccaggaatcagtatttttcaggcttcagtgatctcctctgtcctggaaaacaattcctgtatattatgaggactctgacatcttctctgaccaccagtttattttcttctcttaatacagaatcaactgcattaaggtcatggtagaaaccaaagctaaaacagttattttaaaacatcatgatgtaagtgctgtaaaccttcttagaatttaaacatgctcagggcatgaaagagaaatgattataacan

SEQ ID NO: 12187 - DNA, 3101 bp, Homo sapiens
cacgcgtccgggccgctcgcggagggagaggctgcagagcgagggcaggaggactacttccagcaacccagtctcctgccatgtccgaccccatcacgctgaacgtcggggggaagctctatacaacctcactggcgaccctgaccagcttccctgactccatgctaggcgccatgttcagcgggaagatgcccaccaagagggacagccagggcaactgcttcattgaccgtgacggcaaagtgttccgctatatcctcaacttcctgcggacctcccaccttgacctgcctgaggacttccaggagatggggctgctccgcagggaggccgacttctaccaggtgcagcccctgattgaggccctgcaggagaaggaagtggagctctccaaggccgagaagaatgccatgctcaacatcacactgaaccagcgtgtgcagacggtccacttcactgtgcgcgaggcaccccagatctacagcctctcctcttccagcatggaggtcttcaacgccaacatcttcagcacctcctgcctcttcctcaagctccttggctctaagctcttctactgctccaatggcaatctctcctccatcaccagccacttgcaggaccccaaccacctgactctggactgggtggccaatgtggagggcctgccagaggaggagtacaccaagcagaacctcaagaggctctgggtggtgcccgccaacaagcagatcaacagcttccaggtcttcgtggaagaggtactgaaaatcgctctgagcgatggcttctgcatcgattcttctcacccacatgctctggattttatgaacaataagattattcgattaatacggtacaggtaaaaggaccccaacaacactggagatggggagtcccaggaagctcatgtcagccaggtcttggagggcatctcgccagtggtgcgaggcaggggactatactaatctgtattaattgtgtagcaggacttgattccccccatgatgaagtccaccttttggaatccagtgtcctctgaacagaaccaccttttttcttgccattttgagctgcagacaggcggtttattatgacaagtgaagagtcagctgatgtgtactaaaggaggccataggaggattttccagccaggacaaaagagcagcagttttctcctgggctccatctctctgtaccgctagccagtgccgcatttatccatctgtaagaaggccctggtggagaggatgggatgagaacaagaggctacctccagttaaccaggacataaagtccccagcggttcctgtcacacctgctcctccctccccagggtgcatccatgatcgtggatgtttgcccaggggtgaccatgtttggctggcttggaatgctgtgcattctcagagctctgttagtgtcccctcttgggggtcagagatgaggtgtggcagggtctagaggaatgagtgtccaggcagagttcagaaggtaggaatgtccctcttgatagggctgaatcaagggattcctggctttagaaagggtctgctatctttgcaaaaatgtgcaagtatctgtagccagtgtaatgaaatcacttccaaatccagcctgttacctgacttttgtcattgttttcccaaaaatttgaggtatcattgaaacaggtcattttaaacaaatctattacggattctcagggttggaaataattcgatgattgcttagtcctcccccacccctagaacaccccagcacatctgaagatgagcgcctctccctgggtacctgcaagtgatcaccttggcctgcttgcataccttggctgataggaagcgcgccatccccaaggcagctcctgctgtggttggacagtgctgactgttagacagttcttccctatattgagccaaaatctgtcctgccacttgctggatcttggttgcagaccttcccattcacccagttatatatctttgctttcaaaatagtcaccttgagagaccagacatttttctgaaaacatcattactcagaattcagattcccctctgggatctgtcttcagaatcaaagttagctcttttctatcccctgtaagtcagtccccttttgttgtagcttcacctcgtttgtgacccccacttcacccaccttccccaccatctgtggctccatatacctttcgaccattttctgctggaagaggaagattcacggcccctgaggagatccagaggaaagagacggtctccaagggtgctgtgcagcaaggagcccaggagtggtatgaaccgtaacagtgcccttagagtaaatgtgcggcccctaagaccctgccctcaggaaggcggccttcccctgcagtcctgtgtcccacccctgggtctctgtagggtgccatccagggcaagcaacccaagcactgcttcccaccgggtgatgagccatgcaggcctccaaactgcacgtcatgattcatccctaaagtgagtttggccttgagagtccccagggtcctcccccactgggcaggggtcctcaaagccaaggaagcctggtgacacaggcacccatgggaggtgggcccagaaaggggcttcccatagataggccctgtgagtagggagcttgtacactgggccatgggcagcgccagttcccttgagcagtaaaggcccttttccccctacggtgggacccaggagtctctctgacagcttttctgccaggcacagtggctcatgcctgtaatcccaacactctgggaggccgaggcgggaagatcacttgaggtcaggagttcaagaccagcctggccaacatggtgaaacgtcgtctctgctaaaaatacaaaaattagctgggtgtggtgacaggcgcctataaccccagctatttgggaggctgaggcagtagaatcgcttgaacccagatagcagaggttgcagtgagctgagagtgtgccattgcagagagactccatcccaaaaaaagacagctgtcccaggccaagggtacttgggagagctccctcatggagaacctagtttagaccaagtagcagaagctgtggtcataacaaaacatttgaggaa

SEQ ID NO: 12188 - DNA, 379 bp, Homo sapiens
  misc_feature 378, 379: n = A,T,C or G
acttttttttttttttttttttttttttgggataccttttttgtccattttatgtgatttgctataacttcttttttacttacctctgaagtagaatttgattgagaagataaatatagctaaattccaaataccattccctcttgttttacaacaattagaacacattaaaatgaagacttgattcatgacacagcacctaacaaacttcttgggcatttcctgatgtcctgttgtcactgtatgcctgcagcactgtttccctgtttcatcatgtggggaggtgggagtaggtaatggagcttctgttaaaaaaattagaaaactttaaaaaatagttcatttactttagactttccaaaaaacactggactggann

SEQ ID NO: 12189 - DNA, 860 bp, Homo sapiens
  misc_feature 1, 2, 3, 4, 5, 6, 860: n = A,T,C or G
nnnnnngagattaatcagatcatatggcctaatttaacctgtttatcatttcagtgtttttagatttgatctataatatatatgtgttattagatctttagttatttatatttaatctaaattcatatagaaatcttgctgacagtggtatataatttgaaaactgttggacctgatcatttttgagagacagttaatgaggaggtgctctggaatcagatgacctgggtttaaatcccagatttgccagttcagcagcatgatcttggaccctaactctgccgtggataaaataagggtaaaacctaacacacagggtttaggattaaatgagataatacagataaagcacttaggatagtacctggaatacagcaaatttcaaattataggttctttataatgatcataaaattatttttgtaattaaaacctctcttctacaacagaaagaggtcttaacagtttaacctcagggaaaatgatgacaacagtgttgttttctaatctccccataagaatacagagcaactaggatagccacagacactattacaacgctagatgacaaggtatctctatgaacttcaaaatacaactaagtgaggacaaaccactgaaccacatagtttcagtatctgtgggaggaagtagaaggaaggcagctggtttctgacagctctgcaaattggagaactacaacactgcccacagtttctcaactacaaagtgcagcgggcccatctaagaacagacactgaaactgggaagtgactacagaatctcatttgcagatgaatgttaaagccatatgataaggtctgctgattgcattagagcagtctgggtttacgctgtgn

SEQ ID NO: 12190 - DNA, 343 bp, Homo sapiens
  misc_feature 1, 2, 343: n = A,T,C or G
nntacaaatggttactatccaaattcatggtcgccaaggacatctgtaaagcctggagtatctttcagatgtgaggagcttccttaaagctctggaataagcaggattcaggaatagtaaggataaatgcagagcgcttagaagatgaccaataagaacagatcttagtcctgcctgaacatgctgtgaaagcttgaggaacacaccagtgccagccctcaatctcctcaactgacttggggattagactacaggctatcgataaagtttccatccatccttaaaatcctatgactccaaaatttctatcacatgcaaaagtataaaggcaggaaggaactgn

SEQ ID NO: 12191 - DNA, 446 bp, Homo sapiens
actcttgcctgtggacttttattatccttccaacttcattcttgtagggtctcaaatcctttccttggcttcccttcagactgcctctgtgctgtcatggtctttcttgggaagaccttcttctgctttctctctaggaacaactcggccaggtatagttgcctttcccaagattacaatttagcccaggattcagtcccatggtatctccgccaggatagagcccacgggcaagattaaattatctcatcctcacagttagatctttgcagagcttagcaatgccatctgagaaaggaggcatctgaagttatcaagcagacaggtaactccgaccaattcagcactctgccccaactccagattctgtggtaggcatctgatatggggcttccagcttccaaacagcagctacatgttcataagcatcactggaggtctttggt

SEQ ID NO: 12192 - DNA, 687 bp, Homo sapiens
  misc_feature 1, 2, 3: n = A,T,C or G
nnnactcactatagggctaattggaactgcagctccacggcggtggcgggcgcaggtccgcggggagaatagagtggctgacttgctgattgaggtcggcagctcccgagaagcaggagaagcagagtttttgcagacagacccacgaagtcaagcatgcggagtgcagccaagccctggaacccaaccatcagagcagggggccacggcccagaccgggtgcggcctctgcctgcagcctcttccggcatgaagagttctaagtcttcaacttccttggcttttgagtcccgactcagcaggctcaagagggccagcagtgaggacacgctcaacaagccaggaagtaccgctgcatcgggggtggttcgcctgaagaagaccgccactgccggagccatctcggagctcacggagagccgcctgaggagcggcacaggggcctttacaacaactaaacggacaggcattccagccccacgggaattttcagtaactgtctcaagagagaggtctgtgccacgtggtccctccaaccccaggaaatcagtgtccagtccaacttcttccaacactcccactcctacgaaacacctgaggaccccttccacaaagcccaagcaagagaatgaaggtggagaaaaggctgcgcttgagtcccaagttcgggaacttttggcagaagcc

SEQ ID NO: 12193 - DNA, 727 bp, Homo sapiens
  misc_feature 1, 2, 3: n = A,T,C or G
nnnaagtcgtggctacagtgggtgtgaccgtgttaccgcgttgttgtgtggggcccacctgtggtccagggccagacatgtggcacagatggcgaacggcctggcacccgtagagggcatggccctatgggggttccaagtagtgcacaggttaggcccctttggaagtgtttgccatgtcggcgccaaccccgttcgggaacccatgctttctcagagctcagttgaaaatgcagaattcacccatcttcggcatcaatcacgctgggaggtgcagaccagagctgttcctattcagccatcttggaaccgtgaattttattaaaatgataactgtgcagtagtaaatacataaaacataacatcttacttaagagttagaatctatagacagccctaaggccagatgtactgtttgcccagttcatataaattaggtgctatcaaggaattattattaattcgcccgggcaggtactgtggttatgccgggaaaaagacacaagtccttttctttgaaagataaacaatgaaatatttatgggtgaaatagtgtctgggatttgttttaaaatatattaacacaaaaagtgtgaggaataaataaaatatgaagctgatggtttgctgacagatacattgggttccccgtactattcattcctttgccttaaaaataaaaacactcaaacaaaattagaaaaaaaaaaaagaaaaagaaaaaagt

SEQ ID NO: 12194 - DNA, 540 bp, Homo sapiens
  misc_feature 528, 529, 530, 531, 532, 533, 534, 535, 536, 537, 538, 539,540: n = A,T,C or G
acctccatgcatggctaatttttgcttttctgtttttgtagagactgggtttcgtcatgttgctcaggctggtcttgaacccccgagctcaagcaatcctcccacctcagcctcccaaagtgctgggactacaggcatgagccaccacgcctggcctttatatgtatatttttgatcatagtaacatcagtatgcaattaaagagtaataatatgtatgtaaaataaagacacgaatatttattcaactctagacaacgtttgatgccataatgggtttaaaataactctgggagcctgggaatctagtctctagattggaaaccactgaactgggtattttattattaaaaacaataatcattattattttttccattgtaataacatgtaaaaaaacatatttcccatatgctcagtggagaaaatttggaaataaggaaagtagcaagaagaagtggggggaaagaggcacccataattctattacccagagtcaaaaacatcttttaacactttttctgtgcannnnnnnnnnnnn

SEQ ID NO: 12195 - DNA, 503 bp, Homo sapiens
  misc_feature 501, 502, 503: n = A,T,C or G
tacggacaacagtgtatgtgcaaccatgctcgctctgccctgggaggggcagtggaggcagaaatggatgaggaaatagtgaaagatatcaaagataccccatactctcggggcatcagctactggccttatttggttttataaaacataaacgttcctaccaaacccttccagtattttgaggggctttcacatttccaaatacaaagttttacaaacaagcctattataaaaattgcattgtcatgtggctaaattacaaaaaatgacttcagctttgtataagtcatttaaaacagtgtatacactaaggctattttaatcttccaaagaactattgtggatagcacagttttcctcacagctaatgctttatcaatcatttatctcaaattcctgttttaaccattttggatcaaagcctttaaaatatgtattacataactcaatgcctccttaaatagtagtctgttttactgtgttagaacaaagaaatgaaannn

SEQ ID NO: 12196 - DNA, 526 bp, Homo sapiens
  misc_feature 521, 522, 523, 524, 525, 526: n = A,T,C or G
acttttttttttttttttttttagacagagtctcactctgttgcccaggctgcgtgatctcagctcactgcaacctccacttcccgcttcaagcgattctcctgccttagcctcctgagtagctgggattacaggtgcgcaccaccacgcccggctaatttttgtatttttagtaaagacggggtttcaccatgttggtgaggctggtctcgaactcctgacctcatgatccacccacgttggcctcccaaatgcagtagcgtcttaaagaccatcttaaaggctggtaagagtctggactttattctaaggactagaagagaagccatttggttttatgcagggggatgacaggatgtgattttcactttaagaagacaactagtgctacagtatggagactagattgtagaggatgagagtggtgattgggaaggccgttcagaaggctgtcacagggagccaagggcagaaaactaggtggtggagcctggactgcagtggtagagacgtgggtggannnnnn

SEQ ID NO: 12197 - DNA, 560 bp, Homo sapiens
  misc_feature 1, 2, 3, 560: n = A,T,C or G
nnnaccctttgccttttgaattcttgattgttttcattgaagaaatgtggaaatctgaaacaaactatattctcaatcatgttagaaaaagtatatgtaatatgtatttttttaaagtccagtggctaagaacttagactgggttttgaaataataatttcctaacacagtttctcagtatgtttcctctagacaagagaaaactctgtaattatgattcttaatttaccctggtaatttcataagaaaaatgattaattactttgagcaatcagttatacagataatcatggttctttatttaaaccacaaaaaatagaaagaaagcagagaagcttaagcataaaatataaagacaaattcagtcatttagtaaaaatgaaatcagtgttaaaatatttcttttgacacagtcagctaacatctttctatttttgctgagtaactattaattatattttaagttcaactaactcttgacacagcaatggaatttgaagtgaatatactactttgaaaaataaatggtgtatttagagtgttgacatttagaaaatggn

SEQ ID NO: 12198 - DNA, 2903 bp, Homo sapiens
  misc_feature 2875, 2876, 2877, 2878, 2879, 2880, 2881, 2882, 2883, 2884,2885, 2886, 2887, 2888, 2889, 2890, 2891, 2892, 2893, 2894,2895, 2896, 2897, 2898, 2899, 2900, 2901, 2902, 2903: n = A,T,C or G
cgtccgcccacgcgtccgcccgttttccctccccctctacccccacccccatagttctcactatagggagtcgacccacgcgtccgatgcagccttgataatcatccgattccagaatgggtggctgcattccttttctgaaggcagcaagggcactgtgccccagaatcatgccccctttgctgttgttgtccgccttcatttttttagtgagtgtcttgggaggagccccaggacacaaccccgaccgcaggacgaagatggtatcgatacacagcctctctgagctggagcgtctgaagctgcaagagactgcttaccacgaactcgtggccagacatttcctctccgaattcaaacctgacagagctctgcctattgaccgtccgaacaccttggataagtggtttctgattttgagaggacagcagagggctgtatcacacaagacatttggcattagcctggaagaggtcctggtgaacgagtttacccgccgcaagcatcttgaactgacagccacgatgcaggttgaagaagccaccggtcaggctgcgggccgtcgtcggggaaacgtggtgcgaagggtgtttggccgcatccggcgctttttcagtcgcaggcggaatgagcccaccttgccccgggagttcactcgccgtgggcgtcgaggtgcagtgtctgtggatagtctggctgagctggaagacggagccctgctgctgcagaccctgcagctttcaaaaatttcctttccaattggccaacgacttctgggatccaaaaggaagatgagtctcaatccgattgcgaaacaaatcccccaggttgttgaggcttgctgccaattcattgaaaaacatggcttaagcgcagtggggatttttacccttgaatactccgtgcagcgagtgcgtcagctccgtgaagaatttgatcaaggtctggatgtagtgctggatgacaatcagaatgtgcatgatgtggctgcactcctcaaggagtttttccgtgacatgaaggattctctgctgccagatgatctgtacatgtcattcctcctgacagcaactttaaagccccaggatcagctttctgccctgcagttgctggtctacctgatgccaccctgccacagtgataccctggagcgtctgctgaaggccctgcataaaatcactgagaactgcgaggactcaattggcattgatggacagttggtcccaggcaaccgtatgacttccactaacttggccttggtgtttggatctgctctcctgaaaaaaggaaagtttggcaagagagagtccaggaaaacaaagctggggattgatcactatgttgcttctgtcaatgtggtccgtgccatgattgataactgggatgtcctcttccaggtgcctccccatattcagaggcaggttgctaagcgcgtgtggaagtccagcccggaagcacttgattttatcagacgcaggaacttgaggaagatccagagtgcacgcataaagatggaagaggatgcactactttctgatccagtggaaacctctgctgaagcccgggctgctgtccttgctcaaagcaagccttctgatgaaggttcctctgaggagccagctgtgccttccggcactgcccgttcccatgacgatgaggaaggagcgggtaaccctcccattccggagcaagaccgcccattgctccgtgtgccccgggagaaggaggccaaaactggcgtcagctacttctttccttagatgtttttccttctataaggtgccagacaggggaaaagggtgggggtacatctgggatgtcacaggaaacattaaggagagagttgaaggtaaagatctgaaggtaagaaggagttccacctgatgctcgggtcaggatgagaattccaaacacactgccagccccttcactggggatgcttggtctcttctgctggtaaaagcagagatgtttctgtgtcatgcccaagctccccggtgctaccttgcctttctcttttacccctgatcttggctttctctctctctctgcagactttcctttaattgatgtgacatttgtggtaaacacctttcccagggaacctcacaaatcttgagatgctttcccttccccaaatgggattgcatgatttccctgactttcctaccctcctccagagagctcagttggaaaggccctcaagaggcatgctagaacgttaggtcagcctactgacagctgacaaacaattaatgcgaaatcatgtcacaccaacccatagccgtgtccacgcagcaactccaccaccttaggatttccccctccaaattattcagaccaatggcttgccaaatggcctctcccaaaattctgtacagttttgctcaggtcacgccaacagggaaacctcaagtgtaggtctaattagtgtttctgggatccaaagttagaggaaaatttagattttattgcctggatctgctttaaagacaattggtgtttacaccctcttgtcagcaaaacagctagttaggtaaggacatatagttccaagtaggtaaagtcacttgattacaaatgttcttaactatcgtctctgtaattcctttatacaggacagtacaaaattgtgggacatgctctggtaacacacagatatgggttgcatatgatccagaattacagctgatattatggatgacaactgctaaggtccataaaatgaagactgtattgtattgagggatagaaattgatcatttaatgggtaacaactgctgagctcaaagatttgtgattgttaaaacttctctggcatttaatcattaataaacatctgtattgtgacaccagcataaaaaaaaaaaaaaannnnnnnnnnnnnnnnnnnnnnnnnnnnn

SEQ ID NO: 12199 - DNA, 1105 bp, Homo sapiens
  misc_feature 1, 1105: n = A,T,C or G
ncgtccgtcacgcgtccgcccacgcgtccggcggatggatcgcttgaggtcaggctggtctcaaactcctgacctcaagtgatctgcccgcctcggcctcccaaagtactgggattatagctgtgagccactgcaccctcccggaaatgctttttaacggtcacctcctaggggagatgaagagagttaccgcataatcagttttaactgtatttgtaatgtttgtttctttacctgggaggatatgttgtagatacgtgagatagaatacctaagtgacacaatggtgtgcaggctatggctgcaaagtagaaagtttctaaatagcatgcttggatttttatttgaattggatgaagtttttgtgtcctagagaaattcacaaaatgttcctagtttcagataaaaggttatgatttaacatctttgcttttgttctttcttgtctttgaatagaacagtgggggacggtaaggtctgtttgcaaagtacctatgaccatcttacattatttttatgggtggggggcattgactgtggaatgtgggcagtaacttgcacagtcagtaaccgtttgagtaacttcttgttggcatccccattctggcactcctcctctaggtctccacctcacacgctggtttgtgggcggaggggcaggttggtgcgtggggtgtccgggcactggctgtgcatgccttcttcctcttctgtctcttggccaccttttccaaaaagtcaccagtgaccaattctcccagtgtttctttgggactcaatgccttgggcttggcattgggtaaagccaactggccagtttcattctgacgagctctatagtagtccggtgtggacctctgccctccctgctctgcggaagcttcctcagcctttgcttctcactatttactatttgcgggtcctgggggtacccagcgtctcagggttttggctgcccacctgtacgtcggtcctttcaaactgtggtcagagtcaacctcaggtgctgcttttctctagtcactgcatttttttttttttagtagagaccaagtcttgctgtgttgtccagcctggattcaaactcctgagctcaaggaatccn

SEQ ID NO: 12200 - DNA, 272 bp, Homo sapiens
  misc_feature 266, 267, 268, 269, 270, 271, 272: n = A,T,C or G
acttttttttttgttttttgttttttgttttttccttaactacgcgtgctttaaaatctcagttaaattcttccttgagcattactttcttagagtggcctttcccactgtgttcatcagaacattagttttgttggctaaatggcactatgtgacataaagccaaatgagattgggaaatttcagtctagattggacacacgtcaccctctccaatccctaggacttcttagagctgtaaacgctaatgtacattgtggatctcnnnnnnn

SEQ ID NO: 12201 - DNA, 501 bp, Homo sapiens
actcattggaggatcagctcacctgctttgctctcgatgtagcctagctgggtttagagccttcccttgaatgaagaaccctccccagctggaaggggatgctcttgaaagctcagctgacaacacacatgggcatcaagtcattggccacattcatgcctcaagtgtcctaaaaccgaatatgatcaaaagaaaactgctgttcagcaagtggagactggcatgcagattccctggcctgcaagcctagtgtaaaaagataccaaatactgctggaagaatgaaaaggatgaaaggatgtcatcaaagtagttttttcacttgatggaaaagactaaaacagcaaagcaagttcaagatcaaacacaacaccacagggatcctttgatgagaagtgaacttaagaccatgaaatgctgttgatgattttaacccaccagcctcctttgatttgagaagccacagcccttccccctccaattgtgatcaactatgatcagt

SEQ ID NO: 12202 - DNA, 1013 bp, Homo sapiens
  misc_feature 1013: n = A,T,C or G
actccaatctggggccagagcaagaccctatctcagtcaatcaatcaagattttgtgtaaatataatcattattccacaattttaaaaaatcagcttcaaacacagaaatatgaaaatcagaattaggaaggctggtggtcagtcttcacttaaaaataagtttataaagagtccattatctgttagagatatgtattgaagcattttccaataaagtgaatactgggatttgctttaaaatcatctgaggtagggggagcctagaattaactgttaaagctaagtgatgggagttcactaaattattctatttttctgtttgaaatcctccatcatgaaatgtttcattttgtttttaagtaagtttccaaagatctttatcattaatatactctgtagataaaatgacaggctgcccttaagctgtcaaactctggtggctcaaccaggtatgctccacactgagcccaacagtgtagactcactcaatgcaggccccttcacagaaggcacacaaaaggcccctcagaaaacaatcagagccccagttcagaccaccaggcagcagtgcagggagctgtgcggcctagtctctctcacattaggtatccctaatgtgaaaatccaaaatccaaaatgttccaaaatcagaaacttcttgagcagcagcaacatgataccacaagtggaaaactccacacctgacttcatgcaacggggtcacaatcaaaatgcagtcaaatctttgttttgtacacaaacttatttaaaatattatataaaattatcttcaagctatgggtgtaaggtatacacaaaacataaatgaatttcacgtttagacttgggttccatccccaagatatctcgttatgcatatgcaaacactgaaaaatccaaaaaagtctactatctaaaagatttctagtcccaagcagttcagacaagggatactcaacctgtatgatatccaagcttccaagttgcctgctcaactcctcactatatccan

SEQ ID NO: 12203 - DNA, 614 bp, Homo sapiens
  misc_feature 611, 612, 613, 614: n = A,T,C or G
actagcacttgtgaccaacagctagtcttgctttcaacagctagtcttgctttccctgatcgtagatccctactaaaagctcttgaaagtgtgcatatgcaggctacctaatgatttaacggaggatcaagatggttacactgcagagaaacaggagggatagggcatatgccctttgtccagcaagacagacaaaaactaggaacttgaattctcttctctggattcctgtatctggagccaaggccaaggatcagttcttctagaaagttccctcctgtgtgtgtgtgtgtaaatgtgtgtgaatgcagtcataacttccctgccaaaattcattgccaaaaattttgtgatttgaagcaggccttacctgttaatgcaaatttgattctcaaatcctaagagtttccaaaggttgagtgaagtgagatgagactcttagttgaagatccagatgcttcactgttgctatctagatgctaccaaaactcccagcacaacaaagtatatgaagagaggctctaggttcatgaaatgttagagttggaaaaaagggcctttggggttcttcttattctacctcctcatttaaaaaaatgcaagtgggaaannnn

SEQ ID NO: 12204 - DNA, 404 bp, Homo sapiens
  misc_feature 403, 404: n = A,T,C or G
actaagacctccaggtggtagatgtagatggataccggctataatggtagcagtagcctaagtggagccatcctcaagctcccaggagaagtgcacagatgccaacaatggtggatggcgggagcaatatccagattcctggaaattgtgtttagtcactgaggaacagggggagtgccagaccagatagacccatccttgggtcccctagtggtgcacacatgcacaggctgtggtaggcaagatggtcttatttcgaggttccccagtggaatgcttgggtggcagtagcaacagctgcagtgaacaaggagaccccacctcagggcacaggcaagtgcactatggccttgctgctggggaaacagggttgctaccagtggcagcagccacaggcaagcann

SEQ ID NO: 12205 - DNA, 581 bp, Homo sapiens
  misc_feature 577, 578, 579, 580, 581: n = A,T,C or G
actagtgggtgttattttgttgaatgaatgttttacccaaacttatatgcatattagattgtttaaaagctcaattaaaaagtgaaaaatagacactgaaaattttttgagtgatttcacatgtgttcatgaaacaatatatctattacaaatcattgaatattttaaaagtaatgtcatgtattcattttcttattttatctcctcagtagactgagatcagtgtgtaggggtgaagcaaggagtcctaccctgtttgactaaggtaaaaattaagaatcagtgagaaatggaatttgcaaaagtgcctgccagataatgttagaactggaccagaaaataggagttggtataaaactagaccagcgagcttttttttccttcaagatgcagttcagtttattgcttttgtaaattagagattgtgtttcttgatctttattaaagtagaatacaatgttaacctacttcaaattttaaaaaatatacacacatgtatatgtatgtgtgtgtgtatatacacacaggattttaaggacagttttttgtgtgtgtgtgcatgcgcacgcatgccaannnnn

SEQ ID NO: 12206 - DNA, 418 bp, Homo sapiens
accacaatcacaaatgcagcactgtttactgacaggaccattactctgtcaaaatcagcacatcaaaaatattatcctggaatctaaaatagtagtcaactgggttgttaaagcaagggattgctatagatctacaggacaaagttccatagtgaaacacaaactcctgggttagtcctaggccaggcaggtgaccataaatgttcacattctggtagaatcccattttctaaaaattatacaaacacatcgaaatcactagattttatatatatatatacacacacacacacacacttatgtgtatatatacatatacgtattttgtgtgtgtgtgttgtgtttccagcagctaatagcagctaacatttattgagcacttaccacatgccaggaactgtgctaagtacctcggccg

SEQ ID NO: 12207 - DNA, 487 bp, Homo sapiens
  misc_feature 485, 486, 487: n = A,T,C or G
acataacttataaatctcaactaaatacatagcttactgtaggaatatgttgccaattgacaagaaaaatagtaatatgaataagctaagaattagaaaagaaaaaattttaattatcaaacaattaccttaccaaatggctcagatgagtccaaacagtgagctcttccaacttttccattattcctaagccatatcaatttcagaatattaaaaatgatgaaatgctatccagttaaccttataaagaagagctctgatagcaaagtccaacaaagggaaaaaaaaatacactacacagatatttcacccatgagtatatatttaaaattaaaaataaaatatggcctaacagaattcaacataatatttaacaataatacactatgaacaagtaatccaagaaatgcaaagatatttcaatattaacattctaaacacgtagtatcaacaggttaaatatgaacaagactccatccatgccnnn

SEQ ID NO: 12208 - DNA, 438 bp, Homo sapiens
  misc_feature 427, 428, 429, 430, 431, 432, 433, 434, 435, 436, 437, 438: n = A,T,C or G
acctgagggtcaccagatgcagcagctcacggctgatgaagatccctctgaggaagtctgtattctctatggccttccacaagtccgagctcaggaggactccagggcttgtctgaaccttctggaaaacatgctggtagtgaacaaggcgcttccacagtcgcgcaaactcctcttggtctagccgcccatccactttcagttccatcagagccaccaagctgcggcactcatctaaggagaacatgtcccctggaggtcctgttagaagctcctggttgagaaggccctgaagctgggtggcatcaatgtccagcctctgctgagcatatctgttgaaaatgctttgttgggagccatgttctgaagggcttcccttcattctgaagttgaaatggctgctcaggtgcctgtcactgtctggcannnnnnnnnnnn

SEQ ID NO: 12209 - DNA, 441 bp, Homo sapiens
  misc_feature 408, 438, 439, 440, 441: n = A,T,C or G
acctgctcacatattcaatcactccatctcaaaatttatgaggaaagggatgcctggagactggaagaaccactttactgtggctatgaatgagaactttgataagcattatgaaaagaagatggcagggtccacactgaacttctgcctggagatctgagaggaacaacaacaaactaggtgacagagactatgccaactatttcgccttttattctgttgagcaaggaactgtgactgaatgtggagcttatgagcttcagtccatctcctatagtgtggctagtttgctataatattaaaacatgatttaaaatatcaacaaaccagttactccagcaaataaaataagagaattagagagcaaagtccgcctgagttaaacaaaaaaaaaaaaaagaaaaagtncctcggcaaccgccgcggtggagctgcaannnn

SEQ ID NO: 12210 - DNA, 434 bp, Homo sapiens
  misc_feature 306, 434: n = A,T,C or G
ctcccaagtagctgggaccacaggcacatgccaggatgcctggctaatttttgttattttttgtggagacagagtcttactatgttgcccacgctggtctcgaactcctgagctcaagcgatctactcaccttggcctcccaaagtgctgggattacaggcatgtgccaccatgccccgccactttttttgttaatgttttagacatatcccatgtatatataaatatagatcattgtcattaataataatgacggtttaatactatgtgatgtgttgcaatttattaaattccctattttttganatttaagttgtatatctggtaactcttgccataatattgctggcgaacaactacaaaaataagggcagatagaaataagcacttccttcttgctcgtgagttttcagcgtggctgagggggtaatggn

SEQ ID NO: 12211 - DNA, 549 bp, Homo sapiens
  misc_feature 548, 549: n = A,T,C or G
ggcactaacactttccacactctgtctcactgcccccctcccaggaagtaagacctgtatcatccttatttgttgggcggggaaattgaggctcagaggttgagtgactttttttggggtctcagctggtcactcgggagctgggttggagcccagttgtgcctgagtccactgaataaaagcattattgggaactggcttcattaacaatgagccccagtggaaacgtagtatggaatggaaatggaaatggaaatgcagtggaaatgtagagtggatatggtgtaagacacctggaaagcttaaggagtgggagctagagagacagagagagagaccgggagacagagagagagagagagagaaatccccaatttcctgggtaacagacacacacccttctctaccctggctcagggctggccatggctgtcgtggctgctttctggccagcagaaaggaataaccttgtcacccgggagcagcggtgggtgatggcactccatgaagaaacctttgccctctggcttggaataaaattaagaaann

SEQ ID NO: 12212 - DNA, 808 bp, Homo sapiens
  misc_feature 1, 2: n = A,T,C or G
nngcgggtagaatcttagttcaactttaaatttgcccacagaaccctctaaatccccttgtaaatttaactgttagtccaaagaggaacagctctttggacactaggaaaaaaccttgtagagagagtaaaaaatttacatttcattgtagttcctaggttagggtcaaggtcatgaggtggaccaagcagctagctccaaactgccctccctgttgccgtggttccaatccctgctcaccttgcacaggttgcagggttcccatgacaccctctgccttctctagacacacctgcatcctacccactcaggcaaagaaagtcctctgctccaaattcatgatacgggaggcagcatggtggatagaaaatgcatgggctttgggttcagacagatttggcttccaaattctggttctagcttttgggaaactgatccagctattcaaactttctgagcctcagttatctgcaaaattgggataataacactgatgactttttaaaagtaataatgagagattgctttacatccattgaactgtcaaaaatcagaaagaacaaaaataacagttgctgatagaaatatgaattgctatagcctattgggaaagcaatttggcaacatctattaaaaacacatactgctgaaagcagaactcacatttctggaatctttccatacaaataaaagcatcagcatataaggatatgtgtgcaaagatgtctattgcagcatagtctatgtggcaatagagtggaaaaaaagtgcttgtttatcataggagaatggttgaataaattatggt

SEQ ID NO: 12213 - DNA, 3925 bp, Homo sapiens
  misc_feature 1, 3918, 3919, 3920, 3921, 3922, 3923, 3924, 3925: n = A,T,C or G
ncagcgcctggagcatgagccgggtggtggcgtgcacggaggatcgcgggaggctgccgcctcgggacaccccactcacacagggcaaaaggatgtatacactccatcttcatttaaaacactggaggattcgacccacgcgtccggcctgcacaggactggataaataattaagaacagagtgttctgaacatcaacacaaagtggaagaaccttaagctgaaggtacagtatattatttacactgaaggggcttgtgtgtggacaagaaagcgctgacagctcaaatggatcccatggaactgagaaatgtcaacatcgaaccagatgatgagagcagcagtggagaaagtgctccagatagctacatcgggataggaaattcagaaaaggcagcaatgagcagtcaatttgctaatgaagacactgaaagtcagaaattcctgacaaatggatttttggggaaaaagaagctggcagattatgctgatgaacaccatcccggaaccacttcctttggaatgtcttcatttaacctgagtaatgccatcatgggcagtgggatcctgggcttgtcctatgccatggccaacacagggatcatactttttataatcatgctgcttgctgtggcaatattatcactgtattcagttcaccttttattaaaaacagccaaggaaggagggtctttgatttatgaaaaattaggagaaaaggcatttggatggccgggaaaaattggagcttttgtttccattacaatgcagaacattggagcaatgtcaagctacctctttatcattaaatatgaactacctgaagtaatcagagcattcatgggacttgaagaaaatactggagaatggtacctcaatggcaactacctcatcatatttgtgtctgttggaattattcttccactttcgctccttaaaaatttaggttatcttggctataccagtggattttctcttacctgcatggtgttttttgttagtgtggtgatttacaagaaattccaaataccctgccctctacctgttttggatcacagtgttggaaatctgtcattcaacaacacgcttccaatgcatgtggtaatgttacccaacaactctgagagttctgatgtgaacttcatgatggattacacccaccgcaatcctgcagggctggatgagaaccaggccaagggctctcttcatgacagtggagtagaatatgaagctcatagtgatgacaagtgtgaacccaaatactttgtattcaactcccggacggcctatgcaattcctatcctagtatttgcttttgtatgccaccctgaggtccttcccatctacagtgaacttaaagatcggtcccggagaaaaatgcaaacggtgtcaaatatttccatcacggggatgcttgtcatgtacctgcttgccgccctctttggttacctaaccttctatggagaagttgaagatgaattacttcatgcctacagcaaagtgtatacattagacatccctcttctcatggttcgcctggcagtccttgtggcagtaacactaactgtgcccattgtcctcttcccaattcgtacatcagtgatcacactgttatttcccaaacgacccttcagctggatacgacatttcctgattgcagctgtgcttattgcacttaataatgttctggtcatccttgtgccaactataaaatacatcttcggattcataggggcttcttctgccactatgctgatttttattcttccagcagttttttatcttaaacttgtcaagaaagaaacttttaggtcaccccaaaaggtcggggctttaattttccttgtggttggaatattcttcatgattggaagcatggcactcattataattgactggatttatgatcctccaaattccaagcatcactaacacaaggaaaaatactttctttttctattggaaatggttacaagttatactccaaaagatatttgaattatcttgattggaatgttattcataggaaataacaggaagattccaaagacgtttaccagtaatatcaccaggcacctgcagaagaggaaaatcactgtttttgtcaaggatggttgtgtatgtgtttaaaataaaacctgtggtgcacatttctacccaggttttgctagagcagtgtgagatgatgaaggtgtatttttgctgctttacgagcagaataagggtaactgcatgtaacaatcatcagatagtactctttcccctgccgtctcctcatcctgcaccccctaaaaaagtaccaaacatttgcattctcagaacatcaaacaaaaatgccctggtggcaaagctatcaccatttaatgtcttctctcagtcttgcaccaaagtctctggtctgtttactaacagaggcaaaaggcatgtcttaggaactgtttctgtttctgtaaggtacatgaatggtcaaacaccagtctagagcatcttattgtcaacagcaaaataatattttgcccaccctgtttgtgacattgagttgtgacttctatattcaatagatttttgtaaatgttaaaacatctatatttaaatgttaaaacactaaatatagagaggggctttatttcaatcatagagcaacaacaaaaataatgcttatagctaaactgcctgttctagaaagcatctgctttttcatgttattcctaaatcctcttgtcatacttttgtcattgaacaatgctctccctctcgtcttccatcctcattcagaatttttagaagaccacaatcgtggagatacactacccagtattgtttgatacatttttatttgataaacattcagtgcaggaaactgtgatttgctatatgtttatgtatataatcttattctgtagtcatcagaatgttaatgtaaggtacatttgatttttattttttacatgtgtagttttctttcttcacagtcaaagcatttatattattgggggtgggggcagggaattaagttggtgggctcgaaaatccattcatatgtatctgtctacaaatgtctggggataatttaaatttgaaacctaagttatatatagtttggcaatgctcttcttcaatatttacaataataggatgatctacaagaaaataagtttctttttgcaaatttttatcatactaaagttgttcttttaatttagcatatctaaaataggaattagttcagtttagctcacacaggtgtttgctgacattcattggccatttaatacagtgttgagtggttctccgtaaaagtataagtgctaacactacgaagaaatgcacacgatcattcttgctcacttctataacaaacttacataaaatggatttaaaaattcctactcacagcctaaaacttctggagttcactacctttttttcaaatcatagtaagatcacttgtgtattttatattttagtaaagccaattatgaagtacaagtatcatacacgtacttttgagctactattatttgaaaaaaatctgccaaatagcatctttaggatatatttacattttcactcatctaaaaagtatacaaaaataaaaagtggaaaaaggtatcttctgaatgttcaagagcatcctatagtgccaaataataaagcaccatttttttcttcataaccaggattaaaattcatatatactgcagggcagacatacatatgatagcttgtgctgattaatttaaccccatttgtaaacagatgaaaattttattttcttatttcatttataagatggctcaatgtattgggaggcttcttttttattacagaaagtgtatattggtatataataaatgaacttttcaaatgacaaaaaaaaaaaaaaaggcgtccgctagacaaaactagagaaaaaacnnnnnnnn

SEQ ID NO: 12214 - DNA, 763 bp, Homo sapiens
acacatacgcatttcttcctcccttcatgtaagtctcccatatgaagtttgccataaagtcctgtaagttcaccccaaagcttcattcaattgtttttaatccattatcaagggatgaaaatgtcaccactctaattcaggcccttgtaatctctgtgatataccatagaagattctttctatttttcagggttttaatcttcaagttaacttccatagtgtcaccgtatgtatcttagcaatcagaagcgtcctcataaacgggagatgaaacgtcagagtcacattaggaatcctgaggctggaaacagaggttcgagtgatgggaggaagccactaggaggcagggaatgcaggctccctagaaggagaaaaggcaaggaagcaaattttaccatcagagccccagaagaaaccagccctgtccacacccatatccccaagatttaactttatttcataagatcagttttaggttactgaccctcagaactataaaaaattaaatttctgttgttttaaactgcaaagcttgtatttatttggtaaagaagcaatagaaaagtaatacggtacatcttcttccacacttacttcaagcccacactctggcacttccaaaagaagaagagtaacagatgaacgcgaactgcgtattccattggaatatggctggcagagagagcaagaataagaaactttggagggcgccttcaaggagaagtagcatattatactccatgtggaaagaagcttaggcagt

SEQ ID NO: 12215 - DNA, 622 bp, Homo sapiens
  misc_feature 1, 2, 3, 4, 5, 600, 601, 602, 603, 604, 605, 606, 607, 608,609, 610, 611, 612, 613, 614, 615, 616, 617, 618, 619, 620,621, 622: n = A,T,C or G
nnnnngaacctacgactatctcactccaaagtctgtgctgtcaaccaatatgtgaaaatctcttagactatattcttcaaaatgtgaaataaaccatttccactttttaaaaagagttagttatatgtagcataaggtaaaaactatttctttttgaaactatactattaatatccatttattttaagttctaattagactaatactgccctaaaaaacatagagttgattcttaagtcaaatcacttcaaatcaggaaccctttaagattcagtttaatcagttttgtatataaagtattagacttactttcaccatttttgcccaaaaacaaacttctgtacttcattaaataacatcaacaaaagtaaaaagctaacatcaacctaggaaaaccattttcaccgtaacagttatgtatattaactatattatatacttttaaattagtaaaaaaaagggtaaaagacatgaacaattatcaaaggaaaaaaatcctgaaatattcaaatgtttaccttactaaaggaattcttaatctgctgattatgtttcttaattgtaccatgaattacaaaaacctattggcaagatcagtcnnnnnnnnnnnnnnnnnnnnnnn

SEQ ID NO: 12216 - DNA, 611 bp, Homo sapiens
  misc_feature 204, 609, 610, 611: n = A,T,C or G
gagtcgacccacgcgtccgcccacatccagaagctgcttcccttcagacctacctacggcatgacccctcaaagtcagatatgggacaagagcctccttgaacaaactctggtatccctgcagcaagcaaggatacattgcagaggtgcccggagtggagtcagatgggctagctcagccacccctgcatctcccaaaccctgngagacatgtggcccatgggagtaaatccaggacattgactcaactctcagaagtgttattcagtcaaggaggctctcccttccactgaaggaaggaaagtcagctctctcctgaaaggccagatcactggctgagtagatgagacaagggtatgaaaggcctttgccatcttctttgcccagtcctgaaagcactgacgtaagagaccagtcagttctaatgtaaggtgtatattttagtgtcagggtattgcaattgtcacccctgtggtcaatatcattaaacaggtatgagaattcgctggcatagacttcctggtctgcttaataagaatccaactaaggatgtcacatgacagtttcccagaaaatgtgaacaagtgttcatctgacacacggcaccaannn

SEQ ID NO: 12217 - DNA, 3471 bp, Homo sapiens
  misc_feature 1, 2, 3: n = A,T,C or G
nnnacattatccacatttaacaccttttcagttgatggctgattatctgattttgcaaatggtgcctcactgtggggatcccctcctctattctcagatgtggtgatggtcccctcgtttttcgacgtgcctcccgctgtgggctgcagtgtcatatgaatctcggaagcacatttcagaagtctttctatcttttgttcataatctttgagtagtctcttcacttcttgttgactcttctgtgaaggcagctcttcacacagctccctcaggacttccatgtggtgattaagctggtacaggcagccttcctcagaaaagcaggcctcatgttctttgatgagacccttggtccttcctctacggataagtttcttttctttatttatttgcttttcaagttttaaaatattgtcactaagctttcctttttcaatatctatttttagttgttgaacatataaagacagttcatgatgaagagactcccatttggcacagacatctctactcttttcttctaaagacatctttatgtcctcagttacattattttttagttcttcaacagctttcaaatacttggccagactttttgtattagaaattattagtgcttccttgtgttttgaaatgagttcaccggggctctctctttgccccagtaactgctgagccctcatcatatatgattcaagttccttctgggattcttccatcttcagcctgatgtccaaatctggtgaaacgtcagttaagttcttcaacgctgcaatgagttttaccacattgatctggactttctctttagcttcttgaatctttgcctgaagcccagttgtgagaacatgttgaaaggactcctggcttgaaatattttgtatatccatttgtaacatatcttcacttcttgccataagctttcatcaaacatagagccctttggcaataagatgcttcaaagattcttccattgaggtgtccacatcatcttgatccaaaacagatttggcttctgcctcccagatttccacttgtccaatgagtttttcaacatctttagccacttttagttgccctgtgaattcttcattttctttttcatgtttctctccagcctttatattttgattataattttcaggaagttctactgacatatctgttgaaaactcaacagttgctttctcttctttagatagaatatttccagaattgtcaaaagtgggctgatcctgtttttttatcatcagtggcaggttcatttcaagttgagtttttgaaaccaactttctccatcttttattcagccttctcagttctttagaaatagatgatccaaccacatcattgctgacttcgactaagaaatttcctgcttcatttaaagtagcgtgttctagattccactgggctagtgtctcaaagggtacctctttaatttcttccttctttgtctcctcaaagcaagcccttagtaagcgaaggttttccacataagtagcccaacatgccagcactttttgtagagtggacttcacattatatatattttttctatacatacaaacatcagatttcaccatcatatactgtttattaatattctgacattctccagccaaattcttataaatttctccacatttttgaaaagaagtatcaagtcgagctaggaattctttttcttcaataaatttatgccagtcttccagcaataattccacagattctctgctcccatatttaatgttccaaatatccaattttgatttcacttcatctaccaaaccaagaactaagcacttgtagtaatgaaattctagaagtagaataaattttttctccaaaatgttgttgattcgtcttttcatttcctccaatttgttaggtggtaccaatggcaagtgattttcatccttattttcaaaggtaaggagaatgttcgaatgatgctcaaatctatccatcaggctcttgaataaagtcattttctcttgtatcagagtcacggcttgagagtgatcctgggaggctgacaaatcttcatccataagctcttctacctcctggagccaagcttcagtttgatggaggggtgggggcaaggcataatttagctttattttccatgcattaatctggtgatcgaggccatcccaggcttctctcaactgtaaatgatccttgtccagctcatccagatcccgttttattgacaggacatccaaaaaggactttttttcttcattgaatgactccataaaggacagcaggctattatactttttaaagtaggtatcattctctgaatcctttagcaacttctgtagtttttccttttgcagagttaaccagcccatagcatctttcacctttccctgagcctcctctccagtcccaggggcatctttggaatactgcagaaactgtgccacataggtcatgatggacttttcatcaggatcaacaacatccacatcttctggttccagcaatctggggatttttaattcttgttctgcaattctgaaggcctctctcagattgtctttgttggatctatgcttcacactcttcatgtcaattaggtctggtcgcaaggcatgaatgatggccaaaaaagccatcccatttctccaacttgacttaaaatcggtcacattgacagactcataggtggcgcattgttcctgagcccacaaaagaagggcctttcttgcagacatttgccatcttgcttgcactttagagcatttcttagctggaggacttgaggcaggagatgagtcaaccacactcacatcatccagggaaggctgattgtaattgcaagaaagagtctgggcaagcttctcaatatgaaagtgcaggataattgtccaaattaggccaaggataatggatgggtttccatcaatgatatcagtaacatgaatatttattagcttaattgatcggtttcttaggaatgtcaaggcatgttctatattgattctacactggaaggtattagatcctttatcccgaggcaactgttgcccagaaagtacttctagcagatccaggaggacatgcccctttttaatgtctgtgaataggtcggatataactgagggagaagtgtgcctggccaactgtgagtttatccagcacgtgaaggctttcttctgggtgtcttcctgttcagcttgcaatgaaatatggagatcgtcgatgccccaggaaccctgttcatcttcggtgggaagctcaggactagatgccattctttgactcaatggagattatatcatgtccatctcagttgaagaagtgaacgtccgcccggccgaggggcaagggcgcgggccggggccgcccgaggtcggcgccccgcttgcctggctctctggatcgcgccttttgctcgctctccctctcgctttttcaggtccggccgaaggctctgggcgcagctgagctcgtgcc

SEQ ID NO: 12218 - DNA, 561 bp, Homo sapiens
  misc_feature 561: n = A,T,C or G
acctagcttttattcattttattattcatctttattgctttcattgcacatgctgttaacttcttatgaactctttgttctaataaataagcatatccaggtttttcataaataaatgaggagtctataaattcttactagttttaatagaaacattgccactaaaatggtgtattctagctgtgtgagcttttggaaaatgttttcatttcctttatgtttgaatgttccttccaggtctttgaaaatatacattctgagttgaaaagctttataataggtaaaactcattaacccatatactttccatgctgggcacagcaggtgtggtaggtagaaatataagatgactcccaagatttttgcaccctggcatacacatatgcttttccagttgttgaaacactaatttaggtgctgctgtgaagggattttgtagatgtgaataatgttccaaatcaggtggccttaagatagaaagatgatcctggatgggccagaatctatcagttgagtccttaaagggaacagcaccctttctgacaaagagattcaaagcan

SEQ ID NO: 12219 - DNA, 515 bp, Homo sapiens
  misc_feature 511, 512, 513, 514, 515: n = A,T,C or G
acatatacttaatataagtggtgtatgctcaaaaaattttcactgttagagcacaggatcattacagtttagtcagcactgtcctaacgtaaacctaaataataccatgctctgatgagtggtattgtggcaggtcatgaggtgttgtgggaacacaaatctggccaagtttgccagaaaatgagaggcatttcatgaaaagcagatgatatagtcaaggtgatcttttttatcattgaacatttgtcagctaatcataaacttttatttattgtgattattaaataagtttggtaatgattattgagagtaaagtgacaatttctggtgtgcaagattgctttccctgacatgaatacattgtatcattgctatgaatgtagccatccgttaggggaggattttatcacagacttgacatagacttccacttaacatgattacttagtagcctccttaaacatcaggactaaaaggaataaccttacatcttagattacattattgaaannnnn

SEQ ID NO: 12220 - DNA, 795 bp, Homo sapiens
  misc_feature 1: n = A,T,C or G
nccaagattaaggacagagttccctccattgttcattgatttgtaaaccaaaatgtatctgtgacaggtattaatcaattgagaagagttttttatttttatttatttatttatttttttgccaaggttcaggacagatccaggtgtctttctccaaagatgattatgatggtgttaatatttaaaggggaaagtggcctagaggggaacaagggagggtatgatcatattactgtatccacatgttgcaggagaaatggagcaggtacttgttactcttacagatgtctcaattaattttaacctctatccctaatggtgtttaaattttggtaaagaaaaattcattttttctttattttccaagaaatggtaagctatctttgtccctatgggagatgtggacagagaaaactttctgtctctgatgtcttttgtgtgagacaagattttaggaaataaataagtggtgcagggaattgtgagattacatttcacctccttttctgtctcctctctcttttatataatctttatctctgcttctaacaatctccttatcagaatttctaacatatgtaatgatgagagagagaaaaactgccaccacaggatcaaatttcatttctaatctggagaaacaggagtctagttttccaaacatttttattctaaaaaagaaaagctattaaaagggtaagtatattctccaaaaagtaaaattatatctcagggctcctattaaaaaatctgtaaggttaattcaggtttgtggcaagaaaaattgctgtgccc

SEQ ID NO: 12221 - DNA, 477 bp, Homo sapiens
  misc_feature 477: n = A,T,C or G
acgcatagctatgctatgtgacctaaatgccaagttttcattttgttttatattaatattagggcttctcatatttcatctctgtttatgtttacataaattacattatatcaaatccagatttgaagcatctcggaatacttgagtagttcttgctaatattttcatagttcaacttttatttttaatgttagtctgggaaataatgtttgtgtgtataaatttaattcaatcacattactatgctcctacattatgttttcatcatttgcacaacaaagtttgctgtttatctaatatatatacatatgttttatgtccatctaaaaatatgtattttcctgttttataacagccaaataatgctaggtatatatattaaacacaaaagcctgcaagaaaactttttcctttataatattcatatttacgtgttaagggggcataaattatttttaacttatatggttaaatgan

SEQ ID NO: 12222 - DNA, 365 bp, Homo sapiens
  misc_feature 365: n = A,T,C or G
accgatactcaagacaccttttttagttttgatttagaaggactttaggaattagttcattcccttcattcactaagcatgaatacctaccattttcagccctgtatgcatgagcagtgcaaaataaatatatttcctgccttcaaatcactcactgtttggagatattagaatctcctagcttaatctgttggatttttcatagttttatgatttttagattattttcctgcttgtttcttgatctgtattgaccccttaaaagatcaccatactgttgttttttgagttttagtagaacatttctttcatagtggaaaatgttgtttcaaatataatcttttgtgggttaaatattacttagn

SEQ ID NO: 12223 - DNA, 1656 bp, Homo sapiens
agggagtcgacccacgcgtccgcattttcaaccatgaaatacttcggagggcataaaaatatatcagtatgacacgctgcagttgaaacttatggtgaaataagaaacgcgtccgcccacgcgtccggaaacaaggcagtaaaattttaatcactactgatgaaacttgattttatataagagttttaatattctgcttaaaatgtaaaatgcaagaagactttgatggtttcgttttttgttagaaagaataacatctaaaataccatatcaaacttcactgttagtacttgagaaaaaaatggtttcagtgagagaaatatttacattaaacaggttttatatagacagcacccttgtaatgcttggtaaacaatctagaattccaaccaatattttagaaaaatttctaggtattttattatggtgttgtataagtcaccacattcaattttccgtggatgaggtatcaatatacagataagtaaatctcttaattgttttctaaataaactttatatttaccacacacatgaaatcatcaaagagaattacagtacatctgaagaactggaattgaaataacaaaaataggatcctcagtgggtattctctggtgatagagcttcaatttttaatttcaattaaaataaataggcttgatataattttcaaactgttttatatcaagcttgcgtattttaattgaaattctgaaattgaaatagttgaacatttagaaaatgagcatttttgagtggcttggcttcagtacacaatattccaacaccattgtcaatacttagcgttataaaaaggtttcagttactaacatgaactgagagatacagcaaatattaaagatgattgaacatatgaaactgaaaaactataaaaaggtagaagctattgtaaaaatgaagaaaactgaaaaactgaaaagataagaagttactgtaaaaagaaaacggttataccatttgaagcagaacaaaatgttccaataaactttttttacttaataatagaaatattgaaaatgcaaaactctgaaggtattacaagggctagacaaattttgaattgtttggcataagaagggagaggatttattgaatattattaatatgaagacaaaatctgcttattgagatatctcacctattatcattttaatagagaagtcattggaaaagtttgttgtaattctctttggtttagtattggctcaaaccactgtgtcatatagctagtgacagacatatgaaatgaaaaattacagcaagctgggtgcggtggcttatgtctgtaatcccagcactttgggaggctgaggcgggaggatcacttgagctctggagttcaaaaccaacctaggcaacatagcgagaccctctctctacaaaaaaaaaataataataataattagctgggcatagtgacacacacctgtagctcctgcttcttgcgaagctgaggccagaaggtaaaggctacagttacctatgattgtgcctctgcactccagcctgggcaacagagcagactcagtgtctcccaaaaaaaggaaaaaaaaaaaatctgtagcaacaattttcaaaaaggctttagaaatcgttggaatgatttctttcaaatgatcggacgcgtgggtcg

SEQ ID NO: 12224 - DNA, 986 bp, Homo sapiens
  misc_feature 973, 974, 975, 976, 977, 978, 979, 980, 981, 982, 983, 984,985, 986: n = A,T,C or G
gcgtccgtattggtagtcctagaaataatagccacaaaataagttggatttggagatacaggtggattaatgggtagttggcctactgttcaccaacttttaagatcgaaaggaaaacttgtgacttttttaaaaaaaagactgatgacatccttcccaacatttgttgcagatctgacttctagctctgacagcattacccattctagaagcatctctaatgtgacagtttaaccactgtgagtgcttttccattgcaggaatccgatgatgtggatttacgtagggagtctgttgatccacttggaactttattaaccccatggcgcccatggggccaaacattgtctgctctatttcacactttcatttttctttgtgatctcatgaaattttctttatctggcttgccataaaagttgtattgaaacatatttagataagagatgcttgtggtatggaaatttaggttgctaatactgactgggaaatttatcttaaacaaattgattgataaagatagttgttcatcttattatcataatagataaaatatttctattgatatgtatataaatgtatgcatgacaattaaatagataataggcagcttgtttcattataaaggtaaagacattttgggaaggaaagcctttgttattcaatttttttgtgaaaagaaatattattaaaattttaaaactacattgtgataattttaaacatagaaagcatagttatagttgacttaaacccgattttccatgtctccctctttcctttcagttagtagcagaaagatctgaatggcaaggatggaatgacgccttgaagtagtagcagctggggctgtgttgagtgccataagctggcttgttggtaggttccaaattacttctagttctggctctgctggagaatactgaagcattgctcttctttagaaaactctgctcaggatgtctcctgggannnnnnnnnnnnnn

SEQ ID NO: 12225 - DNA, 652 bp, Homo sapiens
  misc_feature 651, 652: n = A,T,C or G
gagtcgacccacgcgtccgcggacgcgtgggaagcaatgcttgaactctgtacacacagcagaacttgatttggagccatgctcattcttgaatcagaaatgtgtgagaactcttctgaccaccttaattggccatgtcaggtgctttggggatgaggtgtgaaatcagaaggaacagccaaagtaggagagtgagggcagggatacgtgggagaggagctgagtgagaagaagccagaatgccatttgcacatgaagatggacagtccaagacaatgagcctaagaagaaaacaactaccaataaaagaaatattctcaaaagtgtcattaagaggagaaataagtttaattattaatttatttgcatcttaaaaatcaaaacagtctctttggttattgtagtatgtataagatggatcgttctccctttacctgttgtgcgctctgttaaccatttagcacctctccaggagttggacagaggaaaaatgcataacattaacaaatttgctgccattcaatattagatcatatatgttagcatacatctaccatagcccctgaccaccttcatcccaaggaaaatgaagatgcagtctcaattataaattctgtggaaatttcagcccaaaatgactggagaagtcann

SEQ ID NO: 12226 - DNA, 364 bp, Homo sapiens
  misc_feature 1, 362, 363, 364: n = A,T,C or G
nagtcgacccacgcgtccgggtgaagaacacctgtgtcttgtagaggccccagtgctcagaaccgggagtgacaacttgtgctgtttaaaaagagagcaactgcttgcgtctgagatcattaggggtttggtctttgtttcccagtgctgttgggctgcttagggcctcctcttgacctgtcctcccacagctcccctgcccttccccatcgcctgtctcctctaacatcactaggaaggagccccattcttgtagcggtcactgtttgtttgatttatgtgggtttttttttttttttaagtagataaaggttttttaaaaaatcaggattctgaaagaatgtgtttaataaagtgggccnnn

SEQ ID NO: 12227 - DNA, 346 bp, Homo sapiens
ccacgcgtccggtaagtggggcaggcctttattgggcccatcattagtaagaggacacagccttccaagaggaggttcttgtgagccgggcaggacaaggcgggagggcagggggagcgggggttgtggggaacgggtcccagatccctttgggagaagttgacccgaggttttgctcctgctccagccctcccccctcctgcacagagccctgcctgcccggcctgtgggttaaccccagggctaatccaacagaggtgggtctcaaatcacttgtgagactgggcacctgggtgggggtgggggaaaggtgggcaaaagaaggagtgagtgttggagggggtgg

SEQ ID NO: 12228 - DNA, 554 bp, Homo sapiens
  misc_feature 1, 2, 3, 4, 455, 554: n = A,T,C or G
nnnncatagtagatatgtgccacacttaaataagctctgtatgacatgaaattctgttaaaacattgtaattcatggcgacttgtaacttataaaaatactacttgcatgggttacttgatttatggatatatgaaaacctttaggacactgatcttctttctctagaactattcttctgtcggtcatgcagaatgctgttattctgaaaagtgtccctgttgcatatgatggtcactttatttggggggattcttcataagatgtgagatgttgatgccagtctttcccaagtaagtgctcgtaaaaaaggactactaactagcctgcatctgtctctaactgggaccaacgggtctgctgaacgaaactgaagagctctaacattttcacagcttggagaagatagaatctttaaaagcacaactgaagcttgatctattttacaagtgcatngatggcccctgtccttctctggatcctgtcatttgaaaccaactcctgttgtatataggaagaatatgggacattcatatttaagaaaatttgatgtcn

SEQ ID NO: 12229 - DNA, 580 bp, Homo sapiens
  misc_feature 1, 579, 580: n = A,T,C or G
nagtcgaccacgcgtccggatttgcaaagtggaaggaagaagcacatttaatgttgggtgggaaaaataggacttaatagaaatgtttaaaacaggttgtatggatagatctggaaacagccctaatcttaatttgggcaaagcatgaaccaagggtctgcaagggctggaggttggtttcaagtctcatcgtgggctgaatgttttggagaatcttttagctcagatttgcaggggaacagaagcagtgtggcataattagacaaatagacaggtctatgagtagactctgattacagagaccaagcatcctcaccatttgcctttgcacactggagacccaggaaagcctgtggtatagtacatagcctcgagaactggagaatattgacatttccaaccttggcctctgtcttagaatttctatttctgtgatgaaacaccatgaccaaaagcaagttgggaaagaatgatcttatttggcttgtgtagaaactcaaactgaacaggagtctagagtcaggagctgatgaagaggccatggaggggtgctgtttgctggcttgctctccatggcgnn

SEQ ID NO: 12230 - DNA, 427 bp, Homo sapiens
  misc_feature 1, 2, 394, 395, 396, 397, 398, 399, 400, 401, 402, 403, 404,405, 406, 407, 408, 409, 410, 411, 412, 413, 414, 415, 416,417, 418, 419, 420, 421, 422, 423, 424, 425, 426, 427: n = A,T,C or G
nnacgcgtccgatcaccaacagttccctcgcctctgtacccacaaatcaccaacacttccctcacctctgttacccgaccaggcatcaaaacttcccccgcctctgttaccccacaggctagcatgggcaccaaagcttgcttcacctcctctatcttcggcagccttcttcttctgaagctgctgttctgaggttcctgggctctgctccatccagtatcccatgggtgtcaacacctttctcttcatataccttccagttagactgtccagtgggttggaagtcacaggactccaggcaatgctagcagccacagtatctcctttattaaagtgttgcttgaggtctaaaaaacaaaaaacaatctttaaaaaattataaaaatggattaannnnnnnnnnnnnnnnnnnnnnnnnnnnnnnnnn

SEQ ID NO: 12231 - DNA, 555 bp, Homo sapiens
  misc_feature 1, 227, 551, 552, 553, 554, 555: n = A,T,C or G
nagtcgaccacgcgtccggttgcaggagccccgtggtatgtgtacccagtgtgaggataagccgaggttaacacaagcagtgggaattccccaggccagtgtaagctgcttatgctgttatcctgggcagccttgaggcaggagagtaacgtacaaaggattatttatgaatttgccagtatttttgaaagaattagcatcacagtgaaagtgacataaaataattntagtagaaacagtttggtgaaataaaggccatttgggagtatttgaacagcaccatagtgcattctgggttctggcatgttcacagcaggaggaaaggcattttttagcatctggtttttgtttttgagactggggctcatatatcccagaccagcttcaaacatgtaactggggaccttgatcagatcttgatcctcctgtctctacctcctaactactgccgttctaggtctgcaccttggcactctgtcttatgtggggtcttgtgtctgccaggcaagcattccactgactgagccatatccttcgcctcatctgctcannnnn

SEQ ID NO: 12232 - DNA, 596 bp, Homo sapiens
  misc_feature 1, 596: n = A,T,C or G
nagtcgaccacgcgtccgtccaggtcctgcgctgtgcagcctggtgggagctggccacgtgtggatgggtccatgtccccagcaagtccatcagctcagacatgcaagtcttccaggacactgccctctgccccagcagtggcttctggactggcatctgtcctctacctcaccaaccaggctctggactccatgacagatctgcctgcagggagcccagcacacatgctgcatgtcaccgaggcagaggccacagtccccacactctgggatagaactcgggagccacggccacccacacttgcatgggaaagggtgtctgctgcaggatgacaagcagggacagctgggtggtcctcctagagctctggggatgggggcaggggacatcccctaggcaccctgtctaaccagaatggatagttagaggagcgctggggcctagccacctgcttctgccattggatttgacaagccattttatattgggtgtccaagcagtcctttcacctcttgggtagtcggaggtgctccgcgaggtcccgctcgagggccctggctttaggttgtcaggggattaaacagcttttcatacn

SEQ ID NO: 12233 - DNA, 412 bp, Homo sapiens
  misc_feature 1, 395, 396, 397, 398, 399, 400, 401, 402, 403, 404, 405,406, 407, 408, 409, 410, 411, 412: n = A,T,C or G
ncggaacgctgggaagcacacatctatgccagcgaggatgaaaactgagactggaagcagggggccattctcctgcctcactgcagtcctgtggaggccgctagacctgcccccagtctctgctgtccctatttaaacatacagcccagctgatgtttgtggcctgcagttgatttggttttccctggggtgggcgagtgattcgtgcttaggggtgttctcagctaaggctgaaatgataatccaccgatccccctcacatccctcagccctccgcacagcccagagcttggatctgtcactgcagaaagaaggctctgtttggggacctgccattccactcttgccaaccccaaacgtatgcctgttgctatgaaataaacctgtcctgaacnnnnnnnnnnnnnnnnnn

SEQ ID NO: 12234 - DNA, 349 bp, Homo sapiens
acttttttcttttttttttttttttttgaaatgcagtccagcctgggcgacagagtgagactctgtctcaaaatttaaaaaaaaaaaaaaaaaaaattatatgggactggaagaggaggtccagtccattgtaacctgtggataataccagctccatgtcagggtggttctttcaattcattcaccaagcaagcatgcttttgaggcacgctctgtcctacacataaggaaatcagacatagggggtcccactcccctgaactcataatccaagaggtggggagacagacagaaatgagtaggtgataaggatgggaggaaatgaaggaggatgatgggatagaggggc

SEQ ID NO: 12235 - DNA, 717 bp, Homo sapiens
  misc_feature 717: n = A,T,C or G
acccaagcatcatgtgaacactgtgcaaatgctatacagagagtcacggcagcttaaccagatggagaacaaaaacacagcagcgcacaacgaatgagtaagtaaaatccctatgaatcaattcactcaggcataatactctaaatccttaaaaaggggggaaaaaaagaatgtaacagaaatctatttccacaatacacccaagggtaactaatgtaactaactggctaatgacaatacaagattaaaataaacaccaaaacccactatacctggattcatattacttagatgagaagctaagttaagatattgtagggaagctcacttaattacactggtgatgaaattgtcttttctcttttcttgagtttaagcagttatgccttgggcccaactttcctgaccttgtgagtaaattgagccacatgttcagcagaagatatcacagtagctgtatttttataagaaaattcctttttaattataaaactaaagcagagaaaacaaaaaaaaaaacaaaagggaagaaaagttttccctattcccaccaccttcagatcccagaccggttaaatctacttccacgacccctttgagagtgaagggagggggtccccccagaatctgggcgggcagatagaagtgggctacctatgtgggcagcctcctgaagggccttcagaagctattccgtaactttacccttccttcaan

SEQ ID NO: 12236 - DNA, 416 bp, Homo sapiens
  misc_feature 1, 414, 415, 416: n = A,T,C or G
ngtaccaggctatgtgctaagtatgttattccacttaaccagccctcagtctaacagagcagatgctattattatcccctttaaacagtgaagaagcgaggcttagggggaactgtgtcatgccccagggccacatggccgggtaaggggtccagcagctttaagccagggaggtgggcccaacgtccataccctcagccatcttcatcctacttcatcacagggtcggggaagatacaagtgatgaaggcattgtggtacagactcttgtgattggccgagggatgagtgaggccttgaaggtgccttcatcaactgtggagtacatggccaaatgctctaaggggacatacacctaaccactcgatttagcagaaggaggtctctttggtggaagcaggcaccacaatgcannn

SEQ ID NO: 12237 - DNA, 892 bp, Homo sapiens
  misc_feature 891, 892: n = A,T,C or G
actagatccaggatccagggaatccctgtcttttaaaaagccaaaagaggatggggaagacaatgggaaccatggttgaaattgcatttaaggaaagagcaaagtaaattatgggacttagatattcacaagtaagtctgttgaacattctgtcttatgtaaggtatagccttagcaattagagtttttgttaagtgtgttactactattaataaaaattgcatggagatgggaaaactattttttacttgtatgaaattccagttattgttttgtctaattatcaacatttcttctgccttctaagacaaagtaaaatatagtaattggtagagtaaggggcttaattcaatttagttttatatgttaatggccagaaactaggtgcttgcttccagtcagctttatttcgttcctactatctctctaaataatttaggatataaaattgactgaataaaaaccagtaagccaaggttttcacccttcgatttttataccaaggcaagatggagaagtatctggaaagggactgtcccaggattactagcagaaagaagcaaatactcttatccccatagcccttatcgtcaagctgaaaaataaagaacaaagcaacaagtaaacacacctatgaaagcaacttgtttgagctgtctcaacttctctgcagctgttctggctgtatctgtattctagtacttctttgaactctagagaaaagtttgttcatcaaaacctcatgaagtttaaaggtagtctattgccttttgtcctttttcaaaaatcttatttctttatttaaattgacaggtaaaaattgtatttttatgatgtacaacatgatgttttgatatatgaatacattgtggaatggccaaaccaagcaann

SEQ ID NO: 12238 - DNA, 425 bp, Homo sapiens
actagcaaataaaacataaagaacaagaaaaaacagaaagtgaatatcaaatcttcatacatttagtattatgactgaaactcaaatgatggggaaaattaaaatctctggcaaaaaaatatgggtttcttctgcaaatttcatgctgtcatgaggaaccgatggacttgaaagatcagggtgcagacaagagagtaaggagaagtcatgtcgccagccaagaaaatcatgtcttctttgttctctgatctggcaacaaagaattgaaggtctcatgttgccctggtaacaccgggagacactcccagactgctgaaagggctctacccagcccacacaaagtgtcacaggtccaaactctggccaaggactctttggagcagaaacataactgggtttgacactcactttagcttctttaggcg

SEQ ID NO: 12239 - DNA, 447 bp, Homo sapiens
  misc_feature 447: n = A,T,C or G
acattcacggtgttgtgcagctatcactgctaactagttccaagatattccatcaccccggaaggaaaccctgtacccagataagtagttattttgatccttatttacatttactctctaatttctctttgaaaaagaataaaagaacctaagtttaaattacagcataagaacttgatgtgttttcatttcttctgcaacttgttgattcacaaaaattggtaaagatttgaagctgaaatgaggcgagtcttagcaaaatgaaaccaggattgaaagtcctggaaggaagaaacccaaaaagagattgaggaaaaaatcaaaataattcacaattctgtccaggccccatccttgtcagaaagccagattctacttcaatgactgatagtgctgaatcttttttggaaagaaaaaaaaagaattgaaatagaatgctttgaatcn

SEQ ID NO: 12240 - DNA, 346 bp, Homo sapiens
  misc_feature 1, 2, 3, 4, 5: n = A,T,C or G
nnnnnctcgagcggccgcccgggcaggtacgcggggacctgctgtgctcttgcttgcacagtgtcctggagctggacctggctctgggtttccaggaagcagtttgactaaaggcagcaagctgcttcctctgctgcctgagataccagattcccaatggcgaagattgagaaaaacgctcccacgatggaaaaaaagccagaactgtttaacatcatggaagtagatggagtccctacgttgatattatcaaaagaatggtgggaaaaagtatgtaatttccaagccaagcctgatgatcttattctggcaacttacccaaagtcaggtacctgcccgggcggcc

SEQ ID NO: 12241 - DNA, 368 bp, Homo sapiens
  misc_feature 367, 368: n = A,T,C or G
accacacccagattatcatggcatattattaattctttccatgcacaaaggtcttgcagaaggacctcaatggtttattacatcagagcacgcatagtagtgcagattcatatgttctgtctccaaatagtagattaccattgccttccagtgatggcactgtgtccttgagtattggaagaaaaagggaagtagcccaagttcctcctttgtggatgacctggagatactctcctgagtttgactgtaaggtgaatcaagaatatagacaggcatccttcattgttggtcttaatgcatgagatggatgactttataacatgtaatgatgacctagggtgaagctcaggtagattcagaggaagann

SEQ ID NO: 12242 - DNA, 335 bp, Homo sapiens
acaaaatacaaaatttggtttagctaccaccctatttagtgccaactccttattttaacctaattagcatcatttttccctctgacaaaaacaaattacacacacacacacacaggagtcattttctctcttttgttaagtatggagaaatgttccaaagaaaactgatcttaaaatatatatatatacttgaaagcaacttctcataataaaattaaataactttttcctgacttctaggatatgaaaagctttatatatgggcaaaaaagtaaacatataatccgttcataatttggagttggataagtaacaggcttagaaagcttcaacta

SEQ ID NO: 12243 - DNA, 431 bp, Homo sapiens
  misc_feature 1, 2, 3, 4, 5, 417, 418, 419, 420, 421, 422, 423, 424, 425,426, 427, 428, 429, 430, 431: n = A,T,C or G
nnnnngtgagaaaaagtggtgcctgctgggagagactgcacctaaatagagcagagatatgtttcttccctttctgttccttcttcctgatggctggaagggaatatggaccatcttggatcatgtggataagactaacactcctataggtggcagagcaacagaataaagggagtccaatgtcacagagcagaactagcacactgcctcagattgacaatgatagaaaaataagctcttgtcttgtatttaagccactgttatttggaatctatcccatgaaacagccccatgctctaattaatatgtaacggagatgcttctttttctaaggaattttggttctgaaaaatgccgccttaaaagaaagaaccaaaattgaatagtataagcaaagaaaaggttaaatttctaacnnnnnnnnnnnnnnn

SEQ ID NO: 12244 - DNA, 408 bp, Homo sapiens
  misc_feature 1, 2, 3: n = A,T,C or G
nnnacttccaaccccatgtcatctggaagaggactcagctggttgatcgtctatcacagtttgttggagagacctattttttttttacattcagatgcttctcagagttctgtttataaacattgtcaggagcagagagtgttagggatcttccacttgaaagaaaaatgacaaaaagaataaaatcactacttgacttgcctgcggttttgtgttcagcctttcgtcttaatgctattgaggattactcttgctcactagagagcacagaatgatgttgtgtcagcaaatcgaaaacagtataaaatgctatgtgcgcctctcatttctgattaactacttgagaccttttcacattaaagtttagttgtgttcaactctttcgacacgagagttcaaagaccatgt

SEQ ID NO: 12245 - DNA, 573 bp, Homo sapiens
  misc_feature 566, 567, 568, 569, 570, 571, 572, 573: n = A,T,C or G
acggtggcgcaatcttggctcactacaacctccacctcccaggttcaagcgattctcctgcctcagctgcctgagtagctgagattacaggcgcccgccactacgcccagcaaattttttgtatttttagtagaaacggggtttcaccatgttggctaggctggtcttgaacccctgaactcgtggtttgcccacattggcctcccaaagtgctgggattacaggcgtgagacattgcacctggccggtatttctgctttttaaaattatttatgaatttggttgtctcattcccatgcaggcttttctactttttacttgggaaaattatttaacttctgtgtaactgaacttattcatatataaaatggggcactaataatacccacttcagagtgttgagtattatatgaggtaataacatgtaacggacttagttaatggtaagcgctatatatgtggtagctatggtgattatgattatctacaaataatattgttctataagtgtttcttagttcttttgaaagagggcttttcctattattggaattaaagtggaacgnnnnnnnn

SEQ ID NO: 12246 - DNA, 575 bp, Homo sapiens
  misc_feature 1: n = A,T,C or G
ngcgcacggtgcacctcaagctcatgaaccaggccttccagctgctgggcgcgactcgagcggccgcccgggcaggtactgccttagtccacagctgagtggggctggaactaagctacagggttgcttcagggcctacagtcaagacttaggtcttcaggcctaaggtgtcacaaacctgcatgtctcccttcaggtccttaagttagcgggcctgctgtattgagaggggctggagccacttttcaggggtgtttcagggactgatgagggacctaggtcaggtggcctgtttgcagggctatggacagccccatctccctccaggatgctgggtaggcagaactgctctctgaccacagctgagaggggcttatgccaagattcagggttgtttcaggacctgctgtgggactgaaatctgcctgcctgtcctgaggacacagaaggatgtatctcctgactacaggaggatttctgtgcaggatttctgtaagactgtggctgagtggagctgaatccccgattcagagctttttcagcatatgctatgggacagagattggcaagtctgt

SEQ ID NO: 12247 - DNA, 448 bp, Homo sapiens
  misc_feature 390, 423, 448: n = A,T,C or G
acgcgggatgtccctgaagtcctccaggcccacacctccacccgccttctgtcctgtatctgcggaaatatttattttctgtaatgaactttcttggggctccagacaccctctcagcctcttcccacacagaactttgcctacacattcctactacccctggaattctaactcagatgtgggtagcagcttcctcaaagagaaactttttcccagctgggtgctgtggctcacacctgtaatcccagccctttgggaggctggagtgggcagatcgcttgagcccaggagtttgagatcagcctgggcaacatggtgaaactccatctctgtgaaaaatacaaaaattagccaggtgtggtggtgcgcgcctgtaatcccagctactanggaagctgaagtgggaggattgcttgagcccangaggttgaggctgcagtgggctgcn

SEQ ID NO: 12248 - DNA, 436 bp, Homo sapiens
  misc_feature 1, 2: n = A,T,C or G
nntacgcgggtcttctctgctacttatgccttttcttcttcctcctcaccctcatggctccaggtccatgcccagggacatgttagcatgttgtcaggtctcaaagtatctgaaaagattgtcttctctgtggccaggctgcttagaggcagcctgatataaactgtaaaaagggggagagtgtttctctgtgtactctgcatccactcttcatgcatttgctccaaaccaaatctgctcttaagaagggatcagaccaacctgtttagagtgaggtagcaatgataggttagcagtgggtaaaccacataaatgaaactctaaatgaggaattccaccttgttaaagaagtaaggtgggccaggcacagtggctcacgcctgtaattccagcactttggggggccaaggcaggcggatcatgaggtcaggagatc

SEQ ID NO: 12249 - DNA, 398 bp, Homo sapiens
  misc_feature 393, 394, 395, 396, 397, 398: n = A,T,C or G
acaaaggttcagtggtgagaagagggagcaaggcctttggaataatgaactccagttgttcctcataggtgcagcagaaatagcgagaggtcaggattatggagattggtaaggcgagatcatccaagggccttttgcttggtaagccattttactttaatcttgagtgccatagggattcattgacggattgatacagggaaatgaaatgattttttttttttttggttgggggagacaagagtcttgctctgttgcccaggctggagtgcagtggcacaacgtcggttcactgcagtgtctgcctcccaggttcaagcaattctcatgcctcagcctaccttgtagctgggattacaggtgcacaccaccacacccagctattttttatannnnnn

SEQ ID NO: 12250 - DNA, 3266 bp, Homo sapiens
  misc_feature 1, 2, 3266: n = A,T,C or G
nngtcgccattgtgacccgagaatttaatatacttgtgccccgcgcgtgttttgttaaccgtccgcccgagtgtcccctcaatttctacccctcgccccttaacccaaagctaaatccaccatctggtattctcccctagagcaccagatgaccatctgaagctggacaagtgtctctaacaataaaagacgactgtttacaaaacaaaaagcacaaacataattatggaataaataaaaaacaagggacaaacagccaactgactctacccacttggtgagaagtgatatacttcaactatttttttaatgcttctgaaagtttcttggcccacagaggactagggtgcaatcattccctgtgttagtgagttgggtttaatgcagcttcaaaattagggtaaagggacttggtgaaatgtttacattaaatatttcactcctacccattcttcaggaaaaaaggtgagctcagcaaggctggatgccattaagagatatttactgttttctttttctatagctaaaaaagcaaactttacacgaagaagctcttgattaaggaaatttcaatagattcatatttataaaattttaaacatttggcacagcaaaatttggaaaaaatgggggagaaaaaataggtctggttgttgtccccctttttccacctgctgctggacagtgatgagatgctcacagaagaaaaaggcctggctttgtaccaggctggcgacaggtgctaccaggagtgggctgaggggagaaaaactatctcccactcttttggcccaggcaatgtcaacgacttccacattccctggcccacttcctgagcaaccccaggttcggctctgtataaggaccctcccctcccaaccccaaccccagagtgcagtgcaaatcaaccaacaatttactggtggaatggcaatcaaaggaaacagttaaacaccaaacaatttcttaaagccaaaaaatatttttcatggagttgaacatttttcgagtgtgtttttttcaagtgtaaaagcagtgacattttgttcaaacagaagcagcatctaggaattctggcacttgggttctagggggttacaggtatgcatcatggattcttctccctcgtatttaaaaaggcctcgtgtttctattcctgagttcataccaacacctgctagctctcccctctagcggacagtgggtggccagccagcctccctggttagattgggcaatgccaagcagacatccctcattcacctgctgggcttgctttctgattcagaggtaagtcgaagtgcagagaaagaaacttacaaaagcacaaccaccaaaggcagcctgaacggggagccctgtgcagactgagttgctggagactaccctctcagtcccattcctggggaaaggtaggtcactcatggaatttgaatcaaacatgggggaggacacctgccaagcaatagtatgatggactcaagtcatcccaggccatctactgtctccctcacctgccctaaccttttctgagtccctccctctcttgtgcaagcactgtagtttaaaaaggaaaaaacaccccccaccattaaaagacaaccttcaaatgttactcagtatataaagtttgcttaggctaaggtggagtcagaaatgtctctaattgtagacaccatctctgtgccacccttcctctcatcggatatggagtgatttcttctctcgctgctgcgacgcagatctgagccacagtcaggtaccaatgtacacgacataggcacatgtgcaaacacaaagaaggtgggctgctgcttctttctctctgcccctagtccaggctcctttgcttcacgtaagattaacactttcccattcctctgaagttgctggaaggacatttcccaggaagaaacaattcctcactgcctataaactgtagtctcatgtgggatagtcaattgaacatgagaatcagaacaatctgggcaaatgggtatggcaagaatgggaacaccacaacaggacagatgccaactctcattcatgccaggccttttggcatctgggtgccttctgtgtcttctttccacctcttccttcagtctcaacatccacttgtacccccagctacctcccatgtttccaggtatcattggctcttaactcccacaagcctgccttttggctacccatcccaacaatatcaagagggaatgactaagtatcagctagaaacttagccatgtctcaacattcctggattatctgaaaagctgtcgatgcccttttacaggtttatggtgacagacccgtatcatcttaaagtatgttcatagttaaggcttgacttaagaaaataagagaaccagacataatggaaagacctcttcaataatgttgtcatgcctctcagtgaacgtgctcacagtcacacttggtttggctccccaaacccacaatagaaaaggaaaaatgagtattttgtttttcatctgttttgtatttaaaggcattgggttacttcctcctgccctcttttcttccctgaacaagagtttacaactcctcatggcttcttaataggtgaagtaggtgaaaagtctgagaagctcacagcagggtttgccgtcccaactatgcagctgagaggtcgccagctcctgtgccttcccagccccactataattggcagtatgtttgttcatgtttcctgaaaacattttctttaaaaaggaaaagaaaaaaatgccaaacaacaccaaccaaaaaaaaaaaaaaaaaaaaaagaaggaagaagacaaagagcaacatccaaacattccccaagccccaccccagtaagtctgagattatcttattccttccctgaaataattataaagaagcatttcaggcaaaatacttagtattaatggtctcttactgctcaacctcccaaccatgcccttttcccttttatgtgtatctcttggagtaaaataaattcattaatggctttccacatacaaatacaatagaaaagaaagaagtctggaacctgactatcatgggaccaaaaagtatcttggccctttgggagtttccttgtcagaaagtataagcctcaacaggaaatagaggctccttctcctttgagttcaataccctccctgtgtcctactcaccaggaaaataagtgtgttcatatcccacctaatttacaacagaagataaccccatcccatccccaaaacataaaaatacaagtctatgcccatagaacn

SEQ ID NO: 12251 - DNA, 903 bp, Homo sapiens
  misc_feature 1, 2: n = A,T,C or G
nntttattagcagaaaacctaacaggccagattagacgatctaaacagatttacatatatagcatttgagaggtggggttttgccacttactggttatttggctcaatttctcttctctgtagaattagggacaataagggtatctatttcacagaatcgttgcaagaacaaatggtatgtaaaatgcttagcacagtacctgacatatatagatgtatatatatatacatacagacgtatgtgtgtacatgtatatagattttttaaaaaggcccatgaactatatttttaatgaaaaactacacaagtatatattaaaaggaaagcctagtgttctgtttataattattattattgttttttttttttagcaacagggtcctactatattgccctggctacacttcaactcctggactcaagcaattctctcatctcagtctcctgagtagttgggacaccactgtgcccaatttctattttttagaagaaattatgttcattctccacagtatacactcttatctgtagcttgcattattcacttaattaaggatcttggaaattacacagtttatcagatctttcactcctttagagtatacacgctgtatactctagtcaaccagtccccaataatttctaatcttttgctatttattataaacaaggactgcatgccatacacatacacataagagtaaaaagacaggatatagagttaggaacaaatgtggtaaggatattgtatgtcaaatattttattgggctatgcatattttatgttattttaggcaccccccccccacacaaaaaaaaccactatcagcaggaaatctacccatttacagatcagaaagattaaattaacctggccgaagtcagaatgctggttcccgcgt

SEQ ID NO: 12252 - DNA, 531 bp, Homo sapiens
actgagcctgtgtgtcaggtaatgtggttaacttaacattcattacagcatgtcatcaccacaaaggcctcttgtggctggtgctattttttttccattttgccgacaaggtttagagagattgaatcacctgcttagacccacacacccagtaagtgttggaatctggattgatgctgtaatgaccattatccagatccttatcaccgtttggggaaattgtctgaaaatccctctgggttatttagagtcaagctttcatctgggtcttcagaaagttgtagtggagccatctgcaccaccacacacctgaagacatttcaggactaacctggatgaaaagggaattgacttttagctaggataggacaaaagggcataatcataaaattaattcactttccttcctttcttttgaaaatttttctaaactgtgtatcctcccagatattccctggcaaagaagaccccagtgaagccttggtttggagaaactggactgtgtggggcaagtgaaggtggtctggggat

SEQ ID NO: 12253 - DNA, 461 bp, Homo sapiens
  misc_feature 461: n = A,T,C or G
acgcgggacaggcttcatggtgaggggctagaaagcaacgtcagggccgttgcccagggagcctgagggcagaagtcagaggaggaagttacccacttcaggactcaacttggaaggcaagtagacaggtctattctgctgtcagaaaaaatctgcacacttgagcttgggcactcaccaccgggtgcttagttttgttcttagagtagcttcctcacactgatctcaaagagtaagtggacttttggggaaggacttcctggtgggtttggaacagaactggggagaagtggctcaaaggcccccaggcagttgtgggggcagagaaagctttgggctgccagagaggagcagtcatctgtgtctccgaggggaagagcagggagcaggcctggttacagtggaaagggatcacacacagggtgcctggcccccaaatgctgcggaacgtggttggggcn

SEQ ID NO: 12254 - DNA, 849 bp, Homo sapiens
  misc_feature 1, 847, 848, 849: n = A,T,C or G
natatgtttcctcctcaccattttccaaaactctcctactgtgcaaacttttcacactttttaccacccaccaggtgaacaatttcacctgcaagaaatcgggaccagatgtctgggcaaaagaactttatggccttgtcccaccaaccccatcatctattcactgactacacacccagatttcccctccccagtaggacccgcatagtctcatcgcgttcctctgctgtgtttccccaacctcgaagttctcatttcataccaaaatctatcttaaatgccacatccctacagtgtgatctctcaccccaaaaactttgtaccaatttattatatgctgccttcagttatttatttatatatttgtctcttaaactaattgtaaagtgttcattaatactggcttataatccacatgtaagcaaattaaaagtatatcttaaacatttactttaatattttaaatattataatttcaaatgagttccaattttcccaacttgctcttaaccagtatttttttttaaccagttctctacttctttaatgaaattaaagaaactaaaataatttcaccacctttaataacaaataaacatcagggaaattatatgtgaacatgtaataacaaaattaaagctactgatctgtaaaaggacagtaagaaaaattagtattcaaaatgacaggagatatttaaatacgacactgcagcagcataaacatgataaatctcattttgatataaatggggaatttccaagatccagcttttatgctttgctattctaaaaattacttcataattctcttatcacattcagagtccagtaaccacaatgagcgnnn

SEQ ID NO: 12255 - DNA, 883 bp, Homo sapiens
  misc_feature 1, 2: n = A,T,C or G
nnccaccgcggtggcggccgacgtaccaacatgctttaccatgctgcaaaatttaggatcctgtggctgaaatattttgtaagaaatgatgcatcctgaatttatcattgaatttcaagtcttgaaataagtaaattcacatttccttgttttggcatagaagtgtttagctgattaaagtttttggcacttgttttgcatttcctctgagagggcactaatgtatgagagaaggtaaaccgaaccttctaagggaaaggaaagttaaggaggcaggaaaagcatctatagctctgttttcgggatttaagagtataggttctggaggcagactgctcagcagactggagccaggtcccaagtctggctttgcctgtcactagctgtgtgagctctgccttagtgagtctcagttttctcatctgtcaaatggaggtgacgagggctgtggtgaggatcaagtgaaaaattcacaaggagcccttagcccagtgcctggcgcttagtaaatattcaacaaatgttattagcaatttgctgtctgtaaggacacctctacagctactcagaatattctgagagctagtgggttcttggctaaggggaagatgaagagtattactgaatcgacacatttcattcttagtaaaacgatttcccatttctgttgcttgtgattttgagactgatgagggaattctctcttttcctaaaagccagcaggaaaggggccttttagtagagtcagtgtagctttctgaagtaaatggaagccttctccatttgacaggcattcagcctctagaagcaacgcggctctcctcccatacacattgccatccttgctgggtggccccttcacccaggccctctgcggggcagt

SEQ ID NO: 12256 - DNA, 323 bp, Homo sapiens
  misc_feature 1, 323: n = A,T,C or G
ncccgttttcatctctgccttgataacatccgtggatacaatactatccatactccaagccgctattgatatttgaacatgtcgtggctgcctcacctgcctgcgggttggatttcccatagtgggcttggctccctctggggctacatgttccccatcacagggaactatcaatctgcccagaggcaaacacaggccaagggtgcaggcagggcttgatatggaacccgacctcttaaccttgggggatcagccactgtgcccctgaggttataaaccaggggggattttggaaaacagtaggagcacttttctattatcan

SEQ ID NO: 12257 - DNA, 371 bp, Homo sapiens
  misc_feature 369, 370, 371: n = A,T,C or G
cgtacgcgggggctcacagtgggatcctgttaggtgtgggtggatgagagtcagggtccatcagtgtattcatttaactgttcatttgtataaccccgtttaagaatactgtcctccaagtgccaagaatggtgctcaggggattaccacctaattgctgactcaagttgctggttttgcaatgggcacagaactttctcttagtaggtggcatgagttgagaaggttctggatcagagataggggcccctctgatcacctccactcctataggtatgagacagagctggccatgcgccagtctgtggagaacgacatccatgggctccgcaaggtcattgatgacacctatatcacacgactgcagcnnn

SEQ ID NO: 12258 - DNA, 313 bp, Homo sapiens
acacgaaaggggttcatccactgttagaataatggattaggccatttccttggggagccacaatgccagcttctttggtcttttattcctcttagactagtcagataccacagagaaaattccagttgctgcttagagataaacatctggctgctattgtgtgggagacaagtccgaaagagaaagcagggagtcttcaattaaatacatgaacctatgtcttaaccccactggttgcacactgtcctgagtccagagacactcagtttcacactacccaaaggataattgtctagctcaggagagggatggt

SEQ ID NO: 12259 - DNA, 500 bp, Homo sapiens
  misc_feature 499, 500: n = A,T,C or G
acactcggccactgttctctgacctactgccagccctagtgctgcctgcaccccaggagctagctgtaagacctggggcaggtatgcagccgctgcaagccttggttccacaccacgcctgtgaaaggaaggaaggatacaaggcaatgagccacacagctccttccagcgccaacagccactgcgaaattaggctcttttgctttggccatacttgtataccggcattcgggctcagctgggcactggaaagcagctgttccgtgcttgttaaggtaattaagcaacggtggccctcgactaaatctatctaaccaccaacagatgggcatttcagctgttctaggcatttaattctttcccttagaggacagtaaatcacaaggaaactatggaaataaacgggtagcctacgcagcctggggctgcatttgttgctatttctacccatcgaattcaaaataccgaatcctggatcaactctccctcccactgaaann

SEQ ID NO: 12260 - DNA, 483 bp, Homo sapiens
acagggaaaaacagtagttaagggttgcatttccaggcctctgcctccatcaagtattatttaccaagctaaagaagctgaggggtgtgggggaaatatatttggggcagaacgtggtatactcaattttgggcttgctgaatttgagacatgtaggtggcaatgttaagtaggaattgagctatatgaatgtgaagctctggcacaagaactgggctgaagatattgttaagaataatgaggatacagataacaatttcaggagaaagtagggagaaattaaagcagagcctagggtaaccatgagaagcacaaacatgtaaggcacaggcagaacaaatatgtctgaaaaggagactgaggagcagtcaggtaaaaggacaaccagcagagtatggtaacacagacatcatgcagccctcccactccactgcactcacggtacctgcccgggcggccgctcggccaccgcggtggagctcc

SEQ ID NO: 12261 - DNA, 599 bp, Homo sapiens
  misc_feature 599: n = A,T,C or G
ggagctccaccgcggtggcggtggcaagcagggcggccacgcgataaccggacatatagctggcggcgagcgcggcctgctggctgtcgtcagctatttccaggcggtaggcgtctaccgcgatatcctgggtggcggaagcgaaggcgacgataaccgcgatagcgatcagccaggacaggtgtttttgcggatcgcagaaccccatgccgatcaatccgaggataaccagcgtctgggacaagactaaccaggatcgacgacgtccgagcttgccgagcagtggcaggcgccattggtcgagcaagggcgaccagacccacttgaaggcataggccaggccgatcaggctcgcgtacccgatggtttcgcgggccacaccggcctcacgcaaccacaccgagagcgtcgagaacaccaacatgtaaggcaagccggcagcaaagccgagcaacagcagcactaacgtcgaggggctggcataggcggcgagcgcggcgcgccaggttttacggggcatgggctggagtctgcctcagaattacgcaaattaaagcgcgcactctaaccgctgggctctaccgggcgccagccatgan

SEQ ID NO: 12262 - DNA, 400 bp, Homo sapiens
  misc_feature 1, 398, 399, 400: n = A,T,C or G
nctccaccgcggtggcggccgtggaagcggcgcgggccggcgagcagggacgcggctttgccgtcgtcgccaccgaggtgcgcaccctggcgcagcgctcgacggccgccgcgaaagacatcaaggatttgatccaggcgtccgccggcacggtggacctgggccacgcccaagtgagccaggccagcgccaccatggataccgtggtggccagcgtgcagcaactgagcaccatcatggccgagatcgcgcaggccagcgacgagcagcgcagcggcatcgagcaagtcaaccaggccatcgcccagatggaccaggtgacccagcagaacgcagccttggtggaagaagcggccgcagcggcagacgccttgcaggagcaggcgcaagagctgaannn

SEQ ID NO: 12263 - DNA, 826 bp, Homo sapiens
acacactatgattgcacaacaacgcattcacctattgacgcatttctcagaacacagcctcattgtaagtgacacacgactgtattttagttggccgtgagttttgctgagagctaaacagcttccattgagggttctgccatctacctaggggcagttgaactaggaagtccccaagatctcttctgtaaaccttctatgacgttttctgtcttgggcagacaagctggatggagcctaggggaggctgcttggcgacgcttctcccaactgccggagcgcctgtaacctggtcccatggatgtctccattctagtgaccctgctgtgagtgccacatctcaaaacctgcagacgcagggctcccattgacttccaatgctgaaaatgcccagtgtggaaaaaaagactaactgtcctcagtgcggttcttcgatcagaaactccttgttgggttcccagaaagcctggtttcgaagactctgaccctgggacgggcgacaggcacgccagtttcccaatgtctctgaagacgcactcctcctgtcaggtcacgctaccgctggccgcgtggtatgctagacctgcgcttattcctagcatttcatacgctatctgatttcatgattgcaaaacttttgcagatgggtctgactacccaaagaaagaaaaaaatctctggggtcctacagtgcagatcttgacagagctgaggccggtcctacgtgcctgcagggaggaagtgagatgccggagaggccaggatgagccgggggctctctgcaaacctggactccagagtccgacagatcctggctccaccacgt

SEQ ID NO: 12264 - DNA, 330 bp, Homo sapiens
  misc_feature 1, 2, 3, 4, 5, 6, 7, 8, 9, 10, 11, 12, 13, 14, 15, 16: n = A,T,C or G
nnnnnnnnnnnnnnnngtgacttataagaatcccccgtctgtttccagggtcaatgtattgtgagtctattttggtacaggcacttgaggtagcttatctcatttattcttcacgatgaacctttctccaccatctaatggcttcttcctctgcagcatctggttctgtatattctggccaccaaaagcgaagttcctaaatgttggactgaaatcctagctcactgtaggaagccagctaagagctgaaaagattttggaaataggatttctggagcagcccagagtcaggcaccaactatcctgtccatagtcatgtcctccccgcgt

SEQ ID NO: 12265 - DNA, 920 bp, Homo sapiens
  misc_feature 1, 912, 913, 914, 915, 916, 917, 918, 919, 920: n = A,T,C or G
nactttttttgttgttctttttttttttttcgctgacctgtagtttgatttccagtgtctagacttaacagtctgaatttaaacacgaggcatatacacaaaatcatctggaactgatttttttcacactaaacacttctttctgatcctactttccaggaggctccttcctccaaacatacctccagatgaaaatcacttaattaaccaagaaagactcaaccgcccttaactgcttttctaaacagtcacacatactggatttacttattttgagacatgacaaaccagttgcaaaccacaaattcattctcatgggccctccacacggtctcttgttccttctgaagagggtcttgctgaggaccatttgtcccccttcctgcagcagctactcagtcggtgctggagagtgtggcctttcgaactatttgcggttttcctgccacatgatgctgacggacgtcagcctctcccggccttggtgcacatacaacagcctgtaaaagctccactttctattccagattgctgttatgcgtctgcttctcattcaaaggaaataagaggagatgtaaatcgtcgctgtgcagttacgtgtttaatgaaaatgatcttgcatgctagattcacgtccaggagcgagtcgcccttactgctggtattgaactcactctccttggagcgccccaaggctgtgggctgtgggggggcattagtgtgtgtgggcgcagctattatttgtacctgcccgggcggccgctcgactaattttttaactttttgtagagacagggtcttgctatgctgcccaggttggtctcaaactcctggcctcaagctgtcctcccacctcggcctcgcaaagtgctgagattacaggtgtgagccaccctggcctgattttaggcnnnnnnnnn

SEQ ID NO: 12266 - DNA, 484 bp, Homo sapiens
  misc_feature 484: n = A,T,C or G
acttttttttttttttttttttttgagacaaagtctcactcttgcccaggctggaatgcagtgagccgagattgcaccactgcactctagcctgggcaacagagcaagactccatctcaaaaaaaaaattttttttagtaaaaaaatcccgtagttttttaatgctacgaagatggccaaaaagaagacatagacaaagcagaaactgatggcctctgctatttcatgccctgtgtgactacttcatcatttgttggtttgggggttttataatttttttttctgtagatgcgtgcttttctttctctctatttttatttgatagggtggctgcctatggacagcaaagctaatatttagagtttgaactgcagacattgttgcaggcttcttataaaggtagtcgattctttaaagtctataataaaggtcctagaccacagctttacaactttaaatcaaaaaggtttaagaggctgggcan

SEQ ID NO: 12267 - DNA, 536 bp, Homo sapiens
  misc_feature 1, 2: n = A,T,C or G
nnagctccaccgtggtggcggccgatgtactgtgggttctgagtcaaggatcccagtgctgccaggaaccagcagtcagctgcgcctccttgttggatgtcaaatctgcttatatcatccaggatgaagtgaggaggaccccctggtagatcctgtggccgcttccatatcacattggagaggcgtttttcctggagcagcttctggcctatggaagaatctgctgcagggaatgtctcatccttaaacgtccggcccatgctcaggcagtgatcccgcaaggtggtaaagtcctggtctttgaacttgatgatggaggtctccactgaaggctcctggtaatacgccatgactctccttagaagacttccgaggtcctttcctgtttcctaggcaggtgtgtctgatggaggaggggagacgggcaggttccacaggctctcaggttagagagtggtggaggagactggcagaggaggagagcatggccggccgtcttggagaaagagcagtgctggtgtctgctctccccgcgt

SEQ ID NO: 12268 - DNA, 530 bp, Homo sapiens
  misc_feature 530: n = A,T,C or G
ctccattggatctggtaggtctggtagtaggcaatgtcactcagcagggcgccgagaaacagcgggacggtaccggccagcaaggtcgcatgaagcgggccaggcgtgcagcggtaggtgagggtggtggtgtcggtcacgggcggctccttatcgttgagcggccctgatgaggctcatcagggccgcgctgactgcgcttaaggaaggagcgtgctgcttgcgcgttagttcacccgcgattcgtttccaaatatgttgcgtcagttgatgcgtggatgttgctgcaccaggttttcacgcttggcttccagctcggcgatttgcgcgtcgatatcttcgatcttctgctcgatattgtcttcgtgctcctgcagcagctccttggcttcctcgatatccgacgccgacggtgccgcgccgcgcaagggtttgttggcggattccttcatgttcagggcggtgaaaagccccagtacggcgaataccaatcaggtaataggccggcatgtacaggttgctggtggtcn

SEQ ID NO: 12269 - DNA, 616 bp, Homo sapiens
  misc_feature 615, 616: n = A,T,C or G
acttttttttctctttttttttttttgtctgtattttcggtagggacagggtttctccatgttggccaggctggtctcgaactcctgacctcaggtcatctgcccacctcggcctcctaaagtgctgggattacaggcatgagccaccgcaccaggcctgccttccttttttttcttacaagggagaaagcattttccagctgtagatagtggtttgaaagagttagtgtttactattttgagctctttgaaatatgtctcttatacaggggagtttctttcaaacacattcttgtagttaggatcaggcattagcatctgagaggaatgagtaatcaccattttctactctgccttttcacctgaggactgtcacgtgtgggaatgtagcgttacctttgctcttcctttttgctgcttattatcgggatatcatcctaggaactgagccgcccagccttcaccacctttacctcctgcatcctgcgttcccctccatccttctggatctggccaacaccaccggcacagtgacggctttagagggtgagtcccagtgccagcgggagtctgtgtacgcagatggtgggagagtatgtgttggctgtgtgtaann

SEQ ID NO: 12270 - DNA, 510 bp, Homo sapiens
  misc_feature 508, 509, 510: n = A,T,C or G
actttttttttttttttttttttttttttttggattcttagtagagatgggatttcaccatgttagccaggctggtctcgaactcctggcctcaagtgatctgcatacctcggcctcccaaagtgctggaattacaggcatgagccaccgtgctaggcctaggtttcactacttaactgtatgtattaatcattgctgagccatactgggtagtcaagttctttccttataccgggttttgcttttctgaatttaaaatagcttaattttcagttaccaatcattatttcagcttgaaattctagagaactaacaatatcctctggataaagatagatcaaagattttgtctgttttgagcagcttcttttcttttttttggaaggacctttctggagcactatgtcttccagcttcaatctgggcttgggccctctgatattactgcctggctttctaactttgctgggggatgttaagacacaaaattgatctacagattcaacannn

SEQ ID NO: 12271 - DNA, 559 bp, Homo sapiens
  misc_feature 1, 558, 559: n = A,T,C or G
nagggcgaatcgaatcggagctccgtggcggccgcccgggcaggtacaggtcatggtgagcaggtgttctgagggaagacaaaggaaaagcagagggagtgttgacaattctgagcttccatatggcagacattcggggcccgttggcatggtcctcagagcagcaacaacagcatcaattgaggttcattaaaatgcagaatcgcaggttcatgtggacctactgaatcagaacctgcattctaacaacagttttcagtggttcttccgcacattaaagtttgaaaagcactggtctggaggaggaggctctacaaaagggttgggtattgaggagccgaaaagacaacctggaactgagattccagggatgacctgaaaacaagcatttcaaaagctcagaaaagcaagattttaactactctcattttatattatcgcaactacatgttcaagattttacaaaatagtctcagtttcaaacactctgttccctttgcagatcatgtattatggatggtctggggcaacagggatagacccatgggtattgggaann

SEQ ID NO: 12272 - DNA, 514 bp, Homo sapiens
  misc_feature 513, 514: n = A,T,C or G
ctgaccagccccgcgccgaactgctgctgggcaagctctactacgaaggcaagtgggtcccggcagatgccaaggccgccgaagagcacttccagaaagccgtcggccgcgaagtggctgccgactactacctcggccagatctaccgccgtggctacctgggcaaggtctattcgcaaaaggccctggaccacttgctgacggctgcgcgcaacggccagaacagcgccgacttcgcgatcgcccaactgttttcccaaggcaagggcaccaagcccgacccgcttaacgcctatgttttcagccagttggccaaggcccaggacacgccggaagccaacgacctggcgacccagctcgaagctgcgctgcccccggaacaacgcgccgaaagccaacgcctggtgcaacaggagctggccgtgcgcggcaccctggcccaaagcacgctgaaattgcacgccctgcaagaagaagacggcgaggaatccctatgaagctcaacccattcgnn

SEQ ID NO: 12273 - DNA, 1684 bp, Homo sapiens
  misc_feature 1, 2, 3, 4, 22, 51, 550: n = A,T,C or G
nnnngactaggaattctgggancctctaagacctttcctattaatgtaccnactccactcctcttgttccctatttgggggtaagtcttaggattctataccttatctcaatcccacaaagccaggccaggtgtcacgaagcttccatttatttttccttagggcagtgctcagaagtgtctaaggttaagttctttctctcaatataggaaagtcaagccagctgtctgtgtctgcttgtacacaatctgcagaggctcacgtgctgtctacagggtgtgcagttgtgccagctgccaaggaagggaggcatacagaatgctggaggcatatgtgggctaggtgggggtgtctgcagcaaacagatcctatgaaatttgtggactagcctcttagtgaagtccacaaggcagttagtagaaactgtagccctttgttgagttccatgccctgactactgacagtcccagccccttttccttgctcttagttgctcccaaactattcagtcatgctgatccactcagtgttctgaaagggatgagaaagngagtgggcctgctggagagcatcccacatggctggggcactggggtgttcactatgctctcaccttcccctttgagagaaatcaagaaccaagggagttggcactgagctatgctgccttgggggaggggtgttatggataagtgaaactcttcttcttaccctcttcagtgtgtctattcttgagtgattttctccaacaagactgctaagacctctgcacttgtactcctgtgctccacaggggtactctcacctgtgggcatttgtcaaaatcagtattactgctgggggggatgagggctgaaaactcctatttcaccatctttctgacatcatttgccacagtgtgctttttttgttctggtatttccttatacccttgagtctcttccctattttagtcaacccagcagtctgtattcattcctcttaatcaggatttgagctttgcacctgctccttttggctggggttgagtctacttcagaggctagggatatagagggtccaaatacaatttaaataagaaaatgctacgaataaaagtgttgagaagaataagaattctagaaaaaaagaaaaagaaaatggaaagaaaagacttttaaaatgttaaggcatctggcagagagaccaaatgggaacaaaaacccaattcctctctcctgacaagtccttgcaccctggcctatggctgcttcaacccacaaaaacgcctttgtttatcagcactcaggtatcagtaggctggcatgcagttgcagttttacccaaagacaaggctccagggaaactagacctttcactgctctggaaccaccttcacaactttactccattgcttcttctggaatattatcccatctctccatttcttcaagaccaagctcctctgctcagttgtcaccttctcctttaaaaatgttcctgatcactccagccagatgtgttcctcccttcctttgaatattcatcctttctcagttgctggcttgagtcttatcacccccacgagtcatgaagaccttaaggacagggacagtagcacaaagcccttcaggcaaggcagcttgagcccagtagaagaatgtgccgtgggactcaggagaagccactgtgcctgcaatgcaag

SEQ ID NO: 12274 - DNA, 535 bp, Homo sapiens
  misc_feature 1, 2: n = A,T,C or G
nnccaagtatgacccttccttgaagcccctgtctgtttcctatgatcaagcaacttccctgaggatcctcaacaatggtcatgctttcaacgtggagtttgatgactctcaggacaaagcagtgctcaagggaggacccctggatggcacttacagattgattcagtttcactttcactggggttcacttgatggacaaggttcagagcatactgtggataaaaagaaatatgctgcagaagtaagatatacttttttttttctttccagggaaaaatgtttataagttgatatttagcattaatttcaaaagcttaatttgtaaattcaactcacgcccagtgaaccacttcttttacaaaggaccttcacatttgctttttataacctttaattgtgacatcatacttaacgctgcaaaactttctctactgtctccaactccaccatttgcaaaaagtaaacggactcaaactggaggatcctgttttaacagaaatttagaaataaaatgtgtgccttctgtcaaaactgt

SEQ ID NO: 12275 - DNA, 624 bp, Homo sapiens
  misc_feature 621, 622, 623, 624: n = A,T,C or G
acttttttttttttttttttttcgggcctgcctatttccgactgtctctctctgttactcgatgtctccttttcctgtctacatcctaaacctcctgaaccccaccagtaacattcattgctaagcagttgctaacacctgttcagaatctccttcaaatatctgcaggttccaagatttccaaaaacttacccttattcacaatacaccagctaccacaaccactggccactagggaggcaaaatagcatagcagtcatggatgtgagagttgtactgtttggagtcaggctgcctgggctcaaatcccacctttcatcagctatgtgacctttgggcaagctacctaactttgctatggcttagttcatcttttgtactccaggaacaacagtagcaactacttcctaagtgctatgaactgaatgtttgtgtccctgaaaaaatgtatatgttgtacccctaaattccactgtgatggtatttggagatagggcctcttggaggaaattcagtcatgagggtggagccctcatagatgggattagtgtccttataagaagaaacaagagagagcttgcttctcgcttagtcttcaccttgtgaggctacaacaaaaannnn

SEQ ID NO: 12276 - DNA, 4045 bp, Homo sapiens
ccacgcgtccgccagcgccgacagcacaaccgagggcacacctgccgacggcttcacagtcctctccaccaagagcctcttccttggccagaagctgaaccttaggcacagtgaaatcagtaatttagccggctttgaggtggaggccataatcaatcctaccaatgctgacattgaccttaaagatgacctaggaaacacgctggagaagaaaggtggcaaggagtttgtggaagctgtcctggaactccggaaaaagaacgggcccttggaagtagctggaggtgaggtgggaaagccaccgtgcttatctggttgtgacacatgcagtattaggaaagccattttgtgagagggcttagaattcagaggtgtgtggcagcacagccgcatcttcaagatggaggccaaggacagcctgtagctttacatcttagagtttcaccacatgcaggttgtctgggaaaatcacctttgcatttttttttattacttaaaatagctcctatatgtttgatgtctagatcacaaattttaagaaattataggagctgagtttggtacatctaagagctgagagtgagtgatactgagccatctgcaaaactgctggtgagagatacaaattaaaaatcttcagccatctgtgtgtgtaagaggaaacatataaatacacatttctcatttgccaattacaccttccctggtataaggggaagaaaacgacttggcatctgatgtggggagaattattgctaagacctggaggcagggtacttcttactgcttcaggcctgaatttaggtggtcatttggggtgtgcaggacagagcacctcctaaggacctgagagtccagtcagtggggaggcccagctcccccaccaactgtgtgaggacagatcacccacttcctcacttggggctctggttttctcttcttactacccgattccaatgcctattgtgtcttttaaatcctctgttttaaaaatgaatcttaagctctctcggagggtccaccaggccgtgcacctctattcccagtgacaaatgacaccccttccaggctagtctcaggatccagtaggattccctttgctgatctgtgcctttgacctctgctctgccacttctgttttacctgcaaggggcatgacatacagggtagtaattatgaagttctcccaggcagttccaccaaagtcccacattgtacaagggaaggcatacacagttttaactacctagccaggggcagctggcctttccccaggccctttaaaacacctgtttgaccagcctgtgggtcctttcccatcggggttccagcttgagtcctgctggtagcccttggcacaaggcctggtaggcagcctggtgctgccatgtaccaaactctgctggggaaacctcagccacagcagatgcaaacccattaggtatagcatggttcaagatatttttgcttgtttcaataacacttttgttcttgattttaagggctattttagaaactgctttaaaatatttttgaaagtataaagaggtgaataaaacatactcctgttccactgtgcaaagatagtcactgttaatgtttctttccagtcgttttctatgcatagtttagccatgacttctcatggggacaaacccactggtttaattcaacccccaatgtcaggtttttataggtcagcccagagttctcaagcccagtcacaaagcagagccaggactcaaattcacaccctgtgactgagctgtttccactgtaccatgagacactacccacaaatcgctccttctccagtatctatgacacgaccataacaaaccataccccttggacagatattccttaaaaaaaaaaaaaagtttcagaaatagccaaccaaatacaaaaagtttggatgttttactttagcagtggtgtggagactctggtgtgctcttgtatagaagcgtagcatgcagctaaacccagtgccctggaaaccttctttgcagagcatctgtggacaggggttctggaacatgctctgggagacatggtactttgcagtttgtggcagaccccaggcctgtgtccttagatctggcaagggaaaggcaagtctttggtggagatgtatagctagaaaggggcccctcttctaggaaaagaaaaacacagttccttaaaaactaatctaattctgccacaaataaacaggatccgttattcacacagtgaggccatcctcagcagggagaagacaatggcagagtggagatgctggtcaggttgcttagcagatcatttaaagcagttgctttcctagtagctttgtcctgaattgggtttgggagatttagagaatacatcatagtagagacaaatatatcatattggtgtgcaagtcgataattagcacaccagtcgacttgaagaagaagggttggaaacccaaaacaattattttgaggctgcaaatgttctgacacgttgagtttgcgttcagttgagttttgatggataaggctctgcctctgggagaaccgtgtatgctttctgagagtggagagaggcttactacgaacttggtcaaaattcctggtggtgacacatcataatgccaactttccaagggtgtggcttggctccagctcacgttggaatcacaacgcagcagacagctgtggaactcctcggacacagggcattggagggcccaggaagatataccgtggcaggggagtgggtctgtgtttggcatcttgtgctttgcagtgaaccagagctcactgtttctgtttcatccccgcaccactagctgctgtcagcgcaggccatggcctgcctgccaagtttgtgatccactgtaatagtccagtttggggtgcagacaagtgtgaagaacttctggaaaagacagtgaaaaactgcttggccctggctgatgataagaagctgaaatccattgcatttccatccatcggcagcggcaggtaggggcacatgcttgttacgtatcggtcatgggtgtgtctctctgcgcacacatggcccataattgtggtgctctcactctgtgcaaggcccacggaggctgcctccgccattccttcctggcagcctgcgcagtccagagcagccacagtcccatagcagggtttcttccttaggctgtagcttccttttggttctgtgtgacccttgggccagggtgttatccccattccccgttccacagatgaaggagggagtgtatccaaagccgtgcaggtggcatgtggcaggctccagaccctgagcccagctctctcctaccattgtccccttctgacagtctgtgacttagggctgggcctggccacttgctgatgaagctgctggagcctcattccctctgccgaggctgctgggtctgtcatccctgcaggacaggatccctggcagaagggtgcgtggagctttccaaggagaagccgccacagccaaggctcctgggatgtgctggcagctttcacgtgccttctcaccgccaaggctgttgagggatgttgattatctaggaagacctcagccaagccagagtagctggcccggaggctgcgggtcacctggttccatcacagcacagaggccttgtctgaactatccagaggcagcttgggggctgctgtagaggccttggctgatgttattagggtggacctgagcaggtggtggtttgggagcctcacgcctctctgggatgccggacccctccagcttccacgtctcatctcagctggcacgcacacgcgagggcacttccacgcggtccccacgcgccaagagactggcagatgcacgagcctacagctggagggttggactgacagcccctcttgatcaggagtaaatagaacgggaaagaatttgatttgcgcaactgggcgctaaggagcggctcggacgaagggagaggaggagaccgagaaaggaagaggggtgacgggcgagagaacgcactcagagagacagagagggaggttaacaccgtgacagtaggcga

SEQ ID NO: 12277 - DNA, 567 bp, Homo sapiens
  misc_feature 563, 564, 565, 566, 567: n = A,T,C or G
acatgttattagctttagcaggtagttctaataaaagagttcagtatgctctttaaatttttttttagaattttctgtgtttattcaaatttattgaacttaattatttaatataagagaaccaaggaaccactgaactttgagaacacaaccgaaatgctaactttagtgttttatttgaactagtgactaaaatttctatggcaatatatgaatattttgagaggttagcccaaattgtaagaaattaatggtaagctggcatgtttttgtagaaaaaaaatttgactacacataattatatttagcaattttaaaacttttacctagattctgtttacttgctgaagtggcagtattttaccatgtatatcaatcttttaaaatttcttaaacagttcttccatttaagaagtaaccaagccaggtgcagtggctcacatctgtaatcccagctacctcaggaggctgaggcagaagaattgcttgagcccaggaagcggaggttacagtgagcaaaaatcgcgccattgcactccagcctgggcaacaagagcgaaacnnnnn

SEQ ID NO: 12278 - DNA, 984 bp, Homo sapiens
  misc_feature 1, 973, 974, 975, 976, 977, 978, 979, 980, 981, 982, 983,984: n = A,T,C or G
natcaagatcacgtaggtataaaattcacattaaattcaaaagattatacccccaacaagggaatgtagaatatttggtaatacctttgttgattaccatgttaattgataatatctttctgaagacagagtctgtctctgtcgcccaggctggtggagtgcagtggtgctatctcagctcactgcaagctctgcctcccgggttcacgccattctcctgcctcagcctcccaagtagctgggactacaggcatccgccaccatgcctggctaattttttgtatttttagtagagacggagtttcaccgtgttaacaaggatggtctcgatcttccgacgtcgtgatccgcctgcctcggtctcccaaagtgctgggattacaggcgtgagccaccgcgcccggccgacttttttctttacatttataatgtggctgttaaaaaatctttaattatgtggctgtgttacactggtgactcatattatgctgctttcagacagcactgactagagtgtgagccccgtcctcaagttgcttagagcttaacacaggagacacaagtggaaaccgctgtatataagctgttgacagggagctgcatggtgcagaaaagaggaaactacctctctggcagtggaattgctgtttgctgagaataaaggaaaaaaaatggaaaaggttccaggtagaggagccaatagtgtacagagtgccagtcatgaaaagattggtaggaggtattcagtgtggtcagaacctaggaggcagtggcttgagactctgggtggaaaaggagactgtgagagccatgtctggagccaggaagccaaacttcctgatgactggaagaagctgaccaaacagcatgcaaggaatgacatccccctctcccaccccaggcaccagctctcagatagccatcagagtgtctgaaggcccccacgtgttcttagttattgtttttatctaannnnnnnnnnnn

SEQ ID NO: 12279 - DNA, 164 bp, Homo sapiens
accacaactggtgaacccagcaggaaggtggagaaaaatttcatgagcaccgagaccgtaagatcaggaaaggggaaatccaagggggggtcccgggctgaccatcacatttatgtggtgcccaaaagccactatccttgatggatgggacccaatgtatgagt

SEQ ID NO: 12280 - DNA, 471 bp, Homo sapiens
gaagccgccatggtcgaccacggcttgcagggtgcgccattgatcaagggtaacgcggggcgctttcaagatgagctcctcttgtcctaagctggcggtccttattggagactgccgaatgagaaaattctgttgtgtgctgctgacgctgctgccgttgagtgcgtttgcattcagtaccgatgtgacgaaagacattcagggcgtgaagatcgattacagcgcgtcggacgtcgacagcaacatcagttcgatccaactcaccaactacggccccaatgacgcggagtgcaaggtacgctttaccaatggtccggaagcgccgcgtacccgcaaggtcacggtcgcagcagggaaaactaccaacaccacggtcaatttcagccgtgccattatcaagatgcgtatccaactgacctgcgcaccgaaataaggcaaaagcggaggacgcctacagcaatactccgctta

SEQ ID NO: 12281 - DNA, 541 bp, Homo sapiens
caccgcggtggcggccgaggtactcaagaaacccaggccagagttactggagcccttcctcacaattggccttggctccctctccacttgtgtgttttcacattgacttgatcttcagtggagtaactctgagcagtggctgtagctcagcaggtagaaaaactctctaacccttgaagaggggaatacagtagcaccattgaaaaaagaggttgtgtatagagtttcattcttaaatttgctttgccaaggagaaagcctgtgagagtgaaagcaaggtggaactggggtccaaagagagggagtaaactagatgccatattaatttgtatttctggagaatatgactgcagtttatatataacttggtttaaacatttttgtaacctgcttaagaaatttgggtttgggtggtcgattttcatttggaagaaaagattaggaagacagtatagttttggggacacaagcatggctacctacaggagacaggtctgaaaggaaaataagtgatgcagccagctgagtacctgcccgggcg

SEQ ID NO: 12282 - DNA, 979 bp, Homo sapiens
  misc_feature 1, 2, 970, 971, 972, 973, 974, 975, 976, 977, 978, 979: n = A,T,C or G
nngtccatccggtcgcctggcggaatgtgtcccctgagatttaatatattcggttaatcgtactaaatgaaatgattgaaattagagtttaggttagcaagagaactttattttgccgtttaaagaagttttataggtgaggtaattctccgcttcgtgaggtttatatgcaaacaaacagatttggtttaattgtttgaacgccgggcagggcctcaaaatatgtcttccgtgaagccctgcgtctgtatagtaaaccatggggagcccagtttatttttgttttttttttaagaaaatacctggaaaagccttgcttctaatgtaggaatttttccttacagtgagatctatgtaactgacaatgtttgtgggtttcacttcagctgccaggaaatttggtattacatgagcatttcaaataaagcaacagtgtataattttaaggcccacattagttttcatttttcactacttgttgacaccctattctaaatttttgtttcactttatcttttgcttttaatttgtgttttatgtaaaatacttatacaatctttatggaatgagatggggcagaatggaggagtatatccatgtaacttgattttattccactttccaactatatcttctttctgtcttaaacctaggtgattgtatgcactcttggcttcactccagtctaccctgttggttttggggcacatgtaactgtccttattggagcacttagttgctgctgtgggcagtgactaactcattgagttcctatagatgaaatgtaatctgtctgctccaaagctatgtaaatacactcctgttgtggagatttactaggccattaactgcctagtagcatgttttaagttaaaagagcaacctgctgggtgcagtggctcatacttgtaatcccagcactgtagaaggctgaatcaggaggatctcctaagcccagagtttacaggcnnnnnnnnnn

SEQ ID NO: 12283 - DNA, 1303 bp, Homo sapiens
  misc_feature 1, 1303: n = A,T,C or G
ncgactctagaggtccccctgttcaatttcccttactttgcactgggttcttgacatcctggccaaggtttcagacactgaaatatgaatgggattaataaggattaagaaagagtaaatgctattaacagctcttctatgtgcatgcatctatcttactcaggagccaatgacccaccagggaaaaagaagggctgggagggaactgagctcattcaacacctgctcacagatggcaaggtcagcagttaatgctgggctttctccaaccacaatcatgtgtctgtcaaaggtctgcaccactcatcttgacacttaatcgaagaacacttcatcgaggatcgtcagagccgcaggagccattagcaagcagtggcttcccttttggtctttttcttttttttttttttttaaagggcagcaaaatcttcttgagaaattacattttataagaaacccaaataaactcggataaaatagataacattattagtaagcctcaatttgaaaattccaaattcacaacatttgcttattatagagtatcaatctattttataaaggcaatttgagcaaacaaaaaatacataaaatcgcttgtgacatttccttcatttccgggtttcatttagttgtacacgatcaataaaagtctgactcatagagacgtatagttgcaaatggtaaaagtttaacaattcatctccattaaatagacagcagaggttttcttcctgaagatgtcataaaaacaagttaagctggcaataaaagcagcacatggatggtcaccaatgctaaaagttttaaataataaaaagaaatgctttaaaaattgaaccaaacatgtaatgacattcctgaaacatatcacaaaatatttgattgagaaagtttactcacttacactctcatcttagaccactgtactaaatatttttagaaggataaacatttccctcattctatgaagccaatataactgtgataccaggacagaccccgcgtacctgcccgggcggccgctacagagcaatcacatacatgatcactgaggcaaaaatctcaaacaaaatattagtgaaaacgaatccagctatgtataaaaacgagagtaacacactgagttgatttataccaggaatacacgagtagtttagaaatagaaaatataggccatcagatttttttaaaaacataaagtcatctcagtgaatgcagaaaagcatttgataatattcaacgctcatatatgaaaagctatttgcaaactcagactggaaaagagcttccttaactcaan

SEQ ID NO: 12284 - DNA, 565 bp, Homo sapiens
  misc_feature 1, 565: n = A,T,C or G
nactagttctagatcgcgagcggccggcccttttttttttttttttttaaaccatttcaagagagtctctggatttcttgatccttgatttgtggttttcatgttgtctgtgagctccagcagggcctcatcagccctgtccgtggtgctgctccagctctgtgctccccgataggtggccctgcgctctatgcacatccttcttaacataggaaagatgtatgcctttcaaagaaaggcattcaagacagatcagcaccaagtggaggctctacccacagatgttaatgtgcattaagaaacagcgttactgagaaatctgagccatcattccagagtctctctcctggggagaagtttgtttttactgctgggtttttttgtttggttttaattcagaatttggaactagaattatttgtaataaacctatcaaagcctagcctaagggctgccatctctgtctaaattctagttgtttatacaggttaaaaaagacatttctaaagctctcaaagctgatcctcctcaatagtaagggactgtgtgaaagtttgtttatgcn

SEQ ID NO: 12285 - DNA, 625 bp, Homo sapiens
  misc_feature 621, 622, 623, 624, 625: n = A,T,C or G
acttttagtggagatggggtttcaccgtgttagccaggacagtctcgatctcctgaccttgtgatctgcccgcctcggcctcccaaagtgctgggattacaggtgtgagccaccgtgccctcttttattctcagtaatacactctactccgagaaaaatattggatttaaattgcaattgatctggctaaaaattttatcatcactgaaattcctagaatgtgaaaaaagaaggtttatttttctgtaatgtgagtttcactgtagcctatcaaagcacatggatgaaatcggaaatgcctaaaattctgaggttggcagaaatacacacactcaaaggacatgcaatcacataaacagaactactttatcttgacagcatccaggctgcctccatacaaatgtagcttcatgttggtggctagtccgcattgcattttcagagatagaaagaagaaattccagaaagggaaaacattggcattttgttttacagtaactctttacctcgcctttaaaaagacattgtgcatgctttacatgatacagccaatttcaaaggacttattctggattcttatgattagcatattgatattgacattactaagactataatcannnnn

SEQ ID NO: 12286 - DNA, 394 bp, Homo sapiens
  misc_feature 391, 392, 393, 394: n = A,T,C or G
acgcggggtgaataagagtattcctttcctctgagaagtacacttgaaaaaatcctgtaactctagcgtagactaccagttattgacttccaacatttactctgctttcctttttctaaaattgataaagtccaaacctctcttgtttggatttgaaattactatgttttttggccgggcgcggtggctcacgcctgtaatcccagcacttttggaggctgaggcgggcagatcatgaggttaggaaattgataccatcctggctaacatggtgaaaccccatctctactaaaaatacaaaaaattagccaggcgtggtggtgggcgcctgtaatcccagctactccagaggctgaggcaggaaaatggcgtgaacccaaaaggcggagcnnnn

SEQ ID NO: 12287 - DNA, 443 bp, Homo sapiens
  misc_feature 443: n = A,T,C or G
acacattgaaatctgcaacatgctgggactgcagagagcctgggctgggagtcgtgagctccacccggctgtttttatgacagctggcaaaacacgctaaggcacattgaggactcagtgaggcaggttcctgggcctctgttaggctaagtttgaagttgttccatcactgcctccctctgccttctttgccatttccatccatgatagcactaccctaactagtgatgagaagcagtctttggagttcctcttctctcctgtccctcatggctaatttccctgctcagacttctgcctctggctctctttccttctgtgcacactgacttttttccctctcctgtgccgagctggagtcgagcggccgcccgggcaggtacactgcccaggcaaagcgtccgggcagcgtaagcgggcgactcagatcccagccagtggan

SEQ ID NO: 12288 - DNA, 790 bp, Homo sapiens
  misc_feature 599, 600, 601, 602, 603, 604, 605, 606, 607, 608, 609, 610,611, 612, 613, 614, 615, 616, 617, 618, 619, 620, 621, 622,623, 624, 625, 626, 627, 628, 629, 630, 631, 632, 633, 634,635, 636, 637, 638, 639, 640, 641, 642, 643, 644, 645: n = A,T,C or G
  misc_feature 646, 647, 648, 649, 650, 651, 652, 653, 654, 655, 656, 657,658, 659, 660, 661, 662, 663, 664, 665, 666, 667, 668, 669,670, 671, 672, 673, 674, 675, 676, 677, 678, 679, 680, 681,682, 683: n = A,T,C or G
acttttttttttttttttttttttttttttgggaccagggaaggattaaagaagaatttaacatagggaataaatgctaaagaaaaccctcaacaatatacatgtatagttagaaagaaatacaaaactattggtttttgtttgagacaattcttcctccatggtggtttcatacccatgatctacagttgcctattggatagtccaaggtttctcatcatttatgctagcaaattatgattgcctggaagtgcattttaaattctttttatttgagatgtatagaatcttgctcaaatggtattttccaaactgttgaaaaatagggcattttttaagaaagaacacttttacttttttttgaagaagagaagttttctctgcagattggtctataggtgcgggtcttctggaaaattgttttttctgtagagagtgaacatatgtttgtatgtgtgtgtctgagtgtgtttgggtgtgtctctgggtttctggggttgggtggttctgcctgggtgtttgggtttgggcctggatgattgggtgctggtgtgattgggtctgggtctgggtctgtgtctttgcctgtctgtctatgnnnnnnnnnnnnnnnnnnnnnnnnnnnnnnnnnnnnnnnnnnnnnnnnnnnnnnnnnnnnnnnnnnnnnnnnnnnnnnnnnnnnnttctgtgtttgtgtgattgtgtctgtgtttgtgagcatgaattagagagctctggggataggtaagacttctaccgacctttccttttcctctcatgccccggacgc

SEQ ID NO: 12289 - DNA, 690 bp, Homo sapiens
  misc_feature 1, 2, 3, 4, 5, 6, 7, 688, 689, 690: n = A,T,C or G
nnnnnnnttttttttttttttttttttttgtgatggagtctcactctgttacccagactggagtgcagtggcatgatcttggctcactgcaacctccacctcccgggtccaagtgattctcctgcctcagcctcccgagtagctgggactacaggcatgcaccaccatgcccagctaattttatatatatttttagtagagataaggtttcaccatgtcggccagaccggtcttgaactcctgacctcaggtgatccacccgccttggcttcccaaagtgctggaattactgtgcctggcctagtcattaatattttgattaacgcctacccctgtgatcaacgacaacttattcaggaagaagggttctttctactctagtatgcttccagttatttactgtgtatctagctaggttgtgaaaagaaaagaatatgaagcccggagttcaggaacctaactggtctatcattgcagtggccaaatttcgtctaaaagagcgaccagcctacccagataaggacattaagcttctacagctaacgccgtacacaggagttgaaaagcttgtccacatgacaggacaatctttaggacctgtgcacatacaggaagccaggatggtaaacatctagtgtcgtagtgaccgttacaccatgaccccccagagagacgagaaaccaggacnnn

SEQ ID NO: 12290 - DNA, 565 bp, Homo sapiens
acgcctcacccaactcaactcttcacatagctcaagtcttggcataaatgatatttctcaagagatacattttctgaccactttatccttgtctttccttcataattaatccataacattatgcttgttagcttccttcatggtatatatcatagattgtcatcatatattaatatgtttgtctatagactgtctctcatattatattctaccaatatgagtgcagcatccatataccatagacctagcatggtcttagataactaagatcaaataaatacaaaagttcaagggcaaataataacgataataattaggattctcaaaagcataaaggtatgtttttaaaactctcaggtattaataaaaatcaatacccaaaattctatgtatccgtagaaatttggtttacctttctgcagcccgaataacattattatatccttacaaaaatttaaaagtcttttggacacgtgagagtgggtcaaaatattacattgacattttgttattgttgctgttgagacagggcccggctctgtcatccagactggagtgtaggtgt

SEQ ID NO: 12291 - DNA, 562 bp, Homo sapiens
  misc_feature 562: n = A,T,C or G
cttggtgtacttgatgatgtaggtcagcaggcccatgccgacaaacgcggccaccaggatgaacaccttggtgtaggtcaactgcacgaagccggtgccgatgtcgactctccaggcgccggccagcagcgtcgggatgccttgttgcttggcgccctgggcgatctgcgcgtagttctgcaggatcagtgagataccgatggcgctgatcagcggtgccagtcgggtggagttgcgcagcggtttgtaggcgacacgctcgatgacccagccataaacgccagtgacgacgacggtgaagatcagggtgccaaggatgagcagcgggaaggattcgatgccgaagtaagccagcagtgccagactgatcgccgcgaggtaagcggaaatcatataaacctcgccgtgggcgaagttgatcatgccaatgatgccatagaccattgtgtagccgatggcgatcaagccatagaccgacccgagggtcagcccattgaccagttgctgcaggaaaataccatccataacgcaatctcacgcagtgagagcctgcacaccctgn

SEQ ID NO: 12292 - DNA, 454 bp, Homo sapiens
  misc_feature 445, 446, 447, 448, 449, 450, 451, 452, 453, 454: n = A,T,C or G
actgctattgcctccttgcctgctgctcttgtctgtgggcttgtgacctttttcaaaatcgttttagtgtcattttggtgaagtttaaatgtgtattcagtctgccattactgggaatctcagagttctcattttaatatttttcttatttttttaaagcctttgaaatcaggcatatttcacatcctgcttcttcacattattttagctgcaagaaatgagccactctgcataatctctttcgttcaggaaggggacattttttccctgacaaatcaatcttccagaaaactcttcatttcagttttggaaaggcaccggaaatggccaacctaaagcaccaactgttcgcgttcccggagttttgactcattggccccaccttgtggccctgtggggaaggggcgggcctgctgaaaaaaccggctgacaatttaaattggcnnnnnnnnnn

SEQ ID NO: 12293 - DNA, 513 bp, Homo sapiens
  misc_feature 1, 513: n = A,T,C or G
nggagtcgacacccagaaagcgcgcctgggcgaggttcgcgcccaactcaaggccagcctgccggactatatgcaaccgaccttttgggtactactaccccggttgcccctgacccccaacggcaaactcgaccgcaaggccctgcctgcgccagaccccgcccaggcacacagcgactacgtggccccggcgacgccactgcaaagccaacttgccggcatctggcaggaagtgctgaaagtcgagcgcgtcggcctgcatgacaacttcttcgagctgggcggtcactcgctgctggctactcaggtggtggtgcgggtgcgcgagcagttgggggtggagttacccgttcgcgagctgttcagcgcggaccacttgctggacctcgccgaaaaggtactggccctgaagtcggccgccaacccactgcaggacgaactcgcccggaccctggcgctgctcaagagcctgtccagcgacgatattgaagacctgattgctcaataaggaan

SEQ ID NO: 12294 - DNA, 552 bp, Homo sapiens
  misc_feature 551, 552: n = A,T,C or G
ctgcaccacggatgggtgggcgttgagcgccgtttccacttccagcggatacacattgaagccggagcggatgatcagttccttggtgcgacccacgatgaacaacgcgccgtccggctcctggcgcgccatgtcgcccgtattgagccagccgccgttgcgcatggtggccgccgtcatggccggttcgcggtagtagccggccatgatgtttggtccgcgtatccataattctcccggctcgccaggcgcgacatccaggccggccacgtccaccacgcgcacttccacgcccgggatcggcatgcccaccgaatcgtcgcggcgcggcgcatccaggcgcgtctggctgatggtgggagcactttccgtcatgccgtagccattgtgcagcgcggtgcccagcagcttttccacgtcgcgcttgagcgacggcgccagcggcgagccgcccgcatacgcaaagcgcagccgtgtgggtagcggcgtatcggcggcgcccagggttttgcagcaacttggcatacatggcgggcaacgccctgcacgann

SEQ ID NO: 12295 - DNA, 714 bp, Homo sapiens
  misc_feature 710, 711, 712, 713, 714: n = A,T,C or G
atcttgaaaactgaactctatacctattaacatctccccatcttcccacctagcccttggcaaccacatttctgctttgtatctcaatgaatctgacttctctaggtatggcatgtaagtggaaatacagtacttgttcatttattgacttttttttttttttagcgtaatgttctcaagggatgatatacttctggtgaaattaatattaagattaaataagatttagagtggtttctacttgtgggtcatgtttctgtttatgatgcaaaactgtaaaggatgaagataaactctagtttgagatgggagattatgtcactatttttgcctgaatcccttcgaagaacctcttcttcatcttttggtgataaagagagtatccaacctgaagggaacttctagtgtcttttgatactttattttactcttgtggatttgaataggcaaacgtggagactttttgtgttattacaacagcgtaaaacttatgatatgaaaacaaaacatcaatattcatattattaaaatttccagtagaacaaatttgatttaggtcaaattgattcactttataatttaaatcattaataagaaatttacctttaaaaagatcagaggatattatttcagttcttcacaaatcaaaagttgatggaagtctactttttactatactgtaagccttaagttgatgatattttgatgannnnn

SEQ ID NO: 12296 - DNA, 303 bp, Homo sapiens
acgccgctgcgcaacctgttcctgaacacgggccacggcaccctgggctggaccatgtcctgcggttcggcgcaattgctggccgacctgatgtcgtcgaaacagccggcgattctggccgacgacctgtccgtcagccgctacagcggcgcgcagcgcggcggcaaactgcaacacgcggtggcctgagatggcggccagcatgcctgcaaaggaacgtagcggcgccatcctgacggtagacctggacgccgtgcgcgccaactaccgcttgctgcgcgacaaggcgcacccggccgcctg

SEQ ID NO: 12297 - DNA, 252 bp, Homo sapiens
gctccaccgcggtggcggccggcgccaagctgcagtccatcatcgacgtggtcaacagcctgggcgcgtcgcccgacgacatcatggcaattttgcaagccctcgaccaggctggagccatcgaaggcgaactggtggtaatttgatgcttaatatcaacgacagcagcagcgccctgccctcggcgctcgatgacaagacccccgccgcggccacgccggccgatccccgctacgcggccaaggccaccga

SEQ ID NO: 12298 - DNA, 476 bp, Homo sapiens
cacgcgtccggatggataaagaaaaggaagagttggggttagttgagtcagagtacagtcatcttttgtcatgtccttagtctgttgcttaagattttcatttgtggtttgcaaacaaccttttaaaaagtcaatttttgattaatttagtcttttagaagcttctgcataccaataaaagaatatgtgccactgttttttgagggttttgatccccctatttaatatgtgttgaagataaaaaattttatccaaattaaaacttctccattgcagccatctgaattctaagttttctttaatgagtttaacccatttttttaaaaatgcacacacctgggcctataatttgtacacataaaattagctgaagtcccacaatgtggattcccagactctttgagttgaaatgatcccattattaaaaataaggtacctgatcagggcaatcaggcaggaaaaaaaaaaaaaggggg

SEQ ID NO: 12299 - DNA, 864 bp, Homo sapiens
  misc_feature 712, 713, 714, 715, 716, 717, 718, 719, 720, 721, 722, 723,724, 725, 726, 727, 728, 729, 730, 731, 732, 733, 734, 735,736, 737, 738, 739, 740, 741, 742, 743, 744, 745, 746, 747,748, 749, 750, 751, 752, 753, 754, 755, 756, 757, 758: n = A,T,C or G
  misc_feature 759, 760, 761, 762, 763, 764, 765, 766, 767, 768, 769, 861,862, 863, 864: n = A,T,C or G
agggagtcgacccacgcgtccgggcaaattactgaagcagttatggttcatagtagcaattgtatatgttacctaggagatggtgtcaatggccgggggcctcatcgccacgtaagggtgtcttgccaggtgacttgcaagggtgactgccaggttgaagccaaggcattcactgaacggaggcagaagcagaaacagtcccaggcaattcttggaaaactggcccattcttactgcgggacatagcaccttactgttgggtccaaaaccccatgtgtcctgccaaaaaaggcagcccagcacagatgtgttcagggccagagacaccatttgcctactgaatgacttgagcaatttggtgcatctcaccgagccttcaccttctctgttaaatggaacatctcctccctcctttgcaagattgtcattaggatttgtgaggtattggcaataacgggccctcccatccttcccattgctgttgttattactgtattcatagctttgtgtgcttcataggtaccctctagggtcctctacgtacaacatacaacagcttcgcaatagccagtgttggaggctccaaaaacgagggtcctgtggctatgtggagagtaacagcagagccaggactgccactcagagctagttcacccttgctgccgccattcgaacccagagctcctggcccaaacagtctggaatgttctgnnnnnnnnnnnnnnnnnnnnnnnnnnnnnnnnnnnnnnnnnnnnnnnnnnnnnnnnnntagagggggtagagggggtgctatagggtaaataccggccctatttcaaagatttttaggggaattaattctaggaccatgggcatgaaacnnnn

SEQ ID NO: 12300 - DNA, 220 bp, Homo sapiens
gacccacgcgtccggaaattttgaagaatattagaaaatatctgaaactgaatgaaaataaaacacaacatatcaaaattagtgaaatagaaataaagtagtacttagtggtaagtttataattaatttacttacgttagaattaattacttttattcggaaagaataaaggtctcaagtcaacactttaagcttttgctttaagaaatctaaaaaaaaa

SEQ ID NO: 12301 - DNA, 627 bp, Homo sapiens
  misc_feature 621, 622, 623, 624, 625, 626, 627: n = A,T,C or G
ccacgcgtccgctttcttatttggaaagaaaacaacactcaccacggcattcacaatgctggggaccttatgaatgggaatggagaggctgcactaatgtaagtggggtcaacatccctgctggagggcagatgcaagtggggtcaacatccctgctggagggcagatgcaattttggcaaactaatgacttttggaagccattttctagactgcatttttctcttctttcttagaatgcttttctcaaggggaaaaagaaagcggaggtgtaaatggtttctggccgttcgaagagcccgtctgggagactctctgctgaccacagcactgtctctccccagggcccactcccacagtgtcactgagtccagagtcgggactccaacaagccctccgcattccagcatgactgtggtaaaaacaaaaaaaatctattttattctagtccatcacattttctatatttgctaaagaaatctcgatcactccataaatgatcggttaaaattaaaaatataggctgggtacagcagcttatgccctgtaatcccaatgctttgggacactgaggctggaagatcacttgaagccaggagttcgagaccagcctgggcaacannnnnnn

SEQ ID NO: 12302 - DNA, 503 bp, Homo sapiens
  misc_feature 501, 502, 503: n = A,T,C or G
cgtccgtgcaccccaaatgggatctgtgggacatgagatgccggctgcatgtgagcatcttggtaaccaaataataggaaagaatgtaggagcaggcaatcctggggcaaaagctgacgccaacgtacctattcatcttagaattgagactctgatctgtctttcccaaggccagatctacagagaaactttctgtcttgggcagaatagctggctgagacatcagagagagagactgaggaaatatcccaggagcctgttgacacacaggccctgataactaaagagaagtcccacctgggcgtggtggctcatgcctgtaatcccagcactttgggaggctgaggcgggcggatcacttgaggtcaggagttcgagaccagcctggccaacatggcgaaaccctgtctctactagaaaatacaaaaattaactgggggtggtggcatgtgcctgtaatcccagctgctcaggaggctgaggcaggaagatggcttgaannn

SEQ ID NO: 12303 - DNA, 1448 bp, Homo sapiens
  misc_feature 1429, 1430, 1431, 1432, 1433, 1434, 1435, 1436, 1437, 1438,1439, 1440, 1441, 1442, 1443, 1444, 1445, 1446, 1447, 1448: n = A,T,C or G
agggagtcgaccccgcgtctccgatcacaatggtccttttccttccaaatgaatgtagaaaattcgttattatcctgatatttgcaccactcatccccatgccacttttaccacatattaatttatttcactgcctgatctttggatatgaaattatgagttccacaaagtcaatttttatagtgccaatcaaacagcatggtgatattctttttctttttttttccccccacaaggctgttgttcagtgtgagatgacatcatttcttatttctgccatgctgtggcttttttgtgttctgcttttaaactacacctgtagtacagttaatatgttttttattggtattgatttctttaattcattaattgtctctatttgggacccaagtcataacaaccaattagaggacataataaaaacacttaatgcttgtagtctgtagagatcttcaccatttcacagcacacacattattttcataataaattgccactggtgggacatgggactgacttatttgaatagagtttgaaataccacctttgtatgatgcaaacaatatttgattattttatctaagaaatctatgcatgtgtatcaagttaaaatagtgggtttaaatacaatttacaaagcattagaatgttacctaatctcttctgggttaaatgtgataggaatgtattggaatgtgaagaaattatagaaaattaaaagactcagcctctttaggaagtttgctaaaatggacaggttatgtttaatttatttatatcttcgttaatccaagcatctaatgaacaaaaaactgctacagtgacgtcataattctataagggcaatagttgccaaatttcctctggtattattagcattctgcctttgcatagattagccttcaaatttattatttttagtattatttgatacgattgaagtggctaagattgattgagcttttcttgatcacattttctgcttcttagctaaagtaattttatttaaattgacatggcttgagttgtcatcattttctgctcttctagaatgatgtgtagagaaaacttgaagatactatcccttctttggcattcttctcttaatgctatgctattatttatcataatatgcatatatttagttgtatctggtatcattctaacactcataactaccattttagttaagtccaactttatatttgttacaatgcagtgttttgggaaaggtctattagtaattatttaagtattacatatttttatggaagtctttagaaggtgaagatcttactgagaaactattttctaaataaatttaattttcttttgtatttgtatcagatcatgcctactgtatgttagattttagactattttaaaagaaaccgtagattatataaaaatttttttgctgtttttaacnnnnnnnnnnnnnnnnnnnn

SEQ ID NO: 12304 - DNA, 563 bp, Homo sapiens
agagagccttgtcatctctctggggcttgaggcagggctggggcaaagtggctattggacaggctggcatgagacaatgtccttcttctcagctctactttactcacttctgtggagacctgcctgcgttcattctcatcccacatagaaccgggaatctttctggctcaagtcactaaacagacacatcagggaggcaacagcttgaaattgaaagcagaaaaaagtgtgcgtgtacacaaacatgtacaagcatgaatgtgtgtgcgcacatacacgcatgcacacctgcacatgcacacacctgcacgtgcatgcatgcacacttggccaccagttcaggactgcaaggacaggcatctctgccagggggctagcaaacagcaaaccccacagcctagaatccgcttttgctttcttgacttttcctgccctggtctgaaagaaccaatgacagaactggctcagggaccgagcatggggtgaagcagaagatctgagtaacccatatcctggcccaccagccccagaattattgagcatttgattgtttaaaaaaaaaa

SEQ ID NO: 12305 - DNA, 520 bp, Homo sapiens
  misc_feature 520: n = A,T,C or G
ccacgcgtccggaaaaactaatagaaaaatagatcttgcaaccctgaaaccaaagtaaatgaaaaagtttcgagatgaagtccatcacaagggagagagttgcctccccaggacggcgtctctctagagggactgagttccaaaccccagtgcagaaaggttgttaaggaaaatcaaagaaggttctggaatttgggttgcatattaaaatcacctatggagctttaaaagggaaagacaaaactgaacccagacactaccacaggcaatttgataaggatttttactccataactttttaacattttatatagaaaattttaagaacacacaatttacagagatcaccatgatgaaccctcatgtacctcatcaaacatcagtaactcacaactacggatcaatcttgtgtcaacctctgcttccacccacttccctctccaccccaaaataataattttttttttttgaaatggattatccctcttgtggcccaggctagagggcatcggggaaatcn

SEQ ID NO: 12306 - DNA, 548 bp, Homo sapiens
  misc_feature 463, 481, 538, 539, 540, 541, 542, 543, 544, 545, 546, 547,548: n = A,T,C or G
tagggagtcgacccacgcgtccgattttaggcagctttctctttttctgattggtttcagaaagataagatgcagttacaagcaaatggagaaattaagtacaaatgtctggtccgagaagcttagcaaacgtagcagtattagttctaacatccattttctgtcaatttattgaaaatatcttcaaaactgatacatcttttagaagtaatacaaattaaagagttcattgaaataaaggagatagttttatgacaccaagatttatctccacacttgttccttcatcttagatggaacaaatgcagagagtgtaaagcttaaaataactatatgctctacaatgtagataatcaaatgaaaatgctgtggtctcaaagccagaggaatgtggaccactttggtggccaaatttaaccagctgaggtctttcttgagtaccatctgagtcttcctttttaanaaaaaaaaaaaaaaaaangggggcggccgttaaactattttaaaaaaaaaacttccaaaacttccccgggacccnnnnnnnnnnn

SEQ ID NO: 12307 - DNA, 550 bp, Homo sapiens
  misc_feature 550: n = A,T,C or G
cttttctaaagattttatttgaatatgtttcctctcatccttctttgagtcatgctggatactccctctgctatatccatttattcatttaatgcccatagaggaccatgccaacccacatccatccagacttccaggcctaaggttctggttgaaatgacacagaaaccatggcaatggctatggacagtcctgtttctagaaggtgaccttcacacacattcccacaaaggctgcctgtgcttgttttaaattcagggttaccaatatccttccatttcagggacttcaaccacaagagttcttctatgttatcaggaattggaggtacaccaaaataatatcaaatatgcaaggaactaaagagatgctaatctcattcctgcatctcctggttctctggctgggtaaaacacccagcatattgttacctttgtgattaaaaaatccacagcatttaaaaggattatacctatgtcttcgtaaactaggctgactgaggtttaaaaaaaaaacataaaggcaatgtttatctttaaatatcaaacan

SEQ ID NO: 12308 - DNA, 586 bp, Homo sapiens
  misc_feature 1, 584, 585, 586: n = A,T,C or G
ntcgacttgtggggatttcctcctcctgggttcaccacctagttttccttgtgataaagttattttgtatgtagctatgagcacaggttgatgctggaaacacacatgtagtgtggattgtcattaagaatgtggagaactggctaaagaaaccacttgtacagttttgagatgagcactgcctgcctcagcatctgtggtaacggcttcacttgggtgcagagcttggcagaggtttgagtgactctatctcgatgatcgtctgtcagaggacaaggttaagtgtcaccaccgaggaccccgttgagcctctgggctggaagtaacttcccctgggccggtgaggcagcctctgggggtctttcctgacaagacccttcactgagctgcagtttggccacctctgccctcgcctccctgactgcagggcctcgaggtctcaccacctccagcctgagcgcccactgcccaggggcaatttaccgccttccccgggggctcaggatgctggctcctggggcagtgcccgcagctgggcccctccttcagggctggccacagcctcctgctgtgtcataccagcnnn

SEQ ID NO: 12309 - DNA, 390 bp, Homo sapiens
  misc_feature 1, 2, 390: n = A,T,C or G
nnggagctccaccgttgtggcggccgttgtactgccatgcaatgcaaggctgcacaccatgggggttaaaaaagaaaccttcccatgttgctcggaaagacccgaggcatgctaagatgtgcatgggtctcctgagcagttgtggaacttgctgccatgtgtctataaagggcaggcaacatatcttcaaaaacatttatttaagtctctggaagaacacaataatgatgtttgccgatagggaaaggtaaatggggacaggtgtgaggaggcttccatcctttctcatgccacttggaccacgtgaatgtggaaggtggccagggagaccctctctgcaagtccaggaatagggcggattcacccacagattgttataaagttcaatgn

SEQ ID NO: 12310 - DNA, 251 bp, Homo sapiens
  misc_feature 1: n = A,T,C or G
nctccaccgtttgtggcggccggtttgcgaggtggcgcaggtacgggcgtgcgcgccgctggcggggccgcagtctggcaagccgacagcaggctggcggcggcaaggacgatcatcgcgtgtctcatgcctgccagcctaccatggtttaactgaacaggcgtgccagctccacgccggggtcgggggcgcgcatgaacgcttcgcccaccaggaagctgtggatgtgcgcatcgcgcatgcgttgcaca

SEQ ID NO: 12311 - DNA, 381 bp, Homo sapiens
  misc_feature 1, 2, 3, 379, 380, 381: n = A,T,C or G
nnnagtcggcccgcacggcacggctttccgccacgccgccggtgatggcatcctgcatgaagttcaggtaaccggtgacggacggctcagacgtgatctgcatttccggcgccaccaggcccgccgtcgccagcgcggaattgggcggcacgtaggagggacggaagtagttgaagacggacggcgcgttcatggggttctggccgagtcccgacagcggatcgctgaggtaatagatgcggtactgcaaagcagcatccttggcgttaaacgcgcgcatccagttgcccaaacgcaccagcggttcgcgcagtttgcccgtgcgcagggtgctgccggctggcgcaagcgcctcggggtccagcagcacggcgcggannn

SEQ ID NO: 12312 - DNA, 329 bp, Homo sapiens
  misc_feature 1, 2, 3, 324, 325, 326, 327, 328, 329: n = A,T,C or G
nnngcagctccaccgcggtgtctgccgaggtaccaggccatgcatggatgcaagactcctctccctaacgattttgaagagatatccatccagttctcctctaaaacctaattgcttacccagatgaaaagatatttgagaataatgaacccatgagttgggtgggaagtttaggatacctttttattctgatgctcatgagagcaccatttagaaactacagcattgtggatttttggttctatttaatattaaaaaattagagcacaaggcattttaatatagggaacagcatactttcagatcctttctaaaagcagatgnnnnnn

SEQ ID NO: 12313 - DNA, 372 bp, Homo sapiens
acgcgggatttatgtcaatgataacaatttacctatttttcaatttctgtttgttttatgaaaaagcaaatagaagcaatcagggcactgcaagttgtgactactccaagatgtgaatcatggatcatgcaaattacaatcatgttttaacctgacctccaaagggagaataaagtaaaaattatcccatgtgaggattattcaccagtttatatgtcattagttaccagtttttctttatgaataatgtttagcaatattataaagtatgtctaattgttatcaggtttttggcttgttactttttggtagtaacttataaaactgactggaaaagaccaaataaggcactgtttgcatgttacaaattat

SEQ ID NO: 12314 - DNA, 508 bp, Homo sapiens
  misc_feature 508: n = A,T,C or G
acctgaaaaacagctggtaggatggaggaactgagcttttaaataggcaaatgtggctaggagctaccatactggacagcacagtgtattagtttggtgcaaaagtaattgtggttttggccatttttaagtggattggtaagcctggctatttaaagtgtggtccacagagcaggagaatcactacacctgagagctggtggaaatgtagatctctgacgttagcataggcttcctaaatcagaaactgcattctaacaagatctcctggtgcttctcatgcacagtaaagtttagaaagttaggagatgcatacaagtggttctcatcctgacagcacttcagacacaactgagaaacattaaaagaagctgagcctaggtcacaccctccacccagagattcttaggttaatggtttaaaggcttggcctgaacatgaagagttttaaaagcactctgggggattctaataaaaattcgagaaccatcccagcataagtcagtan

SEQ ID NO: 12315 - DNA, 516 bp, Homo sapiens
  misc_feature 511, 512, 513, 514, 515, 516: n = A,T,C or G
tgatcgacccgttcaactgggatgcgggcagcgtggcgcgtcccgtcatcaactacgcgcagtggggcacggccagcattaccgagcaaagcggcgtgtatgcgggcacgcgcctgcgcctggccgatccgctgtcgctggtgctgggcgggcgcgtgagctggtacaaggacgatgccggctactcggtggcgcgcgaattcactccttatgcgggtgtcgtgtatgacctcgacaagcagcattcggtgtacgccagctggaccgaaatcttccagccgcaggcttccacggacgccaatggacagcccttgaagccgatcagtggcaccaactatgaagcgggcgtgaaaggcgaatactttggcggcgccctcaatgccagcgcagccgtgttccagatccgccagcaaaaccggggcgtggacgacctggccggcccgaatccttgccccggcagcacgtggggctattgccagcgcgcgttgggcgaagtgcgcaacgaaagcgnnnnnn

SEQ ID NO: 12316 - DNA, 525 bp, Homo sapiens
  misc_feature 524, 525: n = A,T,C or G
acggtaccgggctcggtttggccattacccagaacatcatcagccagcaccagggtttgatcgaatgtgagagccatcccggccacaccaccttctcgatctttctgccactggaacaaggagccccatcgacatgagccgtagtgaaactgtctggatcgtcgatgacgaccgttctatccgctgggtcctggagaaagccttgcaacaggaaggcatgaccacccagagcttcgacagcgccgacggggtgatgagccgcctggctcgccagcagcccgacgtgatcatctccgacatccgcatgcccggcgccagtggcctggacctgctggcgcggattcgcgagcagcacccgcgcttgccggagattatcatgaccgcgcactcggacctggacagcgctgtcgcgtcctatcaaggcggtgcctttgaatacttgccaaaaccggtcgatgtaaacgaggcggtggccctggtaaaacgcgccaaccagcacgcccaggaacaacagaaccaggaann

SEQ ID NO: 12317 - DNA, 522 bp, Homo sapiens
acgcggggtgtcccatatttttcagggataaagacatagagctacaggtaatctcagatctcagtgtccagtaatatttattttataagagaaaaaaaccgaaaccataaaagttaaatgactggcccaggtatacatgcagctgcttcatgcaaaagtcctaccaggagcccttaccagcaccactgtctcagcagtttatccctgactttctgcttgctgccagtgaattgtttttgaaatcttttggaaaacttagatgtgtttggaagtacagtagagtacttaataaatcactagcttctgtgtatgtatggataagattacttataatttatagtcagaagcttctgtcatctagattggcttttttagattaccatacatggatgcaattttatgaagtgtgtttcttaatgaaataactatgccctcagagacctcatgtaataaaatatcccattatagaaacagtagtttgaggaacagggaaaaaaaaaaaaaaaaaaaaaaaaaaaaagt

SEQ ID NO: 12318 - DNA, 707 bp, Homo sapiens
  misc_feature 703, 704, 705, 706, 707: n = A,T,C or G
acttgactctccctgcactgccttgcttttgaaggcatctaaaatctctcacttttccccataccacatttcacagctgggtcattctgctggactcagcacaggaggaccctctctcacactggttggaaactttgggcacatttgaaaactgtcaacacaatctgtaaacacatcagtcataatgattctttcctaggaacttgacacacccagatgaactctcttgttatgacaggatcagtagcaggagaatttcctctcaacatctccctcatttattcaatactcaagaaatatccattgtgtgtcacactaacaggtgatgtgctcagctctgggtatacagcgattaacagacatttccactgccttcgtgaaggttacactctaggaggtagaaagacattaaacgagagaacacaccactaaatttgtacttacaaggggagatgacaactatgagataaaataattgatttctattccactagagaaaataaaggggccttagtttaaatggatccagggaggcccctttgaagaaatgacatgtgagggaaactgagagaagaatgttccaggcaggaaagagcaaagccataaggcaagcaagagactggtgaattccaggagcagaacaaaagccagtgtggctggggcgtgtgagtaatgggattggagggatggctaggaccactannnnn

SEQ ID NO: 12319 - DNA, 782 bp, Homo sapiens
actggctgggtcccaggtttgtctcactgctgtcggcttgatggaggtctcctcaccacagaacccaagtctctgtgggccctcagagcctcaggtccctttctctctgccttccagcatgttgccttccttttggaaggtgatcctttcaaagatgtgtcatctcttcttcccaggagctccccatgccttcttttcccactgctccctttcaactctcagcgccgctgggggcaggccccaggtgctggctctgcctgccaggccgcactcccgtgtctctgcaccccctgtgtccgggtgacactgcaggtctccagtactttcctctgcctgttggactttcagtggatgggtctgtttgtcccacagtttcagtgaagatgtactttgtgtacattttttgttctggaagtgagcagctgccatctgctaccagaatcctatgtatagatttgtttggctgtgaatcacattctcttagttttttctttgaacactacctttaggatctttccatctgtcggacgtgcatcataatcatagttcttcctctccatgctgtctcctgtgtctcctccaccccaataactacaaacattaaggcctgtgggagcctttccttgttgttactatgtactgaccctaatgtgaatcttagtcttaacttatacatttaaaccacttacatatattgtgattattgacattttgatttttttttaatctgtgctttctaattactattatttctccttcccccatcttcctcccgcgcggcc

SEQ ID NO: 12320 - DNA, 690 bp, Homo sapiens
  misc_feature 685, 686, 687, 688, 689, 690: n = A,T,C or G
ttggagctccccgcggtggcggccgaggtacgcgggggcggacgggcagcactctttctgcagaaggtaaaaatcaccttgctgaggaagcttttcgtctgctgattcttctttgtgacatcggggaataaggatttatttctaacagtcttgggggctcgtctgggatcacccagtctccttcgggtcggggtctctgattcccgcccccccaccaaggggaggcgccccactgccttactgcggtggcctcagggactgggaatccggacttacctgttgtgatgaataaacccggaccctcagcaacgtggaaaacggcgaataggcttgcattgcactgcctcggggaccagataaactctgttcacagagcaaagtaaagaaacgtcgcaagggtgcgacaaagtacttgcttggtggtcgggatattctggaggttaaaagtgtgtgtgaatagtcacaagcctcactgcagctgggtgttgcttgtgtaaatcatgataaagtcctactgctgggacccgagccgaagtgagtcctgcctgcggttccgtggctacctcatacggcttaaggcggatcttgccttggggtttataccggcacgccaatgctaagaggggcctaaattcccgtgaggaaagtggccaggtaggacaaagcgagtgaagagtgtaaaaannnnnn

SEQ ID NO: 12321 - DNA, 592 bp, Homo sapiens
  misc_feature 592: n = A,T,C or G
gcaaatgcaacgtatcgcccgagagatgaacctgtcggaaaccaccttcgtgctcaagccacgtaacggtggtgatgcgctgatccggattttcaccccggtcaacgaactgccctttgccggccatccgttactgggtacggccattgccctgggcgcgcacaccgataatcaccggctgtacctggaaacccagatgggcaccatcgcttttgaactggagcgtcagaacggcagcgtgatcgccgccagcatggaccagcccataccgacctggacggccctgggccgcgacgccgaattgctcaaggccttgggcatcagtgaatcgacctttcccatcgagatctatcacaacggcccgcgccatgtgtttgttggtctgccgagtatcgaggccttgtcggccctgcacccagaccatcgtgcgctgtccagcttccacgacatggccatcaactgttttgccggcgcgggacggcgctggcgcagccggatgttctcaccggcttatggtgtggtcgaagatgcgggcaccggctccgctgccgggccactggcgattcacctggcgcgccatggccaggtcgan

SEQ ID NO: 12322 - DNA, 539 bp, Homo sapiens
  misc_feature 534, 535, 536, 537, 538, 539: n = A,T,C or G
actctgcgttgttaccactgcttcccgcgtacacattacttgcacaaactgtttttgatttgtcccttactgaaactgtccttatgcttaatcatttttgtctttctttcatatctattagtttctctctaattgctttgatctgtatttttagctacattcactgttattttcctaagcctttcttgtattttgaagtgtccattttgtttccaactctctctcgtttttgtatattatttttatctttagtttttatatattagttttatctttagtttttagttttctaatttttaaaattagttccagcatgtggttatataattttatttttaaacttatgccccccaatgattacttaaattattcttttctgagaatttacaagattttaattataatctctattttgttatttataagatggattgtcataaattaaaggtgttatttttcatgaaaaaagttagaaatttaaaccttttctttgcttatactattcaattttgggtctttcttttaaggcggcannnnnn

SEQ ID NO: 12323 - DNA, 444 bp, Homo sapiens
  misc_feature 444: n = A,T,C or G
actttttaaacctcaatgccacactcataatgaataaccagtctactatctcttatgaattcctgataattttctctcatttttactcaaaaactgccaaatgaatccaggaccgtctttccaagacttaaactttattttattttgaatactatgagctctaaaatatctagattttgtcagataaaatccatggtgttgagaatctttgtgttaatatttggaattaataaatggaatgaaatactgatattaatataatagaaagactagagtctggcagaagtgggctggatttgtgcttcggaccttgggtaacttatctaactactccaaaccttggttttctttccaagaaactggaatgacccttttgggcattgttataagaattaaataatatatgtaggcacctaccaccattctagactttaacaagtaccn

SEQ ID NO: 12324 - DNA, 254 bp, Homo sapiens
  misc_feature 254: n = A,T,C or G
actcactgccctatgccaggaccacacactagctctcagtttctactccctactttaacaatctcaagatgttaaaatgtctcaaggcaaaatggcttgctatttagcaagtgttactagaagagaaagaaaagcatggtctgtaagctctccatttccttggtatattggcattttttttctcccagctcttaaacctcattcttagagaatctgctctctcttgagtggtgggcccatgtggttctgtaccn

SEQ ID NO: 12325 - DNA, 647 bp, Homo sapiens
acaaagggttatgcattagggactgagggcgtctatgtttatataaaatagcatttctatagaaattaaaaaacatacccatcactgtgatatgagatgctctgtctccatgtgatgcgaaaatatgtaaggagcttttgggctaaagcgtattcaaatgaatttttttttaagctaaggaatctaatcattgaaagtatctttgtaagtaattcaccaaatatttggccaggagaaaaataaacttttatttaaatgagcatttatttaaagtttgttattaaacttcttgtatttgcttgaagacgaggtctttaaaatcctgcataactttaaaatgtattgtatttcagaattatttgtcagagaaagataacagtgatacgaatataaataatataggatgataattatgatctaaaaccagtaggaatcatgttatttaaactttttcttgatattcttttgctttttgacctgaagtgttttatggatacatttcttcaacagcatttttcttcaaatgtgtatacagaactactttggattttaaaagcatcccaatttggggtccacagtctctggattatactatggtggataaaatacagcaagatttggctggctgtttgggcctccagctctgt

SEQ ID NO: 12326 - DNA, 376 bp, Homo sapiens
  misc_feature 376: n = A,T,C or G
acacacttgagaggcatcgctgtcctcccttcagctagccatattccgtcaatatatgaaggtttacctattagtatgataaatatcagatatgactttttactaccaaaatcagagcttaatcatcagcattgtttcttgctatttgtttggagaaattgtttcctgaccccaactataagactataggacccagcttatggaatgctgccttatctatcttggctgaactttccacacaaagtgacaatagtgcatgaaaaacaagtttagtggacaggtttacagactgtttatccctgctttctaaggaatatttttctaatacgcattgtatgtatgacaaaatttagactgtggtttgctttaatgatan

SEQ ID NO: 12327 - DNA, 455 bp, Homo sapiens
acttttctttatgaatgttataccagaacttaggaggaaaaaatttttgagcatactgaatattaggaattggatatctccctaaattattaaagttcatcttccataaattctgtaaaactgaatgtagtatttccccctcttcccatgcaagtaactgatatcactttagaaaacctgatatgaacattatttgttattgtgcttttatgaagaattctgtctaatcttctcataagaagaaagaattagaaccaaaaatctaattatcagatttagtaagatgtaggcaagatccacctatttttttcatttatgtctttcaaaatcaatcacattctattattcaccgatccactaaacagatgtagaattcctattatgtagcaggcattgttctgttaatgcaataatataatcaactaaaggaaaaaaaaaaaaaaaaaaaaaaaagt

SEQ ID NO: 12328 - DNA, 317 bp, Homo sapiens
  misc_feature 317: n = A,T,C or G
acctactagatgccaaggtcacgaattagggtaggaaaggagctaagaagagcaaaaatgttaaaaggaatccaaatgattttataggagtggtgagatggtggtaggaagagttgggatgacatcaaggtggaagaagtgttttgttttggagacagggacttgctcttttgcccaggctggagtgcagatcacggctcactgcagcctcgatctcctaggttcaagcagtcgtcctgccccagcctcccaagcagccgggaccacggatgtgtgtcaccatagctggctaatttttaaattgtttgtatagacan

SEQ ID NO: 12329 - DNA, 451 bp, Homo sapiens
  misc_feature 256: n = A,T,C or G
acctagaggaatagtgctgggaggtgcaggatggggtcaggagtaggggcaaatgagggatgtcttttgaaagtgagaagaaagcagagattctttttccaagaaaagattttttaaaatatcaagtaaacatatgatgatgatatcttagatataaacattgtaatacatttgctactctactcataaatcctttatcagacaaactgatgggatttaataatgacgtctttttgtatttgtctatggtagcatngtagtttctacatatactgacaattcatttatctttcttggtgttcttttattattaacagttctcagagtaaaacaaaaacaattttgaaaaaatttctttatctcattcaatatcatggcaaatgaaacgtcacaaaaatggtcataatttacattgagaaacaattacagttaaaatctaaaaagtggaaaa

SEQ ID NO: 12330 - DNA, 348 bp, Homo sapiens
  misc_feature 346, 347, 348: n = A,T,C or G
acgcgggaagagaaaatcacttggtttatagaaggcctttaacattttgtgagtatgtgttttaaaccaaaacccatagataggaagagccgacagggagctggaaactgcaataagctttcttctaactagcaaacgcagttgacagacatctttttatagacgtatctgtgattgcacgctgtttttaggcttgataattttttcaacaaggaaaaacttttcttcaatttgaaaaagctgtttacagtaaaatggcaaagtatgagaagacagaaagccatcctgctcattctaaagctaaattgggccacatttcccttaaagtatagacaacagcagcagnnn

SEQ ID NO: 12331 - DNA, 471 bp, Homo sapiens
  misc_feature 471: n = A,T,C or G
acagacggtcagaaggaaagaaggagagggattgcctgctgcctccccgcgtgcacacacgagagtgggtgctcccaccagctttcagggggctttcttcacgaatgtgagcactgattttgggagatctgcagtggaaagtcaagtcatgaatattttttataaagagagaaatgatgtaattttatcacagaagatatttcagatgtatttttccattttaaaaattcattggcagtgctcatacaagagaattacttgagctgaaaatgactctgtccagtttcttcctatttcgttaatgattttgcagtcactgaattctttctaaaagttgtataacccagataaagtcaggcctcctggaagccagcttcagcccagagacatacgaaaagaagcaccaaatatcactgaaaaccaatttaaatttatactgaataatctcattcataaaccacagcacaacan

SEQ ID NO: 12332 - DNA, 813 bp, Homo sapiens
  misc_feature 1, 2, 808, 809, 810, 811, 812, 813: n = A,T,C or G
nnaattgttgctgcttctgtgcaagatttaaaatgccgacaggctgtcccgtgtcctctggaagcagcttgaggccttaaccaaatgaaacacccagtcctactgtgtacagcagtgaccacaacaaaggctgtggtttctcccacactagccttaaataggtttaaattaatgctattcatcacagggtggaaaagaagacaaggaaaatccaagccagaagcattgggaaattttcttaccaacacactcaacctcttagccataaatgaactgacttccattcaaaggtttactccagaacaactatttctccctattcctgtacactctctgccttagaactaccatcttttgcactacattccagataaaggattttgttactacattctaggtaaaggatattgttactatcctcaagttacacagaaaacactcaaggatgtaaaatcaatatttatctcaaatttgttgactgctactgctatcttttttgaagaattaaaagataaattaaaatttctaaaaatatgccatatatcaataatttacaatagcttgatcagccaaaaaatccaccttgagcttaaagctagagtttgatagggtgatccttactctcctaatttaaatatcactgtatattagttttacaatatacagtgtatattgtgtatattgtgtatacaatatacagtgtatattctttttccaaacacactttattaataattacaaatcacaggaagtaactgcacaactttctactagggtgtttattaagttactgaaaaagtttaattannnnnn

SEQ ID NO: 12333 - DNA, 387 bp, Homo sapiens
  misc_feature 386, 387: n = A,T,C or G
actgatggcaaggttactcaaatatttatcaagcgtctcaaagaagaagactgatataaccttgcatgtttgaatacaaaaattaatatttagttactgtccactctcttatttccaggtagagggactctctgaccctcactcactcctctcctaatcagactggttggttttagagaaggaaatgaacatgcctagatcaaccccttcctctcccttttttcttgggatctgcacactccgcagagagcacgaattctcctctccacccagatccataaatgttcaggatctgctccctgctggaaatgccagcagttgggtgggggtatatttgattcgggggctactggcaagtccacagtttccccacaattaaaactacnn

SEQ ID NO: 12334 - DNA, 334 bp, Homo sapiens
accaaagagattaaggaaaaaatgcaggctgttgaatgatggggcccctgtgttctttccccacttggctctcacagtcatggcaaaaggccttttatccttcagtctaaaactcaaaactttctttggaaagcttgacttattctaaagatatcgcaggacttaacccaacaaacagccaggccgttgcaggcccaatcgtgatgccagcgtgctccaccctattaaaaataagcccatcagcatatatcggagaaaagcctttaacatggaagattaacacagaaaaaaaaactatcttgaagtaaataaagcgggagtggaagacgacagt

SEQ ID NO: 12335 - DNA, 406 bp, Homo sapiens
  misc_feature 405, 406: n = A,T,C or G
acactggaggtagggagctcagggatggcagctcagatccggaacaattacaattcaatacttgggcatcagcactctaaatcccgaggagctagccaggagtgaagtgaggaaagagcaaatcaatttaaacattgctaaataccaaagacaagctagctatttcttactttgcatgaggcttgcccacgtcctttcttgtaaattgtctggaccatctctggtcatttggtggcatcagcacgacagagatgtaacgatatgcagagagccatcgaagttgactgactgggtggaaacaaatgtgacttggcttggagtgtcaaagcaagaatgagtgcgtgcatcagatggaagttgtccatggggtcttgcagacatgcatcgttgcaaatgcagtctagnn

SEQ ID NO: 12336 - DNA, 381 bp, Homo sapiens
  misc_feature 370, 371, 372, 373, 374, 375, 376, 377, 378, 379, 380, 381: n = A,T,C or G
actttttaaaacaacctctccaacataatatcaaaaacgtaaagtattctcttaccttgcatatctacatcaaagaaaaccataaggaaaagaaactacagatgtgcacgcagttagtccaagatgcttaaaaatgtcacatcatgtttaacctgagtcaacctaacagtagggctgtaaaaacaactctacttcctgattggctactgcattcagctaatgtattgagggcctataatgactcagatcctaaaaatataaggaataagaagcaaagaacccttccctaagctagcgcaggagacctatcagtaaagacatgactgtaacacagcatgatatgttcactggtttaggtagcaacaagggnnnnnnnnnnnn

SEQ ID NO: 12337 - DNA, 655 bp, Homo sapiens
  misc_feature 1, 2, 3, 4, 5, 12, 15, 29, 641, 642, 643, 644, 645, 646,647, 648, 649, 650, 651, 652, 653, 654, 655: n = A,T,C or G
nnnnncatgccntgngaattgccaatttntccaagaagggaatgttaatcgtcttcagatggagcttgtgttgtgagctctggagagggggttgtctttctacactgcatctcccatccttcctaacgagtcacggagctgtcgactccgccttcttggctttagttaacaggttcttcttgtgtagtcacatcaacgtcgggtcacatgggaatgtggtaaagcctcattactgtagagttcagacatgatcacttaaaaagagctttattgggccgggcgcggtggcttactcctataatcccagcactttggggggccgaggcaggcagatcacctgaggtcaggagttcgagaccagcctggctaacatggcaaaaccctatctcttctaaaaatacaaaaattagcagggcgtggtggcgggcacctgtaatcccacctactcaggaggctgaggcacaagaattgcgtaaacctgggaggtggaggttgcagtgagctgaaattgcaccgctgcactccagcctgggcaacaaagtgagactccttctcaaaaaaaaaaaaactgaaaataggggccgccccggttcttttggctaaaaaacagtttggggccctaaagggggggggaaaaaacnnnnnnnnnnnnnnn

SEQ ID NO: 12338 - DNA, 481 bp, Homo sapiens
  misc_feature 481: n = A,T,C or G
acctgtaaatctctcagctaagttaagctataaatttgattaggttgacttgggcaaatgcaccataaagtcctttccagagaaggagttcacttttcataggttctacttgaaggaattgtccaagaaggtttactgtataaaggaaattgaacacagaaggaatgaaaagtaaaaattaaacctaaaatttgcagaagaaaacactacagaaaatttttgtgacctggggtttggcaaagatttcttaaatatgacaccagaagcacagtctataatgaacgtattagtttattgggttaatcaaaatgtaaaacttctgctcttcaaaagacagtattaagagaataaaaagagaaaccacagattgataatctttgtaagccatgtatctgatcaaggacatgtagaaatttataaagaactctgaaagctcaatagtaagaaaacaaatggctgggtgcggaaggctcatgcctgn

SEQ ID NO: 12339 - DNA, 425 bp, Homo sapiens
  misc_feature 422, 423, 424, 425: n = A,T,C or G
actatttttttcagttgtaaaaagtaaaagagctaggttttatgaacaggatgggaagccagttatattccagttatattcgatttctggttttaataaactaaagagaaaagtgctttttaggcaaaaatcctgagatttctaataacagactgtttttttcatcatcttattaaataacctattgcacactgattacatttattcttactattttctttattttttcctggatcattttcacaattttatttttcacagcattctcaatacttttcttcatgtttcattaatgttctgtatatagtccgaattctgtagcaacctctttagaagctctttattaatacctagctgaaatataaaaaatatgtaagtgtaaaactactcgattttatgggagctcgtttgcttagtggacnnnn

SEQ ID NO: 12340 - DNA, 277 bp, Homo sapiens
  misc_feature 1, 2, 3, 277: n = A,T,C or G
nnntggggaaaaaaatcgtggaattttggagacaaacaaatccacgtctaaatcctcactttgctacttacttactaatattctacccagggcaggttacttaatgtctctgagactgaatttttcttcatttaaaatggataaattactctttgtcttaaaagcttgttttgagataaataactttggatggtatgtacgtgtgtttcaacaagagtaacagtagttttcattttttaagtgtcttatagatgcttgggacagggacagagggtgn

SEQ ID NO: 12341 - DNA, 455 bp, Homo sapiens
  misc_feature 1: n = A,T,C or G
nagtgggtcaactggaggtcattaagaattctacctaccacaatttacaaggaaaaaacaaaaacttggcatcaataaagaattttatggcactaattagaaatgcagttctgagattctttagttttcaatcctgagagcagaataaccaaaaaaaatcataggtaactcccaaatctatttctccaacccttttagccttaatctatacatctttgcaaatacccaagacgcacttaaacttgattatttcattcaactttacctgataaaactgacttaatatcctccccctttctcagatttctactataccaccaggcgccagcctgccaagatctccactttcgagggattatcatttactctatgttctctttaacatcaaacagaaactaattcaacaaccaatcttaacaacttgcccttcctcgccactctgaaacacacttcgt

SEQ ID NO: 12342 - DNA, 854 bp, Homo sapiens
  misc_feature 1, 2, 3, 4, 81, 853, 854: n = A,T,C or G
nnnncccataactttggagactattttaatacagtatttcacacaatcttaggggtcactaatttgactgtcaaaactttntgttgaataaataaaaacttgctaatttccaatttgtaggctatagatgcagatgtgtatttgcttttggagagccttagaatcttttctttttgaaggtctccaaactctgtagttactgcttagattgtatctatattgatgaaaaaacccacctgcttcagggaaagcagcaagtatgatttctcccactaatttagttcttaacttgagtgtgtatggaaaatcacctgaggtggcttgttaaaagagcagaccctgaactggaccaccagaaatagtatttttttttggtctgaggcagagcataggaatctgtacttttaatacaccatcctggtggatctggcgcaagggaactccacacagaaaaacactgccctcacgttatgaaaggattcaacattattctctcttttgaaagataattggcttcaaagaataattgaaagttagaaacttgggtcttttacagaaccaggtaatatctctactactcttttgggaattagtcttgaactgcagccactgtgaaagcttctggtgttatttaaattaattcttgtattgttattaaactttccacatggttttgtttatctcctcaactagggtttgtgttcctgagaggcaagaactatgcttatatatttttaaaaaatattttcaacattatttagcactcttattaaatatttattaggccctcaataaacatactgtaattttggttaaaaagcaacctaaattgctttaaaatccaccttaactnn

SEQ ID NO: 12343 - DNA, 331 bp, Homo sapiens
  misc_feature 327, 328, 329, 330, 331: n = A,T,C or G
acctgcaaaggcactgaggtgggagggagcatgccaatgtagggaaatgaagaaacccagtgtgtatgagccaagctgaataaaacatgagaagaagctggagaatgagagagaccagtccccaagctctcaaggagcaagaggaagccttttcggcatttgaagtggagggatggcatgatctcgtgcgtagtttttaaaagaaccactcaggctactcttttgaaaatattgtgggaggccagagtagatgcctatagacttatacagaggttaaggcagttgataaagagtattaaacaatgatggtagcttaccttacatgcnnnnn

SEQ ID NO: 12344 - DNA, 604 bp, Homo sapiens
acaatgctcagttgccactataaagaatgagatgctgtgtccttctcagtgcctcagatcaggaggcacctggtgttggcttgtcacattactaatgatgtttacttccatcacttgattaaggtgatgtctgccagatttctctactgtaaagtttctattttttttctgtgtaatgaataagtatcttgtcaggagatgctttggacctatgtaagtatcttgtttctcatcatactttcaccaaactaattttagcattcgtggataattcttgtctgaaacagttattactacagtgtgtgccaaacagtgattttctacttccatcattacttctacatttgtcaattaaaatgttactataaggaagatattttcttttatattgaaaaaatgcaattttttaaaaatcagtctggactcttggattctcattatattggttataacccatgactataatacattttgtgctcagatttttctagattttacattaggatgcccttcaagttgggttctatgtatttttgccattttactgttgttttttgagcactgccttaccttttgaccccacaagatattctaggctcagtgt

SEQ ID NO: 12345 - DNA, 266 bp, Homo sapiens
  misc_feature 265, 266: n = A,T,C or G
ggactatgaattttaaaattatttgcttagacagaatatgtggacatacaaatgatgaatgtgataattgtcatacatatatatttatcttagacacttagtcaaaacatgtggtttttggttatgagttagacactgtcactttacctggaagatacaaagtaattgggtcatagactctcaaattatggaacacttagatttttcaggggaatgacatggagggagccaaggagtcttatgattaggtaaaatattggttggnn

SEQ ID NO: 12346 - DNA, 364 bp, Homo sapiens
actagaccctatccctgcaaggactgagctgtatttcaacaatcagagattagaataagatggcaccaatgcccagcagaagatggtcacagatgagatgagcagcaaataacatttgtggactgactttatcagaactcaacagaaactggccctttggcctgcaaaggtcagatatcaggtgaaaaatatatgggtaatgagtaaatatcatatctaggcatcaggaaatctcagttcttagctcagtgtccccattcacaagaaacagagctcagggctccagaaaagctggtcaggaaaagtggaaaataagattttctgctttgcaagcttgtctgggactgaggttgaccactgtacc

SEQ ID NO: 12347 - DNA, 504 bp, Homo sapiens
acagtaagctggctgctatttcggtgcccagctctgccgcttcgaggagttgcagatcaaactcactttcttcacacaggctcccaaagctcatatcagagagctggcatgacttctctatcaaactgaaagtttcagattcacaaagaagttcggtcaagtttcgaagttgagacagttttgattttaggacttcaggaactggaggaaagtaatcttcataggaaccattgtgaagaaaagattttttaaatcgtattgtggactgcaggagtcttagattttctggtgaacctctggccaaactgtcagtcacatttctcacacatgccaagtaaggaatataaggactatttgctgatatatttaagagggcatcttcaaagttttccagaattaggagctgtgcagccagactgcttggagataaggtctgtccatcatcctcattccacacatgcgttatattatcggagtcaccttgagctggggagtccagagtgt

SEQ ID NO: 12348 - DNA, 697 bp, Homo sapiens
accaacagcttttcagcagatgttagcattcacatatgagaaagttgcagcagtgtgcacattgtgcttctgccctagatccttatgtaaataggacgtccgtgacttgatgttgaaatgacctttcaggcagtattctgttgccacatgcctgagcttgtatcccagagtaattagacgttttgacttacacatcttggtatacagtgtttatgctaattataaatgtctgaaagtttcctgaaactttttctttgtagctttttatcaaagacagacaggaggttgggaggagggttgtggattgtggtcctaagcctttgattttcagtctctcatttttggaatgaaaattaaaatctgcttttccagttgccgagacatggtggtatatttttatattcttcatcttgaacaagaaactgtttggaatcacagcattttaatactttttaaataatattttattcttaaggcatttagctaaaaattcaagattgtgagtccctaaataaaaattattcccaactgacctgtaggaaaagcttaaaatactaaaattaaaatggagaagtttctatctcacaaaggaatggtcttccaatattgtttcaaaatcagacctcaaaacttatttcctgtggtggttacctcagtcctcaaagctgaccctaggtctaccagtagcagtcagtcc

SEQ ID NO: 12349 - DNA, 759 bp, Homo sapiens
acttttagtggctttagtttaaaagatatgcttcattacttcatgccaaatagtcaataaaaggtttgtaattcaacatcaaactgggtaagtccttcttaaaattgtttttaaaagcaaaagatcccaaaataccagttgtcaccattttaaaaggatattttaaaagatttcttttatggttattcagtaagaaaaatgaaaaagtcagaaattttacttctctcattttttagctgtatatcaatattttgaagaggtaacatatgcatacgctacaacagtcaaaaggccaaatagaatacagggaaaacagacataaacagataagtcattttcattccttttaacaccaccacattttctttgtcaaacccaacaaaatatattctttatattgtctaatattcagttcacattcagtttttcttttttttaaattatattagagacagggtctcaccatgttgcccaggctagtctcaaacttctgggctcaagcaattcacctgcctcccaaagtgctgggattataggcatgagccaccatgcgcagtcccattcagtttttcttgattgtaaaagtgtctttgtagggttatttgcttaagtcaatatccaaacaaggtctacacatggtatttggttgacaggttgtagtcttaacttagttttttgatgattattgcctaaatccattatatcatcagagattttaaaatgatgattttctaactcaagggcattacttcttaaagt

SEQ ID NO: 12350 - DNA, 378 bp, Homo sapiens
  misc_feature 1, 2, 3, 4: n = A,T,C or G
nnnnagtagatcctaaggccttctccttgtctcctctccatgggtccctcccacaacatgtggaaattctgggagatagagtccaagttgatatcttgtccagggacatcccagggaaggtgaacttgcccaggcagatgcgatagacagcgctcagaggaatccgcagcagctgcacacaactcagcatgatgaagtcgtatttgcagatcaagagagtcttgtctgtgaccagtagaattctctccttctcattgttccagtggtctatctttgtcaagagccagaagccttgaatggtctctccagaagcctcagctacgtgacctttcaagtcttccatggcagtctcaatggcccccggccgtgtagcaaagt

SEQ ID NO: 12351 - DNA, 1898 bp, Homo sapiens
  misc_feature 1, 2, 3, 4: n = A,T,C or G
nnnnggctatgtggcagatgctggccttgatgggagtccacagaaaatggggcctcactgactgcttgtccaggtatctcagtgggagggaatgggagtgggaaatggagtactcaaggccacaagacaggccgccatagaactttggccttggggaatgaaccaaagctagtttggagagtagggtgattggggtgatcacttttccctttaaaggtggcatgctgcaagaagaaaggctttgaagagtgatgggtagtcactaaccatggcactatgctatcttctaaccaacgtgatggggtcctggaatgatcctaggtctgcactagaagaggtagacccagaggaccttgtctaacataccccttgcttcttgacttcttcccatacctgcgttctttccggcctcaattactgcctgagatgttacacccttccagcataaatgatgaaccgcttcatggtgcctgtagaggcctcttgcagagcaccctgcagtggtatggtttgtgtatgcctcactgcactgtagagaaatgaagagcatgaggggaaaaatgagtagggcctggacttttagctagttttgaacactgcagttgctatgacttgcggttgttagcagccaacagaggagctttcatgagagggcacaggatacataacttgtctgattctttactatgacccatgagggttttagtaaaccaaaatgccaagtctaagataaactgccattccttggagtgagggttccatttacagcctgaatcacgacttttattttcctaatgccttctcttgcatcctcttagctgaaggttcctttaactggagtcttcacttagctgaggggactgaagaattgattctttacccttttacgtgggaaaaattaaagcaacatgttcgttcaggctgacaggacaaataagaggcagtagagggatagccagagcaggctagatcagaaaatatctttttttttttttccctcacccagctgagaatagttacttgggtttgaaattctagttaagtagcaagaacgcttggctgctatttgcaacaagggtaagcatgaagagggtgatttcagcatctggaaaggctcctctgtatttttcccctcaggccagctctactgctttctccctatagaaatgaaagtgcctgtttaaccagctccttggccctgtccccagtttattgatatgattaacctggagatgccaaagtgcttgttcagtgctgtgcctggggtgcacatcttgcccttttagactaatatctgggtcttccttttttttagtcaggaaatgtctctctccctctcctttccccctcctctctcctctctctttggttctcacactgagtgcttgggcgagtgccctgtctcattctttttttttcttccagtgctatccgtatcactcaagaacggcccttttctcctcttctctgtgcttctccttccttccttaatatggccagagcgtgggcagagctcacactgtatctttgcttccctctagggcaatgacatcattgcagcagccaagcgcatggctctgctgatggctgagatgtctcggctggtaagagggggcagtggtaccaagcgggcactcattcagtgtgccaaggacatcgccaaggcctcagatgaggtgactcggttggctaaggaggttgccaagcagtgcacagataaacggattagagccaacctcttacaggtactcggggaaagaggctgcgtgtgtgtgtgtgtgtgtgtgtgtgcgtgcgcgtgtgtgtgtgttggaggggagggtatgagagggagaaaagcaggagagaaaaactaggtaagggagtaagagattcaccagggacagatacattttgga

SEQ ID NO: 12352 - DNA, 401 bp, Homo sapiens
  misc_feature 401: n = A,T,C or G
actcccctccttcgctaccaacttcctggtcacagccaccatcatctccccgccaagcttcctaacaggactccctgctccttctcttaccccacccgtggtctattctcaacacggtagcaaaagagaacttcttaaaacttatagcagatcaacacctccacctctcgcaccagaactgcgtgaaagttgattatacaaaatgggtcagggtgtatcgcaaggtgtgaaagttcatgatgtggaatgggtcattctttgtcataccccaaactgaatcactctgagggcctggaggataaaggcactcagggcacatagcatggctccaagaatgtaattctctgcaagcccaactgctgaaactgcctgctgcaaccataagaccgggtttacctaan

SEQ ID NO: 12353 - DNA, 219 bp, Homo sapiens
acatttggggacaaaatgtttttgtggagataatgtagacttaaaattttaaatccgtagctgtattttcgtcacaatgaaaatttgatgtccttagtaagccccgaatagaaagccttgacttgctttttgagcatagttaacagtgttgagataagagaggtttgctggcagttgcactgatggctgcactgttgtccagtgggcccagctgggtgt

SEQ ID NO: 12354 - DNA, 357 bp, Homo sapiens
  misc_feature 350, 351, 352, 353, 354, 355, 356, 357: n = A,T,C or G
acacagcagcaaacagttcagattgttgatgcttttgatgaccattaatgcaaaaggattatggattatggcactgtattatgaatagacaaaaagattagtgaaaagttgtttagcctagtagacattttgacgctttctgcgtgaaattgaaagataaaccagagaaccattgaaagttcatgtatcaattaataggtcaagtaaaaatgtatctaaaattcaacaagaagagattgttttctatttcagttttcaaatgcaaggtagtgaaccgaaatcaaatcaacaaaataaatggtcccaaggactcttattataagtatacaaatgtgtaactcccaggaaannnnnnnn

SEQ ID NO: 12355 - DNA, 514 bp, Homo sapiens
  misc_feature 513, 514: n = A,T,C or G
actccagctatcaaaggagaatagcctttaaaacaccaggatcctggtcgagatggtagaggtggtctgtttgaatttgggtgaatagaggaaatgccagttaagggatagccattctacagacaaaaatgcagccgtctatacttttactccgtggtaatacattatttgtatttcttctttcttaagcctcttgtctgtttgtcttaggtatttgtcttatgtatttgtcacctacataaaatatgctcactaaaacgccactgactttaaggaattttaagtatgattatatgtggtccttgtagaaaaaccatctttaaagtgtaaaaaaagaagttttttttaaagctaaattagaaacaaaaaagatctgaaaactctggaatgtatacatatagaaatggttttttgaggaccatatgctcctctttgtaatacaaatgtgtcgaaagagcaaatatctgcaaaaatcaactacaaagaataccatgcgagttaatgcatatcaann

SEQ ID NO: 12356 - DNA, 1499 bp, Homo sapiens
  misc_feature 1, 2, 1499: n = A,T,C or G
nngagctagagtcttcctctgtcaccaggctggaatgcagtggtgtgatcagctcactgcaacctccgcgaccctggttcaagtgattctcctgcttcagtctcctgagtaactgtgattacaggcaagcaccaccacacccagctgatttttgtatttttagtagagatggggtttcaccattggacaggatggtctcgatctcctgacctcgtgattccctctgaaagtgctgggattacaggtgtgagccaccacacctggccttattttcatcttttgaaacaatgctatatgaagtcttccttgattctgcatgatctttccccagataaacaggtacctcccttccttgaggctagccttaggacctcactgatttttctactgcaccttgaccacctgaactgtacattattcctccacatgtctgtcccctctgctccaagactgcaggggagagtcttgcacatcatctttgtaaaaacagtctttgttttactcagaaattttgtattgagtcctgctacatacatgctaggcattagggtttaaaaagaatgaaaataaagcatgtcagggatggcttttctagaacacatgcccaagcagagacttaaatattgaggctagccagattaaaaggggtagagggcaggaaagggtgacagcatgccacgcagcagcaagagcgggagcgaggcctgaaagagtgaaagtatttgcctacaatagaaggatgagtgagtagggcactaccagcagctcagtaatgccagagaaagggcacacagggaaaagggctaaagatggagagtggggcagaagtcagattatgaaagccttatgtgtaattttaagatgcttggacattaatgttcaagagtggtccctggtcctatctgcatttagatatagatcactttaaatgccaaaaccaatattcctagtgaaccattattcattaagacaaggtgacagatagctcatgtggacacagctgagatgatactatgtagcaaattctcaataattctcatgaacacttggaaagtcaattctataataaagtcagagaaattataataaatcacttaatatttggtttgggaaggtgctttctaaagttatagtgcctatgaatttaactaataattgtgaattcagagctgtgacaataaagcaaagaaaccacattgtgtttgagtcagcaatctttagatttctatccagtcttcctacccagtccataaattctaagtataatcctggtactcgctctcaagtttaagttaaatgctagcctatacaaaaaacactctttctcttactcttttttgttatttttatgttactttgtttaaaggaagaacacaaaaatgccctgctaaagggattctgtttggctgcaggctgcaagaggggaaaaacacaaagcacattttgcagaaaatgattttttagaagtcagaactatgacatgaagtcaagcagggcan

SEQ ID NO: 12357 - DNA, 280 bp, Homo sapiens
acccagtgctttaactgagttgggatttttttttaatgttatagcatttaataggaaaaatcatttgaagatcatttatcttttgtataactgtaattgaaaatgtcaactaattatacagtgtttttccccataaaacacagtttagtgccaggagaaaaaagaactatttcttcagataactttatatgtgtccttttttttccattaaaaattaaatagcccaaagtatgttccttttggccttaatgacaggacctgaagccaaagctgtgcattc

SEQ ID NO: 12358 - DNA, 1073 bp, Homo sapiens
  misc_feature 1073: n = A,T,C or G
actcccccagcaaaaaccaaatgccagacacattttatataagaatgaacaattaatctgaataataaaaataaggcttatttataaaggttaagttgaatagtatatacatgcacatatatgcaaatatatataattcagatattttatctttcttaatgcttacatgactctaaactctcacaattttaaattaaaacataaatatgacataattgtaaatttttcagctttatacatcagcattttaccatcatgagaaaagatattctttttcttctttctaatttccccaaagttaaatttttaaaacatagtttactataaaaaaattatcaacaaattagcactgaataaattgttctttatttctagttaatttatttgaaaagttgatattttatgctctagtttctggcatgagatataaaacgtgccactgctctaaaaaatatatcagaaaatttttttccacaaatggcttttttaggaaaaaaaattataattaacaggatcaaaatttcacatagttccacatctctaaacttatatagaaatttaatgattacataacttcaaccatatcagcaaatacacttcttttactagcatgcatcaatatcctcccaattaaaatactctgtaagactgcctacagtatttcagatcaaaatagcttttactgaaatagactttcctgcctctctgatttagcatctcactttctcttattggcagatggttagccaagttctatttaaatccatatgtcttccataggcatcatacaaatactgaattaaaagatgaacaaatgttttaaagctaatcagattagcctttaagtgaaaaaagtaacaaagtggagtttcatttcctgcaaatgacttttactacatcacggttagatgactgaaggagttacatccccgtaaactacccagacaaaaataactcactgtatgagacaagattacagaaaaagactttcctgactttgattatttttttcatgaatccttcctctctgcatgaattccaatcctggcaggcaataaatctggtgcccgtcn

SEQ ID NO: 12359 - DNA, 408 bp, Homo sapiens
acaagttgcactgtctgaggaggtgcccttcaagctagcacatcaatactaaaaagaaaagcatgccgagagctggcagaaagaaggcttcaggcagaaagaacaacagcaaaagtcctaagactggaaaaggtctgagttgttcaggaaacagaaaggaaaccattgtggctggacccgaggtaagaagcaatgagggaaaggtgggaaaagagcaaggagggcccgaggtcatgggatggagttaggctgttaagtgctttgagagcctaacatcctaactcattgggaggttttcagcaaggtaggaacatggttggcattgcctttgagagctcttcccaacttctgtgtggagaatggcttgaagactgaaagcagagggtttgtaggaggctgatcggaagt

SEQ ID NO: 12360 - DNA, 326 bp, Homo sapiens
  misc_feature 326: n = A,T,C or G
acaggctttgatgtaggaccgtctacgtcatgagtgaagagcggtaaagtgccagggtgtctggtggacagagtgaataagaacatggtataagatgaggttatgactatattgtgtagaaccttataagccactttaatgattttgggttttgttctagacgggaaaccattggaaggccttgagaagagaagtgatgtgataggacctactctatcttctatgcagtgcattgacttggggccaagggtagattcagaaagactagtttagagactgttatagtaatccaagcaagagataatagtggcttgaatcaagctggn

SEQ ID NO: 12361 - DNA, 397 bp, Homo sapiens
acgcgggacctagctcgggaccggcctggagatggagttcgactgcgagggcctgagacggctgcttggcaagtttttaaagatagttctcagaaagacctgctgaattttactggcacaattcctgtgatgtatcagggtaatacatataacataccaattcgtttctggattttggattctcaccctttcgctccccctatttgcttcttgaagccaactgcaaatatgggaatcttagtcggaaaacatgtggatgctcaaggcagaatatatttgccctatctccaaaactggagccatcctaaatctgtcattgttggattaattaaagaaatgattgccaagtttcaagaggaacttcccatgtattctctatcatcatctgatgaggcac

SEQ ID NO: 12362 - DNA, 387 bp, Homo sapiens
  misc_feature 387: n = A,T,C or G
accagaaggcaggttgggtctagaaagccctgacagtctaagaaggtcctgagttcaggatactgaatagtgttacttcacactctagtcaagtgattctgagaccttagcatgcatcagagggctggtaaaacagattgttgtctccacctcaaagtatgtgattcagtagatttggggtggaattggaattgtggatttttaacattcttaggtgatgctgatgttgtttgtggtccagggagctcacgttgaagactgctgccctgggcaattgggatccatggaatgtttggaagtaaaagaataaaattatcatgactgtgtctaaaaaagatgacatttagcagagtgatggatatattggagaggaaagggcctaaggan

SEQ ID NO: 12363 - DNA, 861 bp, Homo sapiens
  misc_feature 855, 856, 857, 858, 859, 860, 861: n = A,T,C or G
actccctctcccctccctatctcaggaatgaagcttctgtgtctgctacaagcctccaatgccacaatgcaagctgttgagggggctcttcttcaacacctatgggcctgaaagattccagccacccaagatcttcagccctgaggttggaaactgacctgggggcctcagcttgctgtgactgtcactgcccatgtgttcttccccatgcctcaccttcctcctccaagtgcgtgaaacatcaatgaaccttgtgcttttgtcgtgtgatctgtaacaccccatcctttaccagacacccctgcatccaacaacgctatgaacagagttctccagcaacctgaattctttgacagaaggtggtttgtaatgtttgtctcaaaagaaacataaacatgttgtccaaatgaaaaatcaaatctttcgagtcctgagactctggctgtggaaatcgaaatagcatctaatgaatagcaccaaattaattatagcacctattcttacctagagactgatttatttagcaagatatagacagtttggtaaagaagcagagtggactttactttcacgaaaagaaatcctgatattcattctcaacagctgaggaagagtcctgtagacatggagtcacaatacctagatttaattctgactgtcttacaaaaggtaaaacatatcatcttccagcccttagtttcctcatctgtagagggaggataattggcccagcccttcctaggtctgaagtggttgtgagttcaaatggtataatttatgttgaaggtcactgaaaacagttcactgtgaagtcacctatgagacattatgttaattacagaaagattaaatcannnnnnn

SEQ ID NO: 12364 - DNA, 547 bp, Homo sapiens
  misc_feature 1, 547: n = A,T,C or G
ngtgggaggtcgacccacgcgatccgcccacgcgtccgaataagttaaatcccataatcaggatttctttatgttttaggatcacattagccttttccagagatagccgaagtgcctagagagatagcaaaatatttcactgttttgtatgtaaattgaaattgtactagtagtatatttgaaaagtgatatttaataagaagcctgtaaaaccctaagcttctctcccttattatttgaaaattattttaagacctgtagcccccacattttgatgttgttagatttatcaacattgtctgggtaatggtcctgttctatttagggtggtttttctgcttatggtctgtgctacttcttaatatacagtattaagagttttggttaactctgaactgcccgggttgattagagtgattccagacagatcgtgttttgaacttgcatttttattttcccattttaatggattgaaaaacattatttaatatgtgttctgggccacgcacagtggctcacgcctgtaatcgcaacactgtgggaggcn

SEQ ID NO: 12365 - DNA, 356 bp, Homo sapiens
  misc_feature 354, 355, 356: n = A,T,C or G
acatccttctgggattctaaacctcccttctccaaatatggccttgttgtttagtatagtcaccaggaatgattaaccaacattcaatctgagctaagagcaaagacaaacaagtgactgcctaacactgtatcaagtaagtgcacagcacacacaaacacacatgagttacttgctgccactttggccttaggagtataaatccccagattgagacagatcattaagtttcactttacacacaacacaatcctgtagagaaagaatgtgtgttcctccttttgcccttcaaaaacaaaggaattatttaaaaatgaaaccattctacccgtaacagggactgggattcatccnnn

SEQ ID NO: 12366 - DNA, 487 bp, Homo sapiens
actcaagctttggcttttctgaactttccttattttcaaaaatgtcccccagccccacttccacctgagacattcacacaccccatttcctcttccaggaaggctcttatgtcgcctgggtaaacttactcttcaagtctagtgacttttttccagaagctttcctgatatctttccatttcaccccactgctgacttattaaaatttctagaattttatacttttacactacattctctgtgttgtattctcttattcagggtctgctatttaatttttaagttccttgaaaatagagacaatttcattgttttcatcagtttggtccaagtatatataacatagatgaaaaatagatattttgtattatatatattatataaataattggtgaatgagatgaataaactatagtgagaagatgctaggctttgttaaccattcaaacctaagctcaaatcccagcgcgggcacttgctacctctg

SEQ ID NO: 12367 - DNA, 373 bp, Homo sapiens
  misc_feature 372, 373: n = A,T,C or G
accacttcctagatgtgagattgttggcaagcatttcgtctttgtgagcttcagtttccttatcaatacagtgcagctaatgctacccggcttacaggatcatggtgaagattcagaagaggtgacatagagcaagtgtccaggggtgtgtctgatgccaaggaggcacatggtaggtcagttctcttcatcccttgccttgcccctagaaaaggcatctgttttaagtcgcttgctgcaatccatcatccccctttcctccacctttacagctctctcccactatttctccctaacctttcccccttgaatgattgggaatttggggtttttctaagcacagccttcactccctgcctgaaccacagcaann

SEQ ID NO: 12368 - DNA, 1158 bp, Homo sapiens
  misc_feature 1, 2, 3, 4, 5, 6, 7, 8, 9, 10, 11, 12, 13, 14: n = A,T,C or G
nnnnnnnnnnnnnnccgaggtcgtggaggctttgaattaaatctaaaaacatcatcctgcctcttctattgtattccaaatgggcaaatttttaaaattacactttcaaaataacacgttaacaagattcaaaatcagcacattatcttaattacacaacaccgatgtgattacatcggaccaaacattttggcaaaatgtttgcctgacatcacaggaaccaaacaaggggatagctggttgaaatgtccacatttctaccggtggagacaccaaaatattgttaaatacactctactaacaacggaaataatgagctctctcagaatcaattccactttgcagggactagcatgggtaatgtattagagatactaagtttgcaatttggtatcttaaatttatttagggcctaatgcatttattcctctaatgaaaatgttttctagtagtattcaagatatatgtgcagagctgttactttttacagtagcagcttatttgtttttacacataattataatttaagaatgccgatcgtctcatgcaaagcagtcgaaaaacaaaaacagccgacaaaaccagagaaagctttctttattctaaaatgtctttacattaaaatatgtcagattaaagtctccactctacatacagatttaatttttaaccctgtgtctgggcagtattttaaattttcttatcacttttggagaattccacagaactatcttaagctagtttcaaacctggtaaaagttgtgagttcttttttttctttttcctcccatcaaattttgagatataaaatgcatcatgtctaaatgagaaacaattaaatgtcatattattttacaccattcataattttcaactaatcacaaagaatactatatgattttccaacatcactgtttttttgaagtgaaaatgatttatgaaaggatttccctctaactactccttagaaatgaccaaaatattttatcataaaaaggtgtgacaggagaactgaaatcactgatctctcaatttctgatgcatcaaaacatttctgaaaacacaagagaaaataaaacaaaataagtgcaaaattcatttgcattttacaggcaataacaaggtttctggaataagaaaaccccgaaaagataaagt

SEQ ID NO: 12369 - DNA, 357 bp, Homo sapiens
accacacagacacctcaggaccccagcaaatccaaacctgatctatcccttcactaccagatagcctcctcttcctctatccacttaaaggcacaagtgtattccctattttccctaccaaaagttgggaccccttcttaactaattccactttctcatcctcctaatctacttgttggaagataattctggcatttcttcagaaatgggtaaaagagattgatagaattgttaaggatgtttccaaaactattttggaaagaatgtatgtatgtctacatttaaggctaataagcgtgagcctttctactctagacattccaaggtcctaaaaaataatgtctaagagtgacatca

SEQ ID NO: 12370 - DNA, 564 bp, Homo sapiens
acagaagaaggaagggggctgagtcttgcatacttctactgcccccattttacctggtccctaggagtagtgtgagactgggacaagtgatctgggattacactgattagcatgcttcacaggagggaaatataaggagaaaggaagaagtatttctcagtaacaatccgagttagccagaaaagggctcacgaaaatccctgttttggtgatgagatcattgtatcattgtttagagatttcttaattcatgatgcaatgtatttttaaatggtaagttttagaaagcttgtttttataattctaaactctttcagacatcagttgtgtatctaatcttttgtttacaggacctactcaatctaaatcagaaaaagaacaggctgaagctacaaataagataaaaagaagtagaaatgactgtcttgtatttataaaatggcgatcatgagatttcatgttaatgactgactaccgagacatgctatttggctctatgtgtctgtttcccacagaaaggatgtcaggcctggtgttgatgggcaagctctccagaacatgggt

SEQ ID NO: 12371 - DNA, 480 bp, Homo sapiens
actctcttttccaactttccatggccacctttgcctgaagattcagctataaatcctttttcaaacttgacaagcacagcctttcaaaacataaccctaacttattttaccaatcttgttgctcacataactctgtattatgtgctttagctagtagacaatttgatgcttccttttcaaatcttttgtttatcctgttcttacagttagcagtttcctctctctagctatcctgcctcttctctcttatctttcttttattttctcgttatttttgaatatatagatattatttattaatttatctgttttcttcagcttcataacatttatgtgtcatttataaactttagaactttgttagaagtttaatttctcttctgtttttatagtgagtagagagaattattttcacatttatattactctaaatcatgctagccaaggaataatttatctcattaatttataacaaaatct

SEQ ID NO: 12372 - DNA, 371 bp, Homo sapiens
  misc_feature 371: n = A,T,C or G
accctgttgtcttcatgcgtagaaaggattgagccagctgagcaatctccaaggttatctcaaagacaatatttcattttatttttgtcgtgagaaccagtgttttagactctgtatgacctaagactgctggaaagaaggaagatctggttaaactaacacaaagagctcctcagagtgtagttttcttacctttattgcttccttgagttcttatattgtagcggagactgagtcctccatactgcctgggctctgattaaaataagacctctgatatcacatgcaatgaagaatagagagttctagtatgtaaagcattttacatctcccagttggatacttcagacttgtggtgagtgagtgatggn

SEQ ID NO: 12373 - DNA, 495 bp, Homo sapiens
  misc_feature 495: n = A,T,C or G
accaccaagtccatttcctgagtttaaatacccaccccaccgaactggggttgtgaccttcagcaagattgtgttctattttagtttgttttaaacttcttcaagtcttcattgtctcatctgtaaagtgaggatcacaatgggatcccacttctaaggtaggtatgaaaattaaatgcagtcctgaatgccacgtgcttagctcaagtcccagctaaatggaggctacagaggacattgggtgaaaccacacctttcttatcttgttgatggtcccaacaaccttgggtggggtagcctcttttgtctccctcattgggcagttacagaaagctacacctgagaggtcacacatctaggaagtagaagaacctgaactagaacccaggactctggatcttcccaggctctggcctccactgaaggtgtgaaagtcaatagcaattaggtggctgccccattcattgacatcagggcactggaaggtctgactcn

SEQ ID NO: 12374 - DNA, 542 bp, Homo sapiens
acagtggcctagatggctttagacttcaggattctttaccatctagccccttttactctaccaacttattttgttacttgttgacataatctgtagccaggaaagcctgcatacagtttgttatccctctgtctttgctcatgcgttttctgcatctggaatcatcttcctctcttctctctgctggttcatgtccctattttctttcaaaactcttctttgaaatttacatttttcaggaagcctttctctttggcttgctggacatctgaccggcatgttatcttttcatatttgttcaaaatgtcattttcaacatttactcaactaattaatatcaaggacttgccatcaattctctttttccctgcattgggttagaaacctaatttaacttcaacactgacatattggtattttagagtgggaaattgagactttgataggaaggtgtttgttgctgctgcaggtaatgtgcctgaacccaactgacattacacccagaattatagagggccaagtatagtactgtgtaaaaatga

SEQ ID NO: 12375 - DNA, 227 bp, Homo sapiens
  misc_feature 208, 209, 210, 211, 212, 213, 214, 215, 216, 217, 218, 219,220, 221, 222, 223, 224, 225, 226, 227: n = A,T,C or G
acagatgtggttgtgaaatagttcaaatcatggcacattgaatgtcctcactggatttttaggaatgtgttcactgagacagccaaatcctatttcattttctttggctcattgcattggctgtaaattggagatattcactttaatatgtgagtcaaaatttatttccaaacataatactgcaggtgttctgtcacagaatataaannnnnnnnnnnnnnnnnnnn

SEQ ID NO: 12376 - DNA, 1241 bp, Homo sapiens
  misc_feature 1, 2, 3, 1239, 1240, 1241: n = A,T,C or G
nnnacaagcgcgccctgcaggtggcacacaaagctgagatattgtcacctttgggagcactgtattacaacactggccgatacgaagaggctttgcagatttaccaggaagctgcagcacttcagccttctcagagggagctccgcttggcactggctcaggttttggccgtgatgggtcagacaaaagaagctgaaaagatgaccaatcacattgtgtcagaggagaccggatgccttgaatgctatcgcctcttgtcagccatctatagcaagcaggagaaccacgacaaggcacttgatgctatagacaaggctctccagctgaaaccaaaggacccaaaagtcatttctgaactttttttcacaaaaggaaaccaattaagagagcagaaccttctcgacaaagcttttgagagctatagagtggctgtgcaactaaacccagaccaagcacaggcctggatgaacatgggtggcatccaacacatcaagggaaaatatgtgtctgcaagagcttattatgagagagccttacagctggttccagacagcaaactgctgaaggaaaatcttgccaaattggatcgcctagaaaaacgattacaagaagttcgagaaaaggatcaaacatagcaccaccgtctgacccaacctcataggataatgtggtgcctctgaaaggggagtgatggaagccttgctttcacatcagcaggggcacaactaatgagattttctctcattccgagttcagggtgacacattttgggacatctgctggtagcccagtgctgaaggacttgcttttccatgaagaagacgaaaacagcaaacaagggcaagaaggtctgagagggaaggagaatgacatttacacattttacagatttttgtttggtttaactccagatttctcttgatatatctctgtgcttttgagacctggagatctaattctgtttagacattttttgtcccagaaatacagaagcttgaaatgctatgaaggcagagcttctattctttatgggatgaaatatttcaaaagaggataaatcctctgtggtaagccattcggaaaatcctaccaagaattggcttatttaattttccagaaccaggaatgagtatctaatagctttggtagaaccttccagaatatgtggggaaaaacgggctatggtaaagtgagcttatctaatatcctccaagagatttactaatgctaatggaggannn

SEQ ID NO: 12377 - DNA, 276 bp, Homo sapiens
actgtcagtgtgtcacacaggttagtgaggcttgaagcccttgctttttacacttacagttggtattcctgcagcacttggaagtgatcatgcctttttctagaagagttacctacagcagaagtgttaaaatggaagagatttacttccactattcctggggggattcttgttaccttggcttacctgaggacctacagttctacatttactccaggatacagggtctgaacatacttgctagaggaatgtgattgcactggggcatgagttgtt

SEQ ID NO: 12378 - DNA, 397 bp, Homo sapiens
actcttccttccagaggtttccccatgccctcttttggacttgatgggggtcatttgggacaataagggcctgataactcccttggacttaggaagcgagagagcaggaatcaagaaaagcttttgtgttttttggtttgtgtagaaaatatgatggattgagataaaatttttcaaaataggcccaatgaagaagagcagattcaaggagtaaaggattatttatgaggatggcctgtgcaaaaagacacccagagatttcatgctgttgattcacagaaagcctgttcctcttcactccgtagagtcctcagagtctggatcatcccttacagaagatccttgataatatttctgatatacctccaaggttccgtttgtcaaatgtgtgcgaccc

SEQ ID NO: 12379 - DNA, 650 bp, Homo sapiens
  misc_feature 1: n = A,T,C or G
ntacctattaataaatattgttttccacaaaaagaagccagggtcctttggagaaaaggtggattgccgaactgtgacaaggaaaactgaagataatcctggaatatcttgttgcacaaaatgtaaaaggcttgctcaaataaaaatatgggcatatcaaaaggacaaagggaggacttacagtcacacaaaccttgcaaatgtttgtagcagcttgttggtaatagaaaactaccggaaataacccaaatacccttcaaagtgtaaacggttgaatgaaatcaggtacttctatacagtggaatgctactcagcaatgaaaaagaaaaagatgcaacaacctggatagacctcataggcattatgtatagtaaaaaggtcaaccttaaaaggttatatattatatgattgcatttatataacattctcaaaataaaaaaaaactatagaggatgaagaatagactagtgatttccagggcacagggacagggtaggaaaagaattggtagacaatgtgaatgcaaagaggtctcctgtgttgatggaacaatctgtatcttgattgtggtagtggctactcaaatctatgtatggaataaattaaataaaattatacatatacacacaaataactgcaggtttaaaatg

SEQ ID NO: 12380 - DNA, 3811 bp, Homo sapiens
  misc_feature 1, 2, 3774, 3775, 3776, 3777, 3778, 3779, 3780, 3781, 3782,3783, 3784, 3785, 3786, 3787, 3788, 3789, 3790, 3791, 3792,3793, 3794, 3795, 3796, 3797, 3798, 3799, 3800, 3801, 3802,3803, 3804, 3805, 3806, 3807, 3808, 3809, 3810, 3811: n = A,T,C or G
nngacttgggatgaccggatgggatgagtgatgccagtggcagtgggagagaggatgaggagaaacggaatgaggaagtgcgctcctgtgttcgcgcccgtgcctcctctcacacaggctccacagtgcttcacccagccctgcgcacgcatctgttttctacctcttaggactcacttctgcaataggtgtcttggggacacaaaggaatccccaaacccaggtgcctccacgtgtaaactccaaataaagctgctgaaacatcaacactccatacgggaaacaagggaaggccgcccccaaatttaattgttacagaatttttaaaatgtcgattacaaacacaccatcattctgaaaaaaagagaaagaagaaaggggaagaaagaaaaaagaaaaattcaggaaaacagagagaagaaagtactcacccaaatcccatcgactaatcgatttctgggacatgacgtgggaagccgtttatcctatgttaatggctactcttcagatgaacttaaaaatggacttgtccaagattgaccttgtgttggtaattattgaagctatgtaatacattaaagtattcctctaattttttaatatatttgaaaaagtccatgctaaaaggttttttttaaggattgatttgtcaaatccctttgcaaattcttttaagattttggtcagaaatgaactctattaatagattgagtgctgtttccggtcataccggaacacgagtccaagctgcagctggcagggattgcggggtgccggccgtctgagtttttttaaaactgctcgccgcgaagtctgtctgcagccaaaatgtccaacagaaacaacaacaagcttcccagcaacctgccgcagttacagaatctaatcaagcgagacccgccggcctacatcgaggagtttctacagcagtataatcactacaaatccaatgtggagattttcaaattgcaaccaaataaacccagcaaagaactagcagagctggtgatgtttatggcacagattagtcactgctacccagagtacctaagtaattttcctcaagaggtgaaagatcttctctcctgcaatcataccgtattggatccagatctgcgaatgacattttgcaaagctttgatcttgctgagaaataagaatctcatcaatccatcaagcctgctagaactcttctttgaactttttcgttgccatgataaacttctgcgaaagactttatacacacatattgtgactgatatcaagaatataaatgcaaaacacaagaacaataaagtgaatgtagtattgcaaaatttcatgtacaccatgttaagagatagcaatgcaaccgcagccaagatgtctttagatgtaatgattgaactctacagaaggaacatctggaatgatgcaaaaactgtcaatgttatcacaactgcatgtttctctaaggtcaccaagatattagttgccgctttgacattctttcttgggaaagatgaagatgaaaaacaggacagtgactccgaatctgaggatgatggaccaacagcaagagacctgctagtacaatatgctacagggaagaaaagttccaaaaacaagaaaaagttggaaaaggcaatgaaagtgctcaagaaacaaaaaaagaagaaaaaaccagaggtgtttaacttttcagccattcacttgattcatgatccccaagattttgcggaaaaactactaaagcagcttgagtgctgtaaggagaggtttgaagtgaagatgatgctcatgaaccttatctccagattggtgggaattcatgagcttttcctcttcaatttctatccctttttgcaaaggtttctgcagccccaccaaagagaagtaaccaagatccttctgtttgctgcacaagcatctcatcacctagtacccccagagattattcaatcattgcttatgactgtggcaaacaattttgttaccgacaagaactctggagaagtcatgacagtaggaatcaatgctataaaggagataacagctcgatgtcctctggccatgactgaagaacttctccaagacctggctcagtataaaacacacaaggataagaatgtaatgatgtctgctagaactttgattcacctcttccgaacactgaatcctcagatgctgcagaagaaattccggggtaagcctacagaggcctccatagaagcaagagtacaagaatatggagaattagatgctaaagattacattccaggagcagaagttctggaagttgagaaagaagagaatgctgaaaatgatgaagatggatgggaaagtaccagtctcagtgaggaggaggatgctgatggtgaatggattgatgtgcaacactcttccgatgaagaacagcaagaaatctccaagaagctgaacagcatgcccatggaggagcggaaggccaaagctgcagccatcagcactagccgagttttaactcaggaagacttccagaaaatccgcatggcccaaatgagaaaagaacttgatgctgcccccgggaaatcccagaagaggaaatacattgaaatagacagtgatgaagagcccaggggtgaattactttctcttcgggacattgaacgccttcataaaaagccaaagtctgacaaagagacaagactagcaactgcaatggctggaaagacagaccgaaaagaatttgtgaggaagaaaaccaaaacaaatccattttccagttcgacaaataaagagaagaaaaaacagaagaactttatgatgatgcggtatagccagaatgtccggtcaaaaaataagcgttccttccgagaaaaacagttggcactacgagatgcacttttgaaaaagagaaaaagaatgaagtaacttcctggcaagttttccattcctagaagaatgctaagtttgtgtccttgctctgaaaattggtaaatcaagcatgtttgtttacattaaaaagtccagacacactgtattgtgaaaactgctgaacatgtggcagcaattttgtgtttttattttggagacggctaatggtaggaatgttaatgtaaatagtggtggtaatgtaaaatcatttcatttatcattcatgcaaaaaaaagtatgtattgagtgcctattcattgtcactgtagatgcaaaacgaatgagctgtaaccccttcactcaaggcattgacagcttagctgtgagggtggacacacatatgtgtatttacagtgcagtgtaaatagttctgtagtagaggttaactccatatttctgtgaggtcactgaggccttatggactaactctgtgaggataggagttatatattcttataagacaaaacaaaacaggacaatgttacaagagtaagaggttcttacttgtacataggctttcctgctgaaaacaggcccctgctgtacagattttgggtacataatttagctcttttagtcaatccaagagatttaagtgaccccccccccccgtgttttttttgtttttgtttttgttttgaatgccatgtaaaggctttttggttaagacctcacttttaaaactgccttaagtataaatagtacctttggaatatatttagttcatcatttgagctgccttcatactggtttcctcagccttccttcagcctgtaatattttcagcccactgtttaccttgtctcaataaaaggtttctaatgccaaaaaaaaaaaaaaaaaaaaaaggggggcctttaaacttttttaaaaaaaaannnnnnnnnnnnnnnnnnnnnnnnnnnnnnnnnnnnnn

SEQ ID NO: 12381 - DNA, 322 bp, Homo sapiens
accatagatcactggtaggggaaacaaaagcaaaagcaaaacaaaacaaaaacaatagatcctgatgacacagtctatttatacaaacgattgaagcaaaaatcaattgtaactgtatcagtttatgcagggagaaatgacaattctatgtcatgtgactagacaatatggtgacagatgggtttggaaagcttcaaaataattggtgtatgtttaaacagctcatagtgcccattacacataccgtatgggccgccaattatttctttccagtttctgttgccaaaatgctgaattcaaccaaccccctcacaatattggt

SEQ ID NO: 12382 - DNA, 566 bp, Homo sapiens
acaggtaagggggaagttccaaagctgttagtcaccttgttttcatgctgatcacccaaccagatctaatgtttgatgttctaagaactttaatgttttggaggaaatatcttgtggccttcaaaaaatcattctgtgaaatagttgtttctacctacattcgtctcattaatttttctacatacagcagaattctgcatatattagaggtaactcagtcagggtgtcatggaggaaggtgacccatggttcaccatcttgccaatagaaaaaccaataggaagtcatctaaccatcattcggagggattgaggtctgtcatagggagaacaaactaaagaactggactttgctttcagtcaagatggagtaacagggactaaatttaccctcccacctgaaacaaccccagaatccagataaataagaagacaatggtattgagacactggacatcagacaatgaaggacagtgctttgacaggtgggaaacaaacgagctgagccctgtaattgcctttcttaccaatttgagaacgtttccagggaggggagaccaagcaagt

SEQ ID NO: 12383 - DNA, 436 bp, Homo sapiens
  misc_feature 434, 435, 436: n = A,T,C or G
accagaacacaagagcaaacaaccaggggttttgaaactaaaagttaaagcaaagtaatccctgctcaatttctgtcctttttccactaagttacatgcctcccaaacaatccataaataatctatcaaaggaatcaaagataatgttgaagtattacctgtggcacttaagaagctgctagaaaatttgatctttcagagaatgctggtgagaataagtaaatgctagagaaggtctcaagttgtaagacttcatgatttcaaatacacaaatacaagaataaaaaatggtaaattttttcaaatatacctaaacactcatcttttcaagatttaatatgaagcattttttgggcaaagaaaacattttctccaattacagtatttttaaaaagacgagtgaaaacaaaaagtattttcagatatacccgcgnnn

SEQ ID NO: 12384 - DNA, 252 bp, Homo sapiens
acgcgggaactgcggtttcctggcgcgctcagacgtctgatgctttgcttgcctttgtaaagtcaggtatctttttctgcatgaagcctttgaaaattaacggttaattggtttcacagagcagtattgcagttcttttgtgaggatgcagaaacttgtgtaaattagcttttacctgtaaatctgtcgggatgttgagtatagaacaacaaataaggtgtatggcactgctttacaaattggttggtggtg

SEQ ID NO: 12385 - DNA, 336 bp, Homo sapiens
acccgtgacttattgcacttgaaaagtcacacacgatgaacattctggcaagagctgcagtgctttgcagggacacagcagtgttttgttttctgctggcaatggacaagcattcggtgagaaccaaggtgcagggtgttagggagacagacccagggtctggaggcatagagcttccatgacagactaggaagggaaatggtgagagtcacacataaataagacaagttcaccaacaacaagatcattattggtgagacacaatccaaaaacaagtaagacaaattcacaaataaaataatgaccatgtgttgtgaatgctataaaggaaacaga

SEQ ID NO: 12386 - DNA, 2129 bp, Homo sapiens
  misc_feature 1, 2, 3, 4, 5, 6, 7, 8, 9, 10, 11, 90, 94, 106, 113, 125,140, 142, 162, 179, 197, 211, 334, 365, 366, 367, 368, 369,370, 371, 372, 373, 374, 375, 376, 377, 378, 379, 380, 381,382, 383, 384, 385, 386, 387, 388, 389, 390, 391, 392: n = A,T,C or G
  misc_feature 393, 394, 395, 396, 397, 398, 399, 400, 401, 402, 403, 404,405, 406, 407, 408, 409, 410, 411, 412, 413, 414, 415, 416,417, 418, 419, 420, 421, 422, 423, 424, 425, 426, 427, 428,429, 430, 431, 432, 433, 434, 435, 436, 437, 438, 439: n = A,T,C or G
  misc_feature 440, 441, 442, 2128, 2129: n = A,T,C or G
nnnnnnnnnnnagggaaagcctgcatgggaagtgggaagttacttcccccctgcccaagggggaccccggtccatgttggcgggggtaancccntcccaccacccngcccggnggtttaaatgcngccggttacaggggngnggtccccatttcgcccattncagggcttgcgccaacntgttttggaaaagggccnattcgggtgcgggncccttttttcggcttattttacgccaagctgggcgaaaaagggggaatgtgcctgccaagggcgatttaaggttggggtaaccgcccagggttttttaccagtcaaaaacgtttgtaaaacgnggccagtgaaattgtaatacgacgacctcannnnnnnnnnnnnnnnnnnnnnnnnnnnnnnnnnnnnnnnnnnnnnnnnnnnnnnnnnnnnnnnnnnnnnnnnnnnnnggaaagtggcccaggcccccacggactgttacagaggcgacgtgaccgaccgccaacatggcggcgcccagtggcgtccacctgctcgtccgcagaggttctcatagaattttctcttcaccactcaatcatatctacttacacaagcagtcaagcagtcaacaaagaagaaatttcttttttcggagacaaagagatatttcacacagtatagttttgccggctgcagtttcttcagctcatccggttcctaagcacataaagaagccagactatgtgacgacaggcattgtaccagactggggagacagcatagaagttaagaatgaagatcagattcaagggcttcatcaggcttgtcagctggcccgccacgtcctcctcttggctgggaagagtttaaaggttgacatgacaactgaagagatagatgctcttgttcatcgggaaatcatcagtcataatgcctatccctcacctctaggctatggaggttttccaaaatctgtttgtacctctgtaaacaacgtgctctgtcatggtattcctgacagtcgacctcttcaggatggagatattatcaacattgatgtcacagtctattacaatggctaccatggagacacctctgaaacatttttggtgggcaatgtggacgaatgtggtaaaaagttagtggaggttgccaggaggtgtagagatgaagcaattgcagcttgcagagcaggggctcccttctctgtaattggaaacacaatcagccacataactcatcagaatggttttcaagtctgtccacattttgtgggacatggaataggatcttactttcatggacatccagaaatttggcatcatgcaaacgacagtgatctacccatggaggagggcatggcattcactatagagccaatcatcacggagggatcccctgaatttaaagtcctggaggatgcatggactgtggtctccctagacaatcaaaggtgtcggcgcagttcgagcacacggttctgatcacgtcgaggggcgcgcagatcctgaccaactacccatgagctgaggagccgccgaagccctccaaggccagtccagaggtgaagtttgaggccctccccccacccaccccacacgcacgcacgcacgctagaccgtttgctgcactaggaattcgagcttgggccccactcgcccagactggcccttctcgcatcgggacccgcgcttgcacgctgcaggagccgcaaacgtcagctgttctggaaaccgagaggtcccagagagaggagatacgggcgcatttgagagcaagggcctacttggccgggactgaagcttgcgagactaagagccagctcatctttgtaacattcataatacgggaaactgaggaccaggtggctcggaaaagagatgagttccagcttttacctaacacagggttctctcgtcgtcccccaacccctccagctcggcttctttgtgtccagggttgtagatttttggatagaggtgtttctgattctactgaactggccgaaaacctcacccagagccactgggattccagccaagagtggctgcggctaacaccaccaggacctcctggtcctgaggtgactccagtaggctccatgaggaatcccggaccctcaggacaaatgggagagttttgttttctctcann

SEQ ID NO: 12387 - DNA, 396 bp, Homo sapiens
acggggaaaagtgatgacagcgtgactatgtagagttatataaactatgtaaaaagtcataaaaatgtgagtggagtgaatttgtcacctcgattttcttttcccttaaccactctactttccttctctctccatctgtaatgctatgcagtaacttcagttttatgcttccatccatggcagatatcatcaagcaatctaacacttattcttgttgagggtccagtaagccttgagtccaagctgccactactacagggggttatccacatggaaagtgcagattgttactacttacctaattccgtaagcagaagcaaattctgtatagatgaaggacttaactatgacagccaatactttaaaatatttagaaaataaatatttttattatca

SEQ ID NO: 12388 - DNA, 605 bp, Homo sapiens
  misc_feature 604, 605: n = A,T,C or G
aaaaaggtctagaagtcaaatgggtccccagagagccagaaggctgttggtgagatggagcagtcactgagcgggtcaccaggagaacttactttatgagatctgctgctaatttctgactttgggcaagtcacctcaccagtctggggctaagattcactcctcatcagtaaaatgaatactttggatgagacgggaggttttcccattctgatgctaggatcttgttcatgagttaatgaagacagttgaggaaggtaaggagctatttctacttgattagtgaggcttcagtctatttcaacatttcaaagtttttcatgataatttgttcatgaaaaaaaaaagaaaacagaggagttgctccagctctaaaaaaaatttgaaaaccacaccctgtgctaattgcaagtctagtctactctggtgctgctctgtggtattgcagacatagagtctgctctgtggtacatatggaccaggtcttatgatgatgataggccatgtttagtggcttcacacagaggtacttcagagcttttatttggattcctcccacttggatactgttctgactgctttatcaaaattaagtgtctttgcnn

SEQ ID NO: 12389 - DNA, 297 bp, Homo sapiens
  misc_feature 295, 296, 297: n = A,T,C or G
acttttttttttttttttttttttttttgtttttttatggaaaaattttaaggttgtttattcaggagctagagttaggaactatatttttaatatccccattttctgaattttgccaatatgaatatgggatttaactatgaaagcataaatatgtctaaaagaaacatgatttttcgttacatagtatcattttcagcgtaggtcaatatcagctcttaaaagaatttgctaccaaaaaagtttaaaatcaaaacacagatatttaaaaaagttaatcccgcgtacctgcccnnn

SEQ ID NO: 12390 - DNA, 285 bp, Homo sapiens
actaaaatgtggagctcacaaacaatttagagccggtctggtggacttgtggtccgaagacctgggttgtgccctggcctggcttccctctggctgtggagccacaggcctgtaacttaagcttcactcggctccatttgggcagtcagggccgtgagaccccctttgcaaggtggttgtgactgcggcgtgagagaatgtacatgaaggtgcttttcgcagtatacaatgcacttgttagcagtgcttggccttttcagtgtaactaagtctgattatacgccc

SEQ ID NO: 12391 - DNA, 287 bp, Homo sapiens
acgttatttattccttatttcaaaaaaaaaatacttttgtgaacaggtgagaaaaggaaaaaaaagagaaggaagggaatatcctaaggaatagaggccacaattagaagaatgatagaaagaatatgcaggttactagtcaaacaattagagaatatttaccaggaataaatggtgtgtgaatcaacttcttagaattctagactagtgatattaaattaaagaaaactctaagtaaacccacatatcctttgttgtgctgggcaataatgatacgtgtgtttaaa

SEQ ID NO: 12392 - DNA, 288 bp, Homo sapiens
  misc_feature 287, 288: n = A,T,C or G
acgcggggaccgtaatttaaataggctaagtttaaaggattatgatgctgtgatagaacaatataaatatgtttagagaatctaaactattctagggctgagggcgagtagccaaagtaggacaaagttggaagagagtccccctctggtgttcagactttattggagaagttgtggctgcacgacactggatgatgtggaagtttgctggcgtgcctcgggccagagctggtttagaattgtctgataaacaggaaacggtcctctgggacacaggcaagccaagnn

SEQ ID NO: 12393 - DNA, 787 bp, Homo sapiens
actctagcctgggcgacagaacgagactctgtctccaaaaacaaacaaacaaaacacagaaatactgggaataaaagtatttttgaaacatgtagatcctcttttattaagaaagaggcagacatctcacacttaggaaaatctcaacccttaaagagagaaatgaaatagaaattttacaaatcaaaacaaaagtaaaaaaaatcaaaaataacagatttttatcaaagaaattaaaatttcagatttaacgtggaaaatatctgaaaaatgttgtgattatgaataagccttatgacatttctgcatcacttcctgacttatagacctatttctctaaattgatattcattctacaccaatgaaccactaaaggccttgttcatcaagattccagaggtgatttctattcatattttgctatgaatacaccaaactgtatgaaaagttagtttttttccatttctgtaaatataagtttaataaaatacaaccacagataacacaccaggccaatgtctcagtcaattaccaacttagccatgttttcctatccaaaaaattcatttgtttttggtgacagtggtgatgaaatcatttatttacttatttttcatttggttttcatgaaatacttgttccagtttgttccatgtaggttttgagaaagattacagtattttgttgttctaataaactgagacattcagttctatcagacaacgatcttacttttattctagctgccagaaaagtcacagctaaagttgacattcaattcccgcgt

SEQ ID NO: 12394 - DNA, 486 bp, Homo sapiens
  misc_feature 483, 484, 485, 486: n = A,T,C or G
acttctaaataatatgtgaattacagaattatttatctcaaaataaatttaaaaataggtaacactaaacaaatatgtaaaacaaacttatgaaagtttgtagaatatagtaaaagtaatgattagtgagaaatgtatagcattaagtgcatatattcgaaaatattaaagacgtaaaatcaagtgttcagcaactagagaaaaaagaccaagttaaacataaaacaaggagaataaaataaataataaaaggggagaaaatcattgaaatggaaaattggaaaacaatttaaaaatcaacaaaactaacattgtattctttgaaaagatctgaaaatttctaatcctcaatccaagccagtccagccacaaacaaaatagagaagacaaaaatttataaaaccagaaataaaagaaaaaaaagagtagtcattactttcttatatcatgtatattaaaaggataataagaagtacctggccnnnn

SEQ ID NO: 12395 - DNA, 605 bp, Homo sapiens
  misc_feature 602, 603, 604, 605: n = A,T,C or G
cgggcaggacacagcatgcaggctgcagcctgggcccctgccaggcaagatgtagggtgtgaggttgtgctctgccccattcactctggaacagctccgcccttgagtccaggatattttctcagtgcctccacgcatttgaccatccagaaaacatcccaactcagtgtgcctcggccaccataaatcagccaaccacacatgctgccctcaatgcttctgaatatcaagggaaaggatctgcctcatcctgccctgctcctgaggcttgcgcattgacgcttgagttatgtcattatttttttaagtgatagaaatctagtcaatgatttgtagcaatcaccactgtgcaacgtatgccaaaaaactctgtctatccttacagaaggagggagaaacctagcaaattagtctgacttccttgacacaattctgtggtgggccagtattaggtaaggctaaaatcaggtgctgtgattaaaagattatgacaatgtgaaaaagtcagtcatcacataaattagaaaatgttttcaaggaaaccaagagaggcacatccttggaggtcaagggttccccaaaggtcaagaaggacaataaannnn

SEQ ID NO: 12396 - DNA, 830 bp, Homo sapiens
acagtgcacacacacacacaagctcatgcatccatacgcacaaggtgctggtaagcatggctgctcagctcaggattctcagatccagcagtgcagaaagtcctcagctttgtctgtatacatgtccaccaagacaggcttgcaatttgtatttttaaccactggtaagggtctaggagccaatagaaaccacagaactaaaattaccaggttcaaattgctggacaaactttagacaaggatgaatagaaaatgaatggtagacaaaacagaagctaatgctaagatgcaattttatagctggatgatctctagtttctttttataactgcatgagtccctttttcatgttcccagaaagaaggctccaaagaacttaggagattctacccagggaaaacagaatgccgcagctcggctgtttgaatatgctagactgtcttcagacagttcaatagagacagaaaatgagagacaggcctgtacatagactgcaggataagaaaaaaacaactagcagaaatgtattaggggttgagcatacctaatctgaaaatctaacatctgagatgctctaaagtcccgaactttttgagagccgacatgacacaacaagtggaatagtccaccactgacctcctgagccagtcacatcaaaatgcagctcaagctttgtttcatgcacaaaattattacgcactgcataaaattaccttcaggccatgtgtataacatatatatgaaacataaataaattttgtgttcaggcttgggccccatccccgagatatctcattctgtatatgcaaatattcccggacgcgtgggtc

SEQ ID NO: 12397 - DNA, 302 bp, Homo sapiens
accaaaacttgtccgaaaattatagctaaagttttctcacttttcctgtctttctcactactgggaaggcattaggaatggaattatctgagcatgcagaattgtgttttatttgcaataggtgagtattaacaaaaatgcataggtgtgcatctataaaatttatcatatacactcagtatagacaaatacttatgaaacattagaaaatcagctgaataccttgttaatacacagtatcattcagcataattgagtttctaaattttaataagttctcaggcgatgctgataccagtggt

SEQ ID NO: 12398 - DNA, 643 bp, Homo sapiens
agtactcagaagtcagagttgagagacagaggcaccccggacagagacgtgaagcactgaataaatagatcagaatgactgaaaaagccccagagccacatgtggaggaggatgacgatgatgagctggacagcaagctcaattataagcctccaccacagaagtccctgaaagagctgcaggaaatggacaaagatgatgagagtctaattaagtacaagaaaacgctgctgggagatggtcctgtggtgacaggtatgtgtgtacagagaacagggtgggtggaagatcgctgagagggaagaagacattttggctgctcaggagcagcagcaaagggaagaggaccaactgcttccaggaaaaagtgagcgaggcacaatttatatatgctgattaaagttatgaactgtataattaagtcttcttaagagataagatgcaagtcagcagtgagataggcacacataacacacagaggggatttagaaagaattccaggctaccacttagaattgtatttctctctctccattttctctctttctcagtccttacctaaccgttcatctcttccacatacaccgcggcagaacaagacatggcccagagatataaatggacagtgcccaattagcagagt

SEQ ID NO: 12399 - DNA, 466 bp, Homo sapiens
  misc_feature 1, 2, 3: n = A,T,C or G
nnnataagataaattatgcttttttggatcctttgcaaagcaaaagcctgatctgacatggttgacttaaaaacttggtgcaggttgtttcagcaatgtggatggagaagcatataggagtttattactgattacctggatgtggagaagtgacagctatatgtgctttacaggaaagatggcgtgggttttatttatacacagccttgcctagaaagggtaagagatggtttgtagggacacataaaaaataaggtcatgtaaatcagaagtaggtgggaatgtctacagtaattctcttcattttaaaatttttaggtaagtaaaatacttttacgtctataggttggttgcttgccatattgcttgccattattacaagaggggaatgttaatagtttatcgtattttataaagtatttcttgaaatatatttccaggtaaattagttttagtattaatcagt

SEQ ID NO: 12400 - DNA, 1871 bp, Homo sapiens
  misc_feature 1862, 1863, 1869, 1870, 1871: n = A,T,C or G
gccgagagctgcgggcgggctggaggtaccccaccgcggggtggtgctctgactgcgggaaccgttgaagagctgcccccggggagtcagcgaggcgccactggtctcttagacatcttctcaagattatgctaagagaaatgactgcacccttttcctgagctatggcagtcagacctggcagtggtaactactctacagaactcccaaacctggcaaggatggtgcagattttggcagattatggctttgtccccacccagcactgatgatattataaacaactttcattgttagagagaggagagagagagaagccttgttggttgacgtcacttggttcatgaagccttcgcctagaagtgaagctgctgaacaaaccttgagaagaatcatctcctgcttcaatctgctgctggataggaactaatcagagagagagaagcggaagacggagaaggagggagtcgaaggctttcccgatcacaaatctcacctccactacaactctctttatacttttcttgcagaaataataatagaaataaggaggtggtggggtttccaaaaatcttaaccttcaaccatctggggaaaaggcaaaaatcccatctaccgcaactctcagttcgagagtaaaggtttcccaacagtgatgtcacaagattgaccacattgatcacaatatggagtctggagaacggttaccatcctcagcagcctcctctactacaccaacttcatcttcgacaccttctgtggcttcagtagtttcaaaaggtggcctttccactggagttgcttcacttagctctacaatcaacccatgtggacatttattcagaacagctggggatcaaccgtttaacctgtccacagtgtcgagtgccttcccaatggtcagccacccagtctttggtctacattcagccagctcagggcattcagaatttggtggtttggggacacttggtacacccacagccttagccgcacatccccaactagcatcttttccagaatggtggcgaacaactgatgctcatactcgtacaggagcaaccttctttccaccattactgggaattccaccactatttgctcccccagcccagaatcatgattcttcttcattccattcaaggacttcgggaaaaagtaatcgaaatggtcccgaaaaaggtgtaaatgggtcaataaatggaagtaatacatcatctgtaattggtatcaacacatctgtactatccactactgcttcaagttccatgggacaaactaaaagtacaagctcaggtggaggaaatcgaaaatgtaatcaggaacaaagcaaaaaccagcctttggatgctagagttgacaaaatcaaagataagaaaccaaggaagaaagcaatggaaagttctagcaacagtgatagtgattcaggcacatcatcagacacctcaagtgaaggcattagtagcagtgattcagatgatctagaagaagatgaagaagaagaagatccaccagtcttcgaagaaagtgaagatgatgattctgattccgagagtgaagccaacttaaagtaacaaacccaggctattacctgggttttcagacccaaagcatgggcgaaagcatggagagccaggaaaagataaccagcttactctgcgttgatccagagcgctctttcatccaggagcgcgcggttggcagaggtccatttccagtcagaagggtcgggccacacagtggagcacgcggggcggagcctcggggcgcccagaggagaaatcctcggcgagggaaaccacacacggggagcagaaaaacccaaaaacaaggtgggccacacctcgcgcaacaccaacccnnacatgnnn

SEQ ID NO: 12401 - DNA, 1039 bp, Homo sapiens
  misc_feature 1039: n = A,T,C or G
aacggttgtggggaaagtctcccacagagccccattgttaaacgcacaccgcgggtggagagccccccagcgtatccggcgcaagggacaccaggggctctttcaatcaagaatagtcctatccaggtgtgacatgactgttttggagatgtctgcgcctgcttcttgcaatattcggataatctgaaatggtgccctggagctccgtccaggatggataatcacaggacaaccaagctgagcctgggcatgagctgtggcctggagaacctttctttcactctcagtcaaaggccaggagcaaccaatttctccaataatgccacacttgatactggttccatcagctccatggagaatttcattcataaggacatcggtaagctgctccactgacatggccctggtctctgaggagtgagttgcatccacataaaacccggctccagatatgatatggacgccagtctcttctgcaagcctcttcaacgtctgtgtgtctcggctaatcccagtggttgtgttttccaccaaagcccctccaccattagctttaaaatacaacagttcttcctttatggcttctgtctcctgatttaattgaaggttttctttatgggaataggcgtttttctgaatccaatataaatttttcatcacgataggttctttggaaatagcttcctggcacgggggaggtggacagtaacagcagtcaaaggtcatggccaggtgttcatgggtcagggtacggcccagtttgcttggctctacaaggcccaaaacggtttggacttttccacttaaggaagacatttctgatggtaccaccaagagatgttctaaaaagaggatttcttttttgtgaatgcggtttctctcctctctctctttctgtcttaaaataccttaatattttcagactgtggttgactacaggtaactcgggtacacgcgccgatatccagtgcattccgaccggtaggaagttcgctcgagctcaggaggtcgaggctgcagtgagctgtgatcgcggacn

SEQ ID NO: 12402 - DNA, 419 bp, Homo sapiens
  misc_feature 416, 417, 418, 419: n = A,T,C or G
aacccccccctttttttcagatcagaacactgaggctcagggaggcaaattaaacttctcaaatggagccaaaatcgcaaccagcatgagttctggattttatgctacacacatttataaactaggaaatttcacccttgaatgggaatttctggcttgaaatgttggaaggtctcaacccctgtgttgagttctcactgggcaggagctgagtcgaggctgctctgcatcctctcctgtctcctcttgacttgctccactcactctactgagcctgggaggcatctcattggctgtgtagctgcctcctccagggctctgctgctcacctgtgcagtatctcaaattacaccagggagtgccttccaaccggtacctgcccgggcggccgctcaaagggcgaattccaacacacnnnn

SEQ ID NO: 12403 - DNA, 704 bp, Homo sapiens
  misc_feature 1, 2, 3: n = A,T,C or G
nnnacaggcggagggggcagaaactgacatcatggagtgtcaggcacggtgctggtgctatgcatacactcaacaagggcctgggtaatgcaacatggagaagggaaaactggggggcagaacaattttgtcgtctgaaagcctttcacagagaggccctgaacccatagctctccttctctgaggacagaaaaggaggaagtgtgtctgtcctgcagtatgtgggatggatagatggatgcgaaattaagcactgaagtgggttgcttggagaggcaatgactgccccctgccctcacctgaaaatccttaaagacagaagggatcatccgcccaggaagctgaggctgcaggataagctggccttttcctgaacagtgacagttggagcgttcaccctcactgtccttgtcagagttacaggcaagaaaggagaatccttttggataaagtgtcttaaaggaactgttgatttacccttttgctttatggtctcctgatgtagtgagcaaggttcagggagattagctaactgcaggcagactgatcttcctgtgcagagaaataaggtagattctcattatcttccagctcattttcccaagaattatgtattctccggccagaaaacgacctccaaacctccaaaccttttcaactacacgcagcaaaaagctaatacaatgccttctgcatttgactgt

SEQ ID NO: 12404 - DNA, 1597 bp, Homo sapiens
  misc_feature 1, 2, 3, 1594, 1595, 1596, 1597: n = A,T,C or G
nnnacgccgtcccggcttctcacaaaaggaccacacagtttcagtgtccctcctctgtacacatggccctttgttcatgttactctaatcggggaataatgcgttgtcacatctctgtcacttcctggaccctgagctcccgggggtggactcatgctgctaatgctcctactaagcctcctccattattctcttctttgttttcctcttacctataatcatcactaacatttttattattgtcatctttgcatctctatctaacctgaccctctagcacccagcacagagcatatagtaaatgtatcctgattaatttagaattagtaagtaatttatcaatatatagtaggtcttttttttttttaagactaatggaaatgctctcatctgcatagttgctcctttttggatccttcttgatcatcaaaagtgttttttccttctcacctttgacagatccttgagcagagttctctttcagcccctgtgatctggcagtacaaatattcctagtaaattcaatcattcattcgttcattcatgcagcatgaattcatatttcccgagcttatggtatgcacaatactaggaaaagttcaaccatgagcaacattccttacatcttaatggagggaaacagagcttaaacaaatgactacagatttggaaggaagcagtgctgtaaggaaacctgaagtagtgtaaagagagaaagcttagtgggaaaggccctttcttttcatttggtgtcttgttttctactcttgctcatgaaatgttctgagtagcttcaaatatgttttaaattgaattgtgtagagtccagtacctctgagaggtaactgagtgcagctattctagggagatgtgttctttatttgtttgctttgttttatttttaaagaagctgtggaaaaattctttcaagtgtaagtttaaatgactttattactgtttgttcttatttggtcgcctatagtaacatttttaccctgctttaattgaaggctcttgagatctgtcaacagagaaactttgtagaagagacagtttatcttctgagccgaatgggtaatagccgaagtgccctgaagatgattatggaggaattacatgatgttgataaagcaatcgaatttgccaaggagcaagatgatggagagctgtgggaagattcgattttatattccattgacaaagcaccatttattactggcttgttaacaacattggcacacatgttgacccaattctactgattcaccgtattaaggaaggcatggagatccccaattgagagattccttggttaaaaatctgcaagactaccattgcaattctgctcggaaggctgcagagcattctcgtagctgactcttggtcttactgagaaatggccgattcaatgacaggggtccggtgagaacggcaaacacgcgagtcccgccatacccccatgcccacacaggcgcaagccctcaaccgggggcacacatgcgcgcacgtcacaaggggctcacgcacaagatctcgtcaagatcacaggcgccacagcggaccaagaatgccgcaacacacacacgcgcggcannnn

SEQ ID NO: 12405 - DNA, 522 bp, Homo sapiens
  misc_feature 521, 522: n = A,T,C or G
tgtacaagaatcaagaacagctgggaatgaacagcggcaatatcactagaaaggaggggacacatagggaggcaatgaataagttcatttaaaattaaaaaaaaaaatttgttgtgttttaaaaggaaagcgaagtggagagagaaacacaccactaacaacaacaacaacaacaacaaaagcacagaataggattaggagatttgcctgagacaatgagtgtagtttaatttcatcaagctccagtgtcctgaaatgaaaaaacgtctaaggtgtttatgctcacaatggaaacaggctaagcaagtcagccgaagctgcccgcactgctgtctgctacaagaagacaggtaagtgggagggaaaagcgcttcctgctgactccacattctattcctactgttgccaaggttgcctcctgttcagatcccaccacagccacagcactgcaaatggagaagctatgccaccacctgctgctggcccactgtctactggaataattaaaggatgggagacann

SEQ ID NO: 12406 - DNA, 1303 bp, Homo sapiens
  misc_feature 1, 1303: n = A,T,C or G
naccagaggtcactctcatggacatcttgcttttggtctgatttgtccggcttctttacaacctgttttatcagcaaggtctttatgacctttatcttgtgccgacctcccatctcatgctgtgacttagaatgcgttaattgtctgggaatgcagcccagtaggcctcagcttcattttacccagctcctgttcaagatggagttgttctggttcacacgcctctgacaatacaattcccaattgataagtgataccttggaatcagtgtgaattatttttacactactgcacacctgggaatggtgaatgtgtgaggcctgtcctctctcaggctcataggaacaagacagaaatgatcttgcttctttagggattgacagaacaaagacaaaggaccctagactttgggaatagaaatctgttgaaatgagctggaattggtaaacatcaattgattttgtttatgaattgataaaagcctactttcaattcatcaaatattgttgagcatgcaacagtatgctcccgtacctaaggtgcagtctctgccttagagttgtaatccaggaaggggctgcaagagagactcagaagatgtggtctgacaatatataagcacaatgtctgacccttaaagaatgacaggatttcaacaggcagacaggagaggaggaggaattctaagcaaaggctttcacatgtaaacggtgaattcttagataagatctgttttctatataccaggaatagtttgctggcatttgaggacgaggagtaagttcaaatgaaaactttaaaatgtttccccaaagtgttcatatgaaattttaaggatgtgcctatggactgggaataatcaaataacataaaataaacataaataacataaaccataaaataataccattttttttctacttttaaaattgggcccagaatatagcttgcggtgttttcttaattgataaaacttcagttcatcaccttcaattaatatgttaatgcatgaccatttgctttgtatatatctaggctatatttataattgtggtctgtcttctttggccaagtatgtatgtattccgttatctcttagctcctttgtattcaggctatgcacatttattataatattgctctattccatctttaattaggcaagcaaatattctaataaaaagtttcaaagtgaattttgcattatccagtactagatacatattctgtaactttggggcaagatatttgccaggcttataaaactagatataactatccataaataaaattgcctcataan

SEQ ID NO: 12407 - DNA, 1024 bp, Homo sapiens
  misc_feature 1, 2, 1022, 1023, 1024: n = A,T,C or G
nncgtgctctgtcctacttctgacttgacttgtggtgtgaccatgttcattataatctcaaaggagaaaaacaaccttgtaaaagcaagcaaaaatgaccaacagcaaaaacaaggtcttattccgagcattccagtaactttatggtgtatgtacttagctgtactataagtagttggttggtatgagatggtgtaaaaagggccaaagataaaaggttatcatttgtagtgactcctgtttgtgtctagtgaaagtagtgtgtttatttcttttctggactgtgttgatgtatgtggtgaaataatgtaagtccaataatagaacaggaatttctatttaacaaacaagaggactgtgttgtggtctggggagaatgtaatcattccttccacaactgctgcatgtccctgtgggtgaaacagaacaatcgctgccctctctgccagcaggactgggtggtccaaagaatcggcaaatgagagtggttagaaggcttcttagcgcagttgttcagagccctggtggatcttgtaatccagtgccctacaaaggctagaacactacaggggatgaattcttcaaataggagccgatggatctgtggtcctttgggactcatcaaagccttggtttagcattttgtcagttttatcttcagaaattctctgcgattaagaagataatttattaaaggtggtccttcctacctctgtggtgtgtgtcgcgcacacagcttagaagtgctataaaaaaggaaagagctccaaattgaatcacctttataatttacccatttctatacaacaggcagtggaagcagtttcagagaactttttgcatgcttatggttgatcagttaaaaaagaatgttacagtaacaaataaagtgcagtttaaaaccaaaaaaaaaaaaaaaggggagggcggggagaaaaaaaaaccaggggcccaaacgcacacgggtctttaaaggggccccagggcgataacagcgggcgatacacggggggaagacgggnnn

SEQ ID NO: 12408 - DNA, 309 bp, Homo sapiens
  misc_feature 307, 308, 309: n = A,T,C or G
acagatggtgcagctttatagctgtctccaaataccaaatgccaaactgctcctttgataaggcaaggcggtgtaaaggtttaaatatagcctcttggtggaatgtcagtgaatgatggatcccagttacaaacacaccaaaatattctctgtttaaacattttttacaaccatggttgtgaagattctatatcaaggaaattatgcatgggggaaagaacaggaaacttaccctgaaaaatctatgtgtatactaacaaatcatgttaaatttggtaggaagggagtgtggaaaagtacctgcccnnn

SEQ ID NO: 12409 - DNA, 328 bp, Homo sapiens
  misc_feature 306, 307, 308, 309, 310, 311, 312, 313, 314, 315, 316, 317,318, 319, 320, 321, 322, 323, 324, 325, 326, 327, 328: n = A,T,C or G
acgcgggtaagagaatcaagccagttaactgtttggtgagatcaggtctgtgggatctgaggcttatactggtatttgggtcctaacatttattttctaatgtaagttttatttatttctttctttaatagggagagtttaatgaggtattgggattgtttaaaggcctagtgaatgcctggtgagagtgatccttgctaagaatcataaatgagtaatgccttcactgcacttcaagaaatgatgagctgtcaaaacagagtgaggaatttagtttgcatcttaatgagcagatactctcttccnnnnnnnnnnnnnnnnnnnnnnn

SEQ ID NO: 12410 - DNA, 433 bp, Homo sapiens
acgcgggagttttaatttttccaaagtatcatatgaatggaatcatgtgatatgtagcccatgaatcatgtatatgggtttttcacttagtagagcacatttaagattcatcattgttactatgtgaatcaatagctggttccttttatctctccgcagctcctactgcactgagaagcacgtgttctccatttccctgggggagaccattgtattgggcagtttggaacaaaacaccatggactgggaggcttacacaacagaaatttatttcttgctggtctagaggctgggaacctcaaggtgctggctgcatattcattctgaggcctcttctgatgtgcaggcagctgccttctgactttgtgctcacattggagagagggagtcagctttggtgtctcttcttgtaaggacactaaccccattcact

SEQ ID NO: 12411 - DNA, 778 bp, Homo sapiens
acctgccttgttcatatccaactaattttttttggctaattaagtaataataatcaaaacacttaaggttttaaaggatgaatgaccagttgagagttacttcttatttgctcctaaatccaatatatttcctgatcagtcaataacacttagaacatctagttataattggtaatacaattgtttaaaaaatgataattaaaaggactaagactatatatggtcttttgaggggataacaattgaattatttaaacaaagtatattaggataataaaacacgagaagtcagtccagtggttcaatccattattcagaatttcattctgtttataattaagcaacagtgaccttcaggttagtcttccttagctgttaacaaccagctggagaagctgagggctatttttgcaattataatctgtgaagattgaaaaacgttaagataaataacgtgtccaccttattaacaggcaactcatttccacacttgaatacatatcaataggggttccaagttcaatctccctcaccgacctcttctaactctttaaagacagcgcctgtagggaggtggcgcctcactgcactctctactgggcattgcaatctactttcaagaggctgggggagggtgatggttgttgaaataatagcacaatactaaaagctttcaaatccttttggaaagagaacatgttcagagaaagacaaaatgcatttctggcaataaaaaagagaacgcttctctatatttatagctgtggcagtcagttat

SEQ ID NO: 12412 - DNA, 734 bp, Homo sapiens
  misc_feature 1, 2, 723, 724, 725, 726, 727, 728, 729, 730, 731, 732, 733,734: n = A,T,C or G
nnaccctgctgtcttatgcatgtttaacacaacagcaacaataatataagtagttagcatatattaaagcattaacgaacaccaagcattgttaaatatattacatgtatttttgcttaattttcacaacattactaatggttaaatattattaccacattttgtagggcaaaaaactgaggcttagaaacattgaaaaaaacttgctcaacgttgcaaaacaagaaatttgtgacactggaattgacatctacaagggactgatgtaactaattgctggatacatgtccctcaaagacacagaaacagatcttgtattctagtggatctccggcacgcagtgagggcctgaaacagagtacatgtccaacaaataattattgaagtaaagattgacatttcaggagcagagattaatattcaaaaacaaagatgagaattttggcagaaaagtcaaaatgaggtaaaagtacatttccaccttaactttttttaatttgcttagctgacataaggaagagtttataatttgtttgttttttttaattttattattattatacttttaagttttagggtacatgtgcacaatgtgcaggtttgttacacatgtatacatgtgccatgctggtgtgctgcacccattaactcctcatttagcattaggtatatctcctaatgctatccctcccccgcgttaattaattctagaagtatttcgannnnnnnnnnnn

SEQ ID NO: 12413 - DNA, 650 bp, Homo sapiens
  misc_feature 1, 2, 3, 610, 619, 624, 644, 648, 649, 650: n = A,T,C or G
nnnactccagcctggctgacagaacaagaccctgtctcaaaaacaaaaacaaaacaaagtttcttgtttgttaatcatcagcttgttgatagaaaactcacagaattggagaaatatttactattcctttctttctgctaataccactaatcattttctatgaaagacctgttctttttttgaacttatgaataatgttagaaatggaacatgatgttttaaatgtatacataaaccttccaaattaattatcaggtgatccagtagtagacctgtgacctctgaaggctcctgcttctcatcccttcccttctgctgtgatttgttgtcttccctctgctcattccccttgtgtctgtttcttccatcctctccccatgctccctctgttgtcatttccccttactctccactctacccagcctctgttcataatttttactgcaattccgatgattgaattataaactgggaagggagcaggggatattgatcttcatgtaggtggacatgtactaggactcacggggggaacaagggactggggttgtagggcacaatgctgtgtggggttttgggggaaaatctaacctcacactcaaccttggantttggtttnccccngggggccttagggggccccnaaannn

SEQ ID NO: 12414 - DNA, 396 bp, Homo sapiens
  misc_feature 396: n = A,T,C or G
actttttttttttgtttttttttttttaaaccttggagaatatgtatttcatctcccaggatgagagccaacctatgttagtgagtaaatagagttaatactatcctgttttttatttttatacctcttaaaaaaggaaacaaaaaaaaaaccttaaatcaaacctaaattattttgtgtcttttatgttttttttccattcattctttaaatgccagctccagtgacactttctctgtgaaactctccctgcccagtcactctgagcaagagttaagtataccatagaaagatatttaaatttcaatcaactcctcttaagactccttcttataatctattgtaaccattccttcttctctgcctttcctactaaaggcaatgctcttgggggcn

SEQ ID NO: 12415 - DNA, 2945 bp, Homo sapiens
ttcatagcgctggaagccaccaccacccccgcggccccggaagccaccaccacctcggttgtcaaagcgcttttcagggggtggcccagccttgcggccttcctcgttgtactgcctcactagcttgtccgcttcctcccgctgcagctcaatgaacagaacctcatccaggaagtccccaacatctggcaacgtgaagttggctaggaggaaggaagtgccccaaagagaacaagaagaagaggtcagtaccttctgaagtctggtcccctccacccagaagagtggccttccagaagggagaaggtgaagaaaactggaatagtgaataagaaagacaaagacagaagggcgggcgcggtggctcacgcctgtaatcccagcactttgggaggccgaggcgggtggatcacctgagctcaggagttcgagaccagcctgggcaacatggtgaaaccccgtcttcttactaaaaatacaaaaaagaaattagctggggccaggtgtggtggtgtgtgcctgtaatcccagctactcaggaggctgagatgggagaattgcttgaagcccgggagacagaggttgcagtaagctgagatcacaccactgcactccagctgggcaaccagagcaagactccatctcaaaaaataaaaagaaaaagattcagttcctaggtgttgggggaggagggataaatcaaactccatcctgtgctacagcccttttgactccctgacattgatttgaggaaagagaaggggcatcaacgttggaagggcctcctcactttcttccgccgcttaggtttggcttctcccttgggtactgtgctgttgggcttagaggctgcagcggctccaggggcaggctgaggagctgcaaagaagttcccattgggcatctgccctgggggtacttgaaagatccgactcaagaaatcctgaagatcagcaggaggggcatctggggtggctctctgccgccctctggtgcctggaatccgagaaccaaatgagatgtgataggggactctgtgggtatctggggagatacctacacgctggcatccagcccactctgtgatgtcatacacctttccatccatcagtgcaaagtaggtgatcttgaggcccaacatgcttgactctgcccaaaagtctccttcctcagcaggatgcagcctattacactcagcacagtatctggcactcttaggttcccggtccatttcaaacctcctatgctttccttggcatcggctacacatcatagtattcattgcctccttgaggtcatcttgcagcttggacagaaactcatttactgaccggctcagctcattctctgccattcgtttcatctcatactcctttcgcttttcagcattgctgacaatgtcccaagctgctcgcaaaaccttgaaggcctcctcagcccggggatgatgatttttgtcaggatgaaccatcactgccagctgtctataggccttcttcagttcaacatctgatgctgtggcctcaacccccagtacatggaaagggtttagctcatcctcaggaaccccagccatggtcaagagtcgagccacttcctcttcaggctggcagtagcgcccactagctacaggtgcattcccctgcctattaatattctgcttgacccaaggcaactccagccagccccactgaactattcttaccagccgctgccatggcctgctatctctcagcagagtcaagcaacgctgcaaggctggagaatccagccaagagaagagccaggtagccttatccctccagcctaaccggtcacctagtcccaccagaaaccgccatcccaactgtagaaagcccaaaaagagggccagagccaggagcagcaaagcacccagcagcttaagaaaacgagtaaacagtcctactccacagtaaaacccctggcttagaaactgaaacatgacctgggcccagccccctaaccgccctgtccacactcccatccaaactcgaaaaaggtccaaatcactgcttttcagttgcctgcaggcatagatgagatggccacaagtttctacgtactctcccaccaataccagcagttcaatcagccaccaaaagcctgcctgtccaagttgacatagttcctcggctccccacaatcccaggcctttgcgcttatctgcctgacttcgtttccgacccagccgatgtcgaccaggggacctgggatccctacgtccaccctcccgagtatcctccttcgttggaaagcggtgccgctgtctccgggatgggggtttctttccgctggacacacgtgaaaaatcactggggaacttgagagattcttcatcatcatattcctcttccaactcatcttcccccaaagctggagaggtacagtggtggcaaaagttgctagaagaaccatttcctccctcagagtaaggcccttctggaattccaggtgttccctggcagttgcaagcagatggaatggaaagaaaagagttcccatccttctggttcccagtctcgttttcttttgagagttcctggtccactcctgattcttcttctgaagacgtctcactctgatcagggtcctctgcatctgctaggtggtcctggaccccctggggggccatggcttgggtccaaccaatgggctgggtttgggtgctgtgtgtgcttaggaccagagtgctctgtgaggcagcgggtaccattaggagcagtccctgctgagtccctgagtcctgagaatgaaggtatttcagggtccacggagggtcctaaagtcctgagggaggcaccaccactgtggtgggctccatacaaccctctttctccggggtgcttctgggccatgaccccggggcttcctgagggtcttaggtcacagccatcatggtgtgttctgatgccgaagaacggcgg

SEQ ID NO: 12416 - DNA, 533 bp, Homo sapiens
  misc_feature 379, 529, 530, 531, 532, 533: n = A,T,C or G
accaaactgctgtccccaaataaagaacttacatcaacaaggaatataaaaatgttatttaggacttctgttctcagatgtttaatacaaaggagagattgttgtgccagggaacaaagtgatccaatatccacgaagccagaattctcctactgcacattttgtttccaaaacactaaggaatacagcaagatttcaagttggagtaaagaagctacttctggaaacaagagaggagataactgaggactttcacagaggggctgaaatccttcccggaaaactgtgctcatcagggaacctcagcctagggggcagcgagggtggacggtgagctgacctatccccagacatgtggaataggtattgggtgtgcggngggtgcagtgcagaatgaaggctgggagttgttaaagctacagaatattctagtagcataccacgggaactcaagaacctcaaacgtttttcaaaaattaaccctttgggctcagagtttcaggcagtccaatgtaattttacttccacnnnnn

SEQ ID NO: 12417 - DNA, 272 bp, Homo sapiens
  misc_feature 1, 2, 3: n = A,T,C or G
nnnaacaatctttttctgttatacattctccagctatactgcccaggaatcactctacctcccccatccctgttgctgctgcacctcaacctgctacttgaaaccacaggcccagcaaagaaactgtgctccaagtgcccaaaccaattcagttccctgttccgcaggaatcagagcttcagcatagggaagcagccatgaccccagcatcgaagcccatgctgtgccttgcccttaggagaccaggtgctctcatctagtggaaaagctgt

SEQ ID NO: 12418 - DNA, 394 bp, Homo sapiens
  misc_feature 394: n = A,T,C or G
accacctatgaagtattctgcctaaagatattaaacctgaagcttatcaaatctgtaaatctgactacgacttgactgaaaatttagtggcaaaggaatatagtaaatgacatcacaaggatatagcatccaaacccagaaagcggatattctttaggataaatgacccagtttcctcaacaatgaaatggcctggaatagaaaaaagagggagaacttaaaataacataccaaccaaatatagcacatggatcctgttttaatatggattcagaaatccaattctgaaatgacattttttaaaaatcaggaggccgggcgtgatggctcatgcctgtaatcccagcactttgggaggctgaggtgggcggatcacaaggtcaggagatcaagn

SEQ ID NO: 12419 - DNA, 291 bp, Homo sapiens
  misc_feature 1: n = A,T,C or G
naccaaatgaaaagtttggaggcatgtcacaagtttggaaataatctaatgttgtattgacttttcagggttctattagtgaaaacacaatcaaactaaattttgatatattaagacagatgtataaagcctataatttttgaaatcagtatccacctgacatttatctctcattccatcagctgaacatttggatattgatttctaattttgtatttatcaatataatgaatattgactgccataatgatgtctcaatgacatttcgcagccctagagtaacttacaaat

SEQ ID NO: 12420 - DNA, 290 bp, Homo sapiens
acttttttttttttttttttttttggagagatggagtctctatgttgcccaggctggtcttgaaccctgggctcaagcaatcctcctgcctcggcctccgaaagtgctaggattacaggcgtgaggcaccaggaccggccaataagatgtatctttacatgcattccaacactctcagtctttcctcacacacccgctgctaagagaagaattcagcgctaccaagagaaattttctccagggctcctgccttctgtggtgaagtttcatcttgactgaaaaatagattc

SEQ ID NO: 12421 - DNA, 936 bp, Homo sapiens
  misc_feature 1, 2, 3, 4, 5, 6, 7, 8, 9, 10, 11, 12, 13, 14, 936: n = A,T,C or G
nnnnnnnnnnnnnnctggtttgttgaatatgggagcgagcgtaggtaatgtcgactgtgggggtctacggcgatttattgagtgacgatattgctcgtaattgaagacgtgaatcccaagttcagctatcagaggtttacttgttactatacccctgaggaaccttagtagagatactccaagtggccaaggaggtcatcttaagacttcagctcttttgtagagagccttcccaaatgggtccagactcggctcgaaccaaggtagaaccacaaattaggtcctccactaacaaggaactctagataaatattctgccttccgaactgaatttacgtgaaaaaccacatacacttggataaagaagtaaggactagaggtaaggaaaatggagctagacaaaactggatgaccaatggagcatagagaaaggagtgcccacatagagttcatatttgcttgggtctctgttgagcattgggcagatgaacataggaaatcaatgggagctgccagagtctgggaaaggcactgggtacgagaaagatttaactgctttgaagtggatataaaccagagacctactgaagtcatttatctgactcagtgtgactgctcagcatttgtagaaattgagtatagtgagagtatagtgaggcctggagatttatgaagtcatgaggaagagccttccaggctctgatccgaatgaaattcaattacaaatggatttgagatgaatcttaatacaaaaaaacagtgtgacagtgtcctgaggaatgggtctacagagcctttggatagctgaattgtagagaaccttgggaggctcaatagtatcttcagagtgctccttcatgagaatcacaacttacactaaagaagagctatatgtttgctaaactatcattaaataattgagaaaatcaaactcan

SEQ ID NO: 12422 - DNA, 291 bp, Homo sapiens
acagtaagaatttgcactgagtgagatgcaggtggtgtttctgaaatggaaaagtagccaaatcagaaatttattagtaggaaacacaaaaggaatccaagggatgttcatctgtaaacctgagagaaggtattttaaaactgtcgctgttcacattggcaggtgactactcactctaatagctccttcctgcctctggtgatactaatggacagggcaaagttccccagcataccccattacagcctgcagccacagggagttagcgagggctacacccctttgcctgga

SEQ ID NO: 12423 - DNA, 281 bp, Homo sapiens
acagagacgttaagcagcttgcccaaagtaaggcatctctgctaattgacagagctgaaattgaactcaggaaccttctagattctatgtatttggcttttcacaacatcattcttgttttcaatccttgtcactatctctgctgtgcctgagattcccaaaacgagttgtggttaacccagagaataacccttcagtgcctgatgttggtggagagaagaattgcctagttacatctcatatggctcagcaggggagaggagtgccctcatggttgctaa

SEQ ID NO: 12424 - DNA, 1176 bp, Homo sapiens
  misc_feature 1, 2, 3: n = A,T,C or G
nnngtgtacatgaggcgccttcactgtccctgcatcaggaatctagctgttggcaccttataatgagaaaacagtctcaaccatgaagttaactctgctggaagattccaaagggtcgtccctcccgttactcagaggggaaaaaaaaattacctacttggtctggaatccggggatattttatgcacacgtctctaacagaagttaataaagggaagtcagcttgcctctgattattcaaacaggctactgctattaaggattgcacaacttctgggcaaggcagaggtgggtttggctttttaaaaattttttcagcctgtcctcatggaactacatattcttttctaagaacttttcatcctaacctccctactcacatcttctaagtgtctctgctctggtgggaatgtgatggacaacacagagccatctcagaagcctctgtggccaccaccaggccggccagggtgcagggggccactccctgggcagccatagggttctcagcaaggtgcattcgtcgtccctgctgagaatctgatggggcagcatttttttttttaattaaatgcaagctgagtcatttcaacctgcaaccttcaggtaacaggagttacccaagctccaggaattatgattgtggggtaaacccattctcttgttttcttgcggttctattttataacgcactagaggagacagagacgtcattgcttcacccagggcaagaggacaaaggaggatgcatggaaatacaaacagcccttctcctccaggccataccgactgtccaactagcaacagacttcacctggttttggagcaatctgaatttggaatatgccagagaaaacttctatcaggcaagatggaagactcctaggataggtctctctcatggagggattggtaataaaaaaatcatgggaaaagaaataagggagggtggaaaaaacacaccttagaaaacaacttctgatgtcccggggctacacaatgggggagctgagcacttaggaaggagagggaaaatattctgtttccggagacagctccaagaatcatgagtaggtgtgagaaacaaggaagcttacagatttaaaaaaaaaaaaaaaaagtcgacgcggccgcgaatttagtagtagtaggcggccgctctagaggatccaagct

SEQ ID NO: 12425 - DNA, 190 bp, Homo sapiens
acaccaaatttacttagacatccaggccagacgtgaagaatttctctgtcagatctagtaagctccatcaatttaacattttggcttctctggggcaaagagaagactgccaaacagcactggtgctgggggggcaccactggtgacatgtggcagttcttgaaagaaaattaatgaacatgaccagtaa

SEQ ID NO: 12426 - DNA, 373 bp, Homo sapiens
acgcgggtcttttaactgttatggatgtataagcactatctatgatggacgaggcatagtgcatctcctaggccggaaatgtttcactcactaatgagctggacaattctactctgtgaatttaactttcctgactcccttatgcaggttaattttggtaacatatcatattttactctggcttggtgggattaggtgggaaattacagattgcatcaacaatttggtctgcctggatacaatttggtctgtttcagtcacagcctgggtcacacctgttgatatatatttttaaactgattcctctctagatcattctttctgatcagcacaaggcaatatgctgaaatttctcttttatatctgttttatt

SEQ ID NO: 12427 - DNA, 3945 bp, Homo sapiens
  misc_feature 3943, 3944, 3945: n = A,T,C or G
ggtgtgaaagcagcatgcccctgcccacagagcagccccccagaacagaaagaggctgagccagagaagaggccaaagaaagtctcacagattcgcatccggaaaaccattcctaggccagatcctaatcttacccccatgggccttcctcgacccaaaaggttaaagaagaaggagtttagtttagaagagatatataccaacaagaattataaatctcctcctgcaaacaggtgtttagagaccatctttgaggaacccaaggaacgaaatggtacactaatctcaatcagccaacagaagaggaagcgagttctagaatttcaggattttacagtcccgcgaaagaggagagctcgaggcaaagtcaaggtggcaggcagctttaccagggcccagaaggcagctgtgcagagtcgagagctggatgctcttttgatacagaaactaatggaactggagaccttctttgccaaggaagaggagcaggaacaatcatcaggctgttgagaagcgattcagtttgagggtctcaattttagggtttttttgttttgttttgtttttgggtttttttttttttttcggacctccttggaaaaggttgcctaattttgccctaccgccaaaccactcaaaaatgcacagtccatgaatttttacctatttcaaggtgcaacctttttagaaactggtgaaggagggtcctctacttttactgctgagtatagaacctcaggaatgctccctttctcctggaaatggacctgaacgacatccagccacctcctcagtctctgccatccacaggaggaagcagcagcctatcttcagtaacactaggattccaaggacacacaggatttgcacgtccatatgaaagttccgctttgtttacggtggtgctagaccaagattattagaaacgtggcctagggagggggacctggcgtcctgtcctgtgtggtctcactggctcatttcagtagttgaggaaagatgagctgttgtgttttcttatcttttgtctgcccaggacctattgatgtgagtgtatgtgagagtgtttgtgtgtgtgtggctttttcccatcgttttctcccctctgtgactgggtcactagtgccagaggagcccgtccaggccccattcgaagtaagttgcactttttaatgttgtggtgtggattattttcatttgttttattttcttttttgttgttgtttttgtactattattgctgcatgtgtggagcctttaaatgtgattttaaaacatttttttaaggagaaaaacaatacatgtcttaagaatacatgataggcatttgacccagttgatcgctgcatggaagagacatttttcctattcatgtgtttcaggcaatcccttccccatctccagcttctagtgtaactcattagagggagcactttttttcatctgggttctcattcttgcccaccaaatacatgtatttattttagtgatttaagtaagagcaggtttctctcccgatcattgaaaaactactatggttgggtgtggtcttaatggtttttatctgaaatggtgttaggtaacaaaattgagtacaacggcttgggcagtgatacaggctgacccacagtatttgtggctttccaggcagcccgcttcaagtgtggggagagagtcggggtcatgtttcagacccagagatgtgttcctgcagtgggatctcaaaaatccccagccagccttctttgagggccacctcattgtactctgggctcctatgtcacatctaccggaactgtcaaatgctggagttagccgagtttctgggtttgtgcctgcaggagtctgtgggcagagggatgctgtgggtcagcagcctcgaggtcttgctccttttccactgaagtcctgtgtgtccatatcctgctccccttcccctccttctctaggggtttctctttctctctcaaaacaagagtttagagaattaacattccatggctagtgagtgggatgcaaaagtcatcgtcaggacaccagcatcacctcttcatatcctcctgggagccactggcatggagcagccgccgatgggaaccgtcagagttctagggacatttccaagtcagtctattagagaagagtgagtggcacgtcctggaatgttggccaactctcctaggtttcttttgcttccccatttgctagtggatggggagatgggttgggggtggggggtctctatgtgccttgcttttgcaggttgacagtctatgccacactggagcagaaaaactgacatgagccagagggaaaagtgtgccacggctatgttctaggcccactgcctcagacatagcattgagacgagtgaaatacacacttggtcatccacggaggcttccaaggccatggccaaatacagttagaagagagccaggcttccgtaccagctctgaatgatgctaaccagattctgtcattctacatccactttgcccagactgtatagacacgacctatgtttcacctcaatacctctcccttcctgggacagggttcttagacactaaatgcttctctctgacttttttgcttaagggagtgggatgagtagtacattttgcccttgtccaggcatgtttaaggagctcctactggacaggttgcagactagcagtgagtcaacagagccctgtttgccagctctgttgccagtatagatgcagtgatgtggcggctatgtttcccagagacaacagtgggcacagctatagtgtcaccaacatggcagagatagtttcaactgtgcctgttacaggtgtggcactcgaaggaccagaagcagcggtttggaacatgggtaactgggagcagaggactggaagaaacagagctgggctccttccctgtcctgacaatgtaggagaggagttgttgtgaggccagccctgcccgtcgttgaaattctggacctaccctctagctaggtcccttcccctgctccaaagttgagaagggggccccactgcaaacttgaaattacttacctgaaggtgatgtatatacctaggctccagctgcgctcagccacacctgtcttaacattcagtttcggcactgagccagctgcagtgttgtcaggggtccccaggcccgtggtccctaaccacgatgggacatggtaatcggctgctggcacaccacctgcccagagctacaggaggtctggttctggggtggagttggtacagtttctgagtatgggaacttccctccccaagtggtgggaagttacagttaactacagcttactcaactatcacttccagaggtttagtgtttttaatatgggaaagaggagaaatctcaggtctaatcagggttctgcccatcagcttttcactgaaactttcaactgtgttttgttttttgtttttttttccatctttcagtttctagctgtgtttgccttctccctccgcgttccctcctctttttttgcttttggtctcctttccagcttcatgtctccatgagttcagctgtacctcatctcctgttaaagcagatcatgtccactttttcttactgaccttactctaagctacagtagctgagggaggtacggtgaagacatgtagcgtttgccttattcggagcctgaggagcccagaaacccatgctgtgaatcccaaaactcagcgctcctcaagagctgtgaacaattcatgatacttgtgtcacaattttgcctgaagggtcttggacgggtccagagccaacctgaggtccatccagatcccatatctgggcgtggagacctccccggggccttcctggccatgagccagagagagggagcgcacgacgggacaccaaccacgggcgggcccaagaatgggcgggcgccagggagaccggaaaaggggaaaaacggaannn

SEQ ID NO: 12428 - DNA, 196 bp, Homo sapiens
  misc_feature 195, 196: n = A,T,C or G
acaaaaggacaggcactgactagcaggaccctggcagaaactatgtccctcccccaaccacccacccgtcaggagtgcagagctcagtgtggcctggggagaagagtcacatcatcaatggcaacagacctttcccacgacttctctggaaatactccagattcctgccactctggaatattttttgagtctcann

SEQ ID NO: 12429 - DNA, 467 bp, Homo sapiens
  misc_feature 466, 467: n = A,T,C or G
acattcatgttaatccagggagcaaggtaaagctgtcactttcattattcacatgaccacgaaaataaattgtattttttttttttacaaattctattcttccaatgtgatattaattataactataggcatttacctttatggtgaatctatttgttccactaaatgatccataggcctcctactatgatggagacaaaaagatcttgaatacaaaattcaatctaattattggctatgaaactaaatgtttatattatctcatttacacataagtttgtcagttctacattacctattccacagaggccttaccaagtcatggaagatagcagatgtaaacttctattttatttatttattaaacttgtattttaaattcagaaagggcatgtgtgcatttgttacctggtatattgcataatgatgaaagttgggggatgcatgaccccatcacccaagttann

SEQ ID NO: 12430 - DNA, 340 bp, Homo sapiens
  misc_feature 337, 338, 339, 340: n = A,T,C or G
acgcgggtatcacctctccttgttgtcagtagtttcctttctgcagacaggagttccatgtgctgggaagagggccattcagagcctcgtattctcatcctctcagtttagcaatgcgagaagaaaaaacttttgtctcacaacctcatatacaatctcagaaataggctcttattttctggcttgaggctgtccagaggcaccaggcactgtgatggtctcactttctgtcctggatctatctggggggcccagacagcaggatctatttcagaaaataggcgagagaggaaaaacttatgtggccgtaaaaaacaacggttttcaagtggcctannnn

SEQ ID NO: 12431 - DNA, 1036 bp, Homo sapiens
  misc_feature 1, 2: n = A,T,C or G
nnatgtctgaaggctgtgcatgaaatgacataatgtggtaataagtaaatattcagtgaatgaatgtaggcctcatatatctttttcccagtagagagattgaggttggtaatgtagataacagatctggtgacactgtcttctactttagagacctgatattggctagaggtggggtaggtaaaggggagggaataggcttttattaggttggtgagaatgtggagaaactggaacccttgtgcactgctggtgggaatgtataatggtgcagcttctgtgggaaaaagtatggtggtgcttcaaaaatataatcataataaacagaagtaccacatgagccagcagcttctcctgatgcacagtgcaagaaatgaacataagtggtaataataaatattcagtgaatgaatgtaggcctcacatatctttttcccatagagagattgaggttggtaagtaataacagatctggtgacactgtcttctactttagagacctgatattggctagaggtggggtaggtaaaggggagggaataggcttttattaggttggtgggtaaaatttgctgtttctgaaagagttggacaatatcaagagctttacagtgttcattagtcaattctcattagcccaaagattccatttatagacatgtataatcaaatacccaagcaaagatttacattcaaatctgttgactgaagttctatttataatacaatgcaatgaacataatagtatatatttacacgtaatgtaataaacacaaatattcaatggtataaaaatggtcaataaatcgtggcatagccacagcttagagtacctgtttaatgttctcagctattttaactttgctaaataatatttaaagatatgcggtagtcccccttcatctgaggaggacctgttccaagacccccagtggatgcctgaaacctctgatagtaatgaaccctatatatactgttttttcctatacatatttacatatataatacatacctatgattaagtttaatttataaa

SEQ ID NO: 12432 - DNA, 353 bp, Homo sapiens
  misc_feature 353: n = A,T,C or G
acatgcaatatacaattatttgagataattaaatatatgagataacgtagaaagggaaacagaaaagttgtcttagcctcctaaatcagcctaatgcttaactggaacctcaggtggaataggctgtttagctctaatagttaacaggatctcttgtgaccctccatcagtcctggttggtgcttcttcacaacttgctgtctcagaattgtctgttgggccctattctggtccttgccatgctatgaaccagctggcctacatcctaacttctcttctttctgagacaacttttctagaagccccttcaatggggcttctcctttccttggggcttctcctttccttaagtn

SEQ ID NO: 12433 - DNA, 573 bp, Homo sapiens
  misc_feature 1, 2, 3, 4, 5, 6, 7, 8, 9, 554, 555, 556, 557, 558, 559,560, 561, 562, 563, 564, 565, 566, 567, 568, 569, 570, 571,572, 573: n = A,T,C or G
nnnnnnnnncgcgcgcgggtacgtctgcaccgtgtgggtgtcttcactgggggagtctggatgcatatgcacttacttcccccacccctattaaatatggagcagcttttcaggactctgtgactgccttctcctcagggtcacattgagtttgaatctgacccaaggtgcaggaatcctgcaatggggaaataaaagaatatacagaacggggtcaggtcagctgctcaaaggccaaaacccctacagctgctttgattttattctttggtgtatattttaggctccttctgccattggacaaattgggcctccccctttcaggtgtttggtctgtggtttaaaggccccaaagcctatgcctgcataaacataggctcccagcaacaccagaaaacccccaattccgaatccaaaacaaaacccgggaggagggggaaaaaaaaaccctattgagttcaggcaaataaggttgggtctttagatccggttacaaagcagctttgaatatgcaagacagtgcccaagaccagttattccagtttcccccaccnnnnnnnnnnnnnnnnnnnn

SEQ ID NO: 12434 - DNA, 369 bp, Homo sapiens
  misc_feature 365, 366, 367, 368, 369: n = A,T,C or G
actttcatcatgaccccagaaaaccaccaattaatgccactattttaggactcatttttcactcttgctattcatttatcttgcaatctcttagtctgtaaccctcttccgctataaaacttttcataaatatttacagtggaagcttcctgtgctttggcttatcaagataaactcatctatctcatttctatttgaaataagtgtgttgaaatatcctgtttcctgtagaattctcctatcctcttctttgttgtaagtttaaaagctttttatttctttattgtcattttaatggtgtctcagaaagaaaagatatgcacctcatgagctcaatctgtagtcttgaagcagaaagtaaaaannnnn

SEQ ID NO: 12435 - DNA, 396 bp, Homo sapiens
  misc_feature 396: n = A,T,C or G
actggtctgcctgaaggctgagggcagtagaattattgacattactataatactgacctcaatcgagctaacctttaaattctgagaaacaggttttcaaacaggtttataggccaaagagagtctggaacaccctaagggcttggttttcctggccaagtaatcagtcaaagctattactgtcactctgccttttccttgtggctagataacacagcccaagtgcagttgccaatttctaatgaatactaggtgtggcctccattttatcctgtgcaaggggatattggaaatctttgttcgaagcaatatccacgagagaggtggcttcatgcctcagaagttaaggtggattttaaagcaatttaggctgctttttaaccaaaattacagtan

SEQ ID NO: 12436 - DNA, 1762 bp, Homo sapiens
  misc_feature 1, 2, 3, 4, 5, 1146, 1451, 1452, 1459, 1461, 1466, 1468,1470, 1542, 1608, 1617, 1649, 1679, 1695, 1714, 1761, 1762: n = A,T,C or G
nnnnnagcgaggaggctttctaagtacccatcctgtagcttcaacagttaccacattggccaaccgaaaagactgccaaggcaggaaaaagccctggaaagcccacggcccctttttcccttgggtcaaaggccttatagctggctgccaaagcagccaaccaaaggggcagctcagctcctgcgcggcaccagcattagttcctgatgcagttgaagagttgatgtctttgacaacatacggacactggctagattacctacatgacacattttaattgccaattgatgaaattaggtaaatgaaaagaaagcacttaaagttccccttagagcattttaacatgacatgcaatcaggtcttgtctgctaataattatttctccccctccatccctcccaccagtttctttcctgaagtctgtgaggccgctataaacaggtagatgaagttagagcagttatggccctaaatggtccacagttgggtattggcactaccgcagtttcaggtgatgtcggcatttttagaaataggaggagatggaaaaattacgcttcagctgttaaaaatatttttggggcattgagttactttaaaacacgtatattctctaagctgtttttatctgaacttgtagagtctattcattttcttgttcagaacattttgtaatatgtgaaaccttttataattaaaactctgaactgcagattaagtctgacttgcagttttgtaagattctaatggattaacagcattttgttttgcaggattcctgccagctcccaggggctttggttatagaagtgaagtggactaaatacggatccctgctgaatccacaggccaaaatagtcaatgtaactgcaaatctaatttcatcctcctttcctgaggccaactcaggaaatgaaaggacgattcttatttccactgcggttacttttgtggatgtgtctgcacctgcagaggcaggcttcagagctccaccagccatcaatgccaggctgccctttaacttcttcttcccgtttgtttgacaatgctcagatgcatcagttccttaatatacacgtgaaatttgaaaactgtacattcggtgagattaaattttatatacaacctcgccagggatgtgacaancaatcattcagtgagccccaggcacaggaccacagagatgaatgaaactacgctgtttgtggcattcagtctgctgaggagactgctacaatcagataggcttcactgagcagcagtgacagcagtgagaagacaaacgtgggggacctggcagagccctgggatgtgggggtgggcacagcttcagggaggatgtgacgcctgggctggatctgaaaggacaaggcaggctcagcccagggaagggcgctctaggtgcatgagcagcgctctgctgcaggcgggtgctgcggcagaggccagcnncccagananctttntntnttgagacagagttttgctcttgttgctcaggctggagtgcaatggcgcgatcttggctcaccacaacctccncctcccgggttcaagcaattctcctgcctcagcctcctgagtagctgggattgcaggcatgtgccnccatgcacngccaattttgtatttttagcagagacagggtntccccatgttggtcaggctggtctcgaacnccggacctcaggtgcnccacctaccttggcccccnaaagttctaggattacaggcatgagccaccacgcctggtccccagann

SEQ ID NO: 12437 - DNA, 390 bp, Homo sapiens
  misc_feature 387, 388, 389, 390: n = A,T,C or G
actgtgtgggtcggccacagggtaggccactatccccgtcctgatggatgtttgcattgttttcaatcttttgcttttccaaataaagccagtatgatagcttgtgcatagtttgtggttttgttttgttgttgtttgtccttgtggaagtgcatctacactagtaagaatttgttgtcaaagggtgtcttggtagccaggtattatccaatgtctctgattgggaattttaacagtttgcattctcaacagtaatgtctgagtgtgactgtttttccatagcttcatcaatagagtgtattgtctcactatgacattatttaattaagtaattatttgcattttcccttttaagaatgagcttgagaaactttttctgtgtttaannnn

SEQ ID NO: 12438 - DNA, 1847 bp, Homo sapiens
  misc_feature 617, 1834, 1835, 1836, 1837, 1838, 1839, 1840, 1841, 1842,1843, 1844, 1845, 1846, 1847: n = A,T,C or G
acaaccctaccactactctacatcatggaagtcttaacgatttagggtaatacgataatgagaataccaatatggatctattaaatgaggagctgagtaagctccaaatttccctctagattggtaagtctataatttattatatgaaattcctaattattaccatactaagttcaaaagattttaacccaaatcctttagtaactgataaacctcattcttaagattcttgacagaaataatcttgatgagcttcttctcttcatgatctttccaatgctgttataattttgagggaattactcttattttcattaattctgttgcaaggaggaaaagactgactctgtgttggggtttcttttctctataaggcacaagacctaaatgtcattgaagaagtgattcgaatgatgttagagatcatcaactcctgcctgacaaattcccttcaccacaacccaaacttggtatacgccctgctttacaaacgcgatctctttgaacaatttcgaactcatccttcatttcaggatataatgcaaaatattgatctggtcatctccttctttagctcaaggttgctgcaagctggagctgagctgtcagtggaacgngtcctgggaaatcattaagcaaggcgttcgttgcgctgcccaaagacagactgaagaccgctggccgatcgaccgtcaggtgggacagagtccttcgcaatgccaggcctttgtgtatgcagcttctgggttctcacagtttcatggcttgtctgtcagaaatttccagaattgaaattcaaatatgtggaagaggagcagcccgaggagttttttatcccctatgtctggtctcttgtctacaactcagcagtcggcctgtactggaatccacaggacatccagctgttcaccatggattccgactgagggcaggatgctctcccacccggacccctccagccaagcagcccttcaagttcttttatttctgggtaacagaagtagacagacaggttacttggtgtatcttctgttaaagaggattgcacgagtgtgttttcctcacacactttgatttggagaattggtgctagttggcaatagataactcagcgtagatagtattgcaaaaaggggaggaaatacacaacaataataaatgtaaaaacctgctattcaacatgcagttttatttcgaagccaaaaatctagagctttcccaagatcctgttgccttaggcacatcacacttcaacagtgcacactatccaacagtgcacactattcaacagtgcacactattcaaaagcgtagactatttttttgcatgttcaagatatttgttttggtcttatgtgtgtgtgagagagagagattcctttgacattaaggagcatcaatgagaaaagatgatgaggcaggaattaataaagaaatgaagtcgtgtgtgtttggttgcctgtcagagggcacacaatttcataaacaccatgcctggacaatttgatattaatatttaacacctctgcatcttttcttaaaaaagaatatgggccagatacagtggctcacatttgtaatcccagcactttggggagccaagttagcagaatcccttgagcacaggaatctgaaaccagcttgggcaacatagtgagatcccatctctacaaaaaacttaaaaattagccaggcatgatggcacattcctgtagtcctagctactcaggaggctaaggtaggaggattgcctgagcccaggagttcaaggctgcagtgagctaagaacgtgccagtacactccagcctgagccacaaagtgagaccctgtctcnnnnnnnnnnnnnn

SEQ ID NO: 12439 - DNA, 373 bp, Homo sapiens
acactcctgaatgcgcagagagagagtgagagagagaagctcaaagaggatgaggtctaggagacccagagtgttcatgggatgtaacaatgagccagtgcccttcctcagcacagtagtctagcaatggggatgctctggacccatttaaaaccgggttacagtgtaaaattcctaatgcatttgcaagtctcagagcaccagcaaaccaaggagggctcctttgtatgagccatgacccagaaaggggctgttagccttggggcctgtcatggtaacatgggccaccttttctcagacaggtctgacaccatcatgaattgtccatgtaatgtaattgaccatgtaactgacaaccctgtgagcagccact

SEQ ID NO: 12440 - DNA, 405 bp, Homo sapiens
  misc_feature 397, 398, 399, 400, 401, 402, 403, 404, 405: n = A,T,C or G
acatgacattttgcactcagtggtatccctaggacttgtttgaatacattgctgtatttatctaaaagggcaaagctttcattaaaaataatctagtggcaatgttgcacagccctaattctctactacatgaaaagttatattttcaggcccagagacacaggattacaggtcagtgataggcaatgcatatttgaagtataccaaaagcaccaaataatgtagctgagtatccagaaggaactgacataaaatgcaggggtctaattactagagtcattgccacagaaccagtcatcgatgactaaattatgcacctggtttcctgggaaaatctgcagtttggggaacatttcactacacttcagagcattttaagtctttaaatcatttagcnnnnnnnnn

SEQ ID NO: 12441 - DNA, 371 bp, Homo sapiens
  misc_feature 371: n = A,T,C or G
actaccatgcccagctaatttttgtattttttgtaattatttttttgtagagacagggtttcgtcatgttgcctaggctggtctcgaattcctgggctcaaacgatctgcctgcatcggcctcccaaagtgttgggattacaggtgtgaaccactgtgtctggctatatcttctgtaacacccaaatgccaccaggcaaagcccaagttgaaccaggagggaaaaaggcctggcaggatgtacgccttgcatgaggatctcagaaactgcactaaaccagtcacaagttcctctttcccgaggtctaactctatgctgaactctgtgcatttttatctcacttaatccatatcacatgcacaggaaggaan

SEQ ID NO: 12442 - DNA, 363 bp, Homo sapiens
  misc_feature 1, 2, 362, 363: n = A,T,C or G
nnctagagtatccccgtcttaaccgtaggcctgttttggaagcaaggtttgaattttcttaaagaaattttgaatgttattcttagaacagcttcttgtttctcacaaaaatcatttatgtaaagggaaggaacacactgatttatttaaaatttggggaaattgcgaaccaaaaaaaaatgcattccaatttacaagttacttgattctgtcatatgaagtggcagtgtccttttcctttcctgcttaaaaaagcagctctggcctgtggaaggcaagtggcaaatgtaagccttatggcaaaacccactcaatgatttaaaaatgctccaggaacactgtgttggaaagaaatcagtggnn

SEQ ID NO: 12443 - DNA, 270 bp, Homo sapiens
  misc_feature 244, 245, 246, 247, 248, 249, 250, 251, 252, 253, 254, 255,256, 257, 258, 259, 260, 261, 262, 263, 264, 265, 266, 267,268, 269, 270: n = A,T,C or G
actgtttgatgaggtgtaaaataacacgctttaactggagaatgaacacatttccagatacaatattatcgttctcttctttttcaagtaataatttccaaaagatgaattttaatggactttttgccatttaaccaaagtgaatccttgagtctctgaagttgcccccacttagcacctgcgtatataacacttaacaattatttacacttttgattaaattcaacctttatgtctgtttgcnnnnnnnnnnnnnnnnnnnnnnnnnnn

SEQ ID NO: 12444 - DNA, 505 bp, Homo sapiens
  misc_feature 1, 2, 493, 494, 495, 496, 497, 498, 499, 500, 501, 502, 503,504, 505: n = A,T,C or G
nnatcatatattattacgatattttgtgataagtgctgtgttcaggatgttaaagacatgacatgtctgtgtctaatccaatctcaagatcgagatgggatcaccacggatagtttcttcaaaaaggtagtgccttcaccatgtcttaaataatacggaaaaaaggcatggtatttgagaggatgtgttcttccacagacagactaccatgagtgtagtatcactgttttaaaagtcacttcttactttgtaagatgagcatgggaggagtcaaaagtagaaagattgaaaatgaaataagagggatccccataagactgcaaagaaaaagtttaaaaaagaatgatgagttttaaattgaagttacttttgaggcaagcaggaagaggtggcaagaggggccagaaaaatcaaagattatacctgatgacctggttttttttgtttgttttgttttttgttttttgttttgagacagagtgagactccgtcnnnnnnnnnnnnn

SEQ ID NO: 12445 - DNA, 487 bp, Homo sapiens
  misc_feature 372, 481, 482, 483, 484, 485, 486, 487: n = A,T,C or G
actttttttttttttttttagagacaaggggtcgctttgtcatccaggctggagtgcggtggcgcaatcagagctcactgtagcctcaaactcctggactcagggaattcccgccccctcagcctcctgagtagctgggactacgggcataggccaccgtagacagctaattttcagcaaacaccttaacacagagagccagtgtggccaccaagtgctccaccttgccccttaaacaggtaggaaggggattttgggctaaaagtggcaactcaaagatccagggagctttgtctaaagtagcccagtaacaaaatcgaacccctgaacggaaagattattcaacacagaacaaaccagggccatgggccngaggcgctagaatttaaactgggaagccgtgaaaattctttgaatttcttagaggactgacagaagtcattatgcgcattgtattcccccagtcatccacgttttacannnnnnn

SEQ ID NO: 12446 - DNA, 380 bp, Homo sapiens
  misc_feature 377, 378, 379, 380: n = A,T,C or G
acacaccagctgcctccaatctccctttgataatcctagccacatgccaccgcgggtgctctagtgtaggctggcaccaaccccacccagcaagagccaggatctgcttcttgagggcaggcaggtttatcacacagcggggtgcagaagagtagtattcatcttcctagtgtaaccacttataactacttttcagtgaatcaaatagatttttaagcaagaacattgtaaaaatctgcttaatcaagggtggagcaaaatgagttagccagggccaccctagctcagatggggtggtagctgcctctgctccacaatgaggtatttacaacttgctccccaccctttcctttgccccattatcttttagttaaaannnn

SEQ ID NO: 12447 - DNA, 355 bp, Homo sapiens
  misc_feature 354, 355: n = A,T,C or G
accaagactgggaaaaactgaggacactggggtagtgtggccatgcactgtcaatggaggagaggaaacagaaagaaacactgaaaacatatttttcgttcattgtcttgttcttacatgctggggagaaatcaaaggactatttctaaattagagaggttataggtaaatctctagcgaactgagggggccaactgagtaatcatctggatgaaaacttacttactggggaaaaggttgattaaaagcctgggccccttcattcgtccagtcatcatttcggaatttgaattggagggccttttttctcctctcataagtggaaacttttcaaagacgttttttcattatcann

SEQ ID NO: 12448 - DNA, 618 bp, Homo sapiens
  misc_feature 1, 2, 3, 614, 615, 616, 617, 618: n = A,T,C or G
nnnacaccagccctgtgaaaaacataatttaatgcttataaaggagagagtaaagattttgcttttaatgaagaaaagagaaccagttacatctaattaatcttagatatataatgtagcctaggattaaggcgagtcaaactataccatagctctttctgtgggttaatctgtcttttattagtgtatcatcactttttagactgtttgggctgttttacagaaatagcaaaaagaaaatacattaaatcagaatttatttaatctttacctaggtgaaagctaaaagttttatgctaagattagtgtaaacttgggtaactgaaaaattgtcccaagttttgaattaaatttggccacccaaggtaccatagtttattgtgtgtggaagtatgcattaaatttcttgaataatcctcattccagaagcccataatctttgtttggaaagatgaaaatgataaggcagccataattatattatctaaatacgaagtaggatcctgttacccgccagtaacttctcttgctctttccctctgcaacagcgtttcatgctcttcatttaccctttgctctgatgtctgtcctttgtccttactactctgatagannnnn

SEQ ID NO: 12449 - DNA, 339 bp, Homo sapiens
  misc_feature 1, 2, 3, 4, 334, 335, 336, 337, 338, 339: n = A,T,C or G
nnnnaagcaatattagcactaaataatttggccaccaaattaaaggaggtattcaaaagaattttatagattcatagtgaattagaagcttggttttgaggcttggctattactcgatactgggactttcattatagcattccctgtagatttgagcagaaattacatcttccctctctctgtaacgttcatttacgcattcttttagtcgttcacccagtgtttatttgaaagagcctacgcctgcaggttccttactgtggcgggctgggggcatgcatccttcctggcgtctaattgcttaaaattcattaatgaaggatcagttgggtgnnnnnn

SEQ ID NO: 12450 - DNA, 400 bp, Homo sapiens
actggggcactcattctgcatgctccgagagatgcacttccagtttccgaagaagggtcctagaatgcttttttgcacccggctttttaccctatcatcattcattttcctaggcagttttgttgtttcctttcttctgcaaagccgggtagatgtctctcacagacaagctagaaatgctgagagcttctgatactctgtttcctgtgcctctgtctactgtgctaaaataaatacttctaacttcctttttgggaaaccatagcaattatttcattgcttttgaagaccttcatactcctggtccccaccctgcaacatgggattcctgtggctgctttcttccaaatgcttcagtgctcagtgttgactttttcaagatgactcacatgtaacttaa

SEQ ID NO: 12451 - DNA, 229 bp, Homo sapiens
accaagcactgctctaggtttggaggtagagacattggtgagtaaaaacagacatgggctcaactttctagagcttatagtccagcaagagggacagatattaaccaaatgaatcagacaaatggcactaaaacattaaaattgtggtgagtgttatgataaggtgatttgccccagtcatggagatcagggcgcgcagtattcaggtgagacggaactgacatatgag

SEQ ID NO: 12452 - DNA, 194 bp, Homo sapiens
  misc_feature 193, 194: n = A,T,C or G
cgccacttcctgtgttttgttaagtcatgaaaattagatttctgattcatctttatttagcatttcactatgtatgtatttgttcctaatattcaaatcacttgctacttgaaattgaatttctgaagataatactacaatttaaaaatatttatttttgcctatgtaaaattaatagggagactccatctcnn

SEQ ID NO: 12453 - DNA, 527 bp, Homo sapiens
gaggacagcatgtgtgctgggctagtttcctggctgctaaagctgcgtggtgccctttaatgatgggaaggaggacattaaatgtgttgggcttagtgttttcacttgtgaacatcagggagcagagggcatgcaaactttgcccaaaggctggacacggtttgcatagaaatgagctgcgtgtagtaataactgacttggtagatgcgcagctaagcactgattactaagtaaaagtgagtgcaacctcaggccataggtgagctaggttgaccagggaaaggctgcgttccaagaggttcgtcttccattggggccgccttaaaatgctgatcctgattcacactggttgagcagtgtgctgtatgttgtcttcacttgagatagaaactgctgtcatctttattttatagaatggagagaactgggtctcaggaaagtataataaattgcctaggctacaacaggtagcaagtagcagagtcaggatttcagtccaggcagcctggccctaagagctgaggctc

SEQ ID NO: 12454 - DNA, 421 bp, Homo sapiens
  misc_feature 421: n = A,T,C or G
acgcacaatcaacaggacttgacactcagcttatgtgagagaaaaatatacaaatacatttattgtaatcacatttaaatttatggctttggcatagaacgagggaggggaaatgtatttgggaaggaaagagaagatggctaaagccatggacagagtttgaataggcaagtaagaaaacagggtcaagaggccgggtgcggtggctcatgcctgtaatcccagcactttgggaggccgaggcaggtggatcacctgaggtcaggaggtcgagaccatcccagccaacatggtgaaaccccgtctctacaaaaatacaaaaaattagccaggcatggtagtgggcacctctaccccagctacgtgggaggctgaggtaggagaatcacttgaacctgggaggtggaggttgcagtgagcn

SEQ ID NO: 12455 - DNA, 385 bp, Homo sapiens
  misc_feature 384, 385: n = A,T,C or G
acaaggttggtaggaggaagagaagaaatgattggctcccagaggcttcatgggctcccaattcatgattctttctctgtggctaatttttgttaagtataagaattccaggaatctcttaggaatcgtggagactgctttctcctgaaatataaaacatctgctcttggtctgcttggcgctccactgtctgaggggaaaacagggaaaaagaggtaatataaaacagacattgtttcagacaataaatccccctttactcattaatgagaaaataaatttagggccagaggcgtcagacttttcaggaggcctctttgttcttttcttttcttttctttaataatttaaaaaaagttcccacactacactgatgtacctcgnn

SEQ ID NO: 12456 - DNA, 363 bp, Homo sapiens
  misc_feature 362, 363: n = A,T,C or G
cacttgccactgtcacccttgcctttgaataattgatattcttatttttcttggtcccagactttgtccttcagtgcactgagtcaaagctttacactaacaggcagtcttatttgttgaatgaatgcatgaaaggctggttttatgaaagcaaaaatgtttttcataattagtatttgaaaagatgtgtttttcaagtaacttgcatgttaatagcctttttttatgatgtggcctttgataagtgtggcagtaagaaaaagaaagtcaccaaagctgaacgattgaagctgctacaagaggaggaggagagacgactgttagaggaaggtacctcgggcgggaccacgctaagggcgaann

SEQ ID NO: 12457 - DNA, 354 bp, Homo sapiens
  misc_feature 1, 2, 3, 4, 5, 6, 351, 352, 353, 354: n = A,T,C or G
nnnnnnactaacattttgtcagcacataatcaattgaaaccacactctaaagttaaattagttccttccaaatggggcagacacgtgctgaccaattaagaggcccaaagacttgggagtagaggatgaacaggaataaattgagaaattatgcaggaaaattattgaaggaagaatgaagacgagaattctcaatgctaagttctggaagatgctggaagagaactgaatccaaaacaaatatatttatggcaactcatcattgtttacatgctgtagacttacagagcagatccatgaaattgtacgaaagagaaaagcctcttctaagtatacaagcagggagagcannnn

SEQ ID NO: 12458 - DNA, 1070 bp, Homo sapiens
acacacaggcattcacacccccaatacacacttcctccttctatctccctgtctgatttccactcatccattctcagctcctgtttgtctgaggccacatgcaactggatttgtcaagcccccttttcacaacttgttgtcacagtccattaccaaattgcatatagttatatattccactaattaggcttctaaaatatcattaacatgtctcttgatcattagcataacgtatgaggcgacgtcgttaggcacgactcgagtttgttaacgtggtaatgaaaggcacaaggcaggctctgcaggaaccaagaagcacagagaagtggggaatatccaagcaccaagatgctagccacaaaggcatagacagagacacagagagacaaaggcaagcacagagaggagatgcaaggcacgaggaaaaggcagagaaacacagtcaaaggagtgcatcagtaagcacgactttggcagtgagatggctgcttgggcgtaaaaaggtgaaacctaatgcacccactcccacctgtgtgggaattagaccctggcaaggctctaagcagaagaagctttaaaaatttcctacgacaagaaaaaaataaaattcagaaatctccttctttcctgccacctaacacatggtgcacacgggtgtgcccatctccccccattcccacaccacgccctctccagcagtggctacagaagactgtgggcaattacctgggggtgacgttcttcgattccctatcaggccctttattaacatgctggtagatatctctatctatctatatacaccgcattagtcatgatcctcttgtgtgtaacgaggcggggcttacctccagagattatggacatgctacatctagagaagagagaaggaaggaaagcacataaaaaagatggcaactggccaggcgtgttggctcatgcctgtaatcctagcactttgggaggccgaggcaggtggatcacgaggtcaggagttcaagatcagcctggccaacacggcaaaactcagtctctactaaaaatacaaaaattagccgggtgtagtggca

SEQ ID NO: 12459 - DNA, 605 bp, Homo sapiens
  misc_feature 540, 604, 605: n = A,T,C or G
acaagatttttacttttccagccgctgtaggcaaagaaaggcagggagagagagccttaggagtggatgctgagtcagccagttgcagtgtctgccccagaaccatcctataaaagccattttcaaactttattcattgtatgtgaacatgtttcaacatctttcacaagtggcttttaaatcgttgttagtcatgggagctttgattagatgaactcttgtgagggaacctggcatggtgggcataccacgacaccagctctcagagactcagatggagggagccaggctgggtgtcgtggaagccccttgaagctaagtgataagggttttggctaagagtagttgtaaatgaaaacttttcatttttagttgagataagatgtcagtaaaagttaccactatgaggatttggctttgcatttagcgatccatttttgcttttctttttttaaagtaggagaataatatgttttgaacatttagaaatggcctctttattgaaatacataaccttgtgtggtttgggctggtgcttanatcctcaagaagaatttccacatggaaaacgaattgccaccttagtcttctccaaagatgctgnn

SEQ ID NO: 12460 - DNA, 476 bp, Homo sapiens
  misc_feature 476: n = A,T,C or G
acgcgggtctccatatatcttgaagtttttttgacttgattctgcacacttaaaaggtgtgttctttattcatactgatgattaaatgcaaccaaaatacaggtagtttctatgaattaggagttcatagcatcttctaaagcacagaattctgaatagaactcatccaggtgagaagcagaacattctaaagcagctttcagtttctttaacttggagtctccaactccaattcagaattattcttcctcatgccagtctccaggagcagcctggcccaggcttcaagagtaatacctcaagtctactttcaaaagattcccaaagactgttttttccctcacttgttttgattggatctcatttcaaagagggccttttctaagactgctgatgtttttttatggtaatctgcttaagtttctaatgaagtgacaagagtttgccattcagcccgtctttggccatacaagtcn

SEQ ID NO: 12461 - DNA, 135 bp, Homo sapiens
aggtacaccagaacacccagtaaactgctaaggcatttgacctaaatacctggctccaaggcagcatgtctggacatgcctcggtcctggtagaaatcactgccctgaaaggaaacgctttgggaaacacctggt

SEQ ID NO: 12462 - DNA, 1742 bp, Homo sapiens
  misc_feature 1, 2, 3, 4, 1740, 1741, 1742: n = A,T,C or G
nnnnaatttggttattctatctaagatgagggacatggctattaaggtcaagccgaacggggctaaaaggggtatagggcatcatttaaaattatcttttgaaaatcaagtattacctggtttcttctgtcacaacagaatagctggttacctagtcagtcacagttgcccttgccttcccttgttagtccctggaggtacttgagtggaacagaatgtagaattagcaacagctcaatcactttaggtagcatttctcctgaattctgctgccaaatcctcagggtctatggattggttgaaatagtaaaatcacacatagtgatttcttgcacagcgtagaggcgtttaattttagtgtatagtgaacaaagaaggaaaactgggtcatataaaatttaaaccttaaaacacagattataaatatctttgaatgttaagccctaggcagacagacactctcattcttaactctggtatgcaagctggccttgctgacagtggcatagttacattaactgttttttaagttgcatgttgtgatgtgaatgttttttgtaaaagttgccaagttaatcgagtcctaaataagtagccaaatggtaactgagacccactgtagacattactcgctttatattatttgctttcaaatactaaaacctcagctgctaattcagcgctctaggtgtacagtgtctccttcccttggctcctagcaatgtagggaacttgaggttcttcagtatcttcagagattccttccaggccacatatttttatgctaatacttctatagttgcattcaatctacaaggagaaagtgtacattggtgcatgttttataaacccagacacagatagctaaaaccataattagtttttctatacccagagctttgaattaaaaacagatgctttttttttccccaagagcagacagttctacattcctaacattaggaattggtgatacgagaagcaggatccagaattcagaatgatttagtgagactcggtgaaaaaaatgcattttcccctggctgtttgaaaatttacttatttgcagataagtctagatttagtcttggagatcaaagtcttttatattttaaaaacttattctttatattgatcaaacatggcatatgttagagaaccacttcttctgtcatgtttatgtattttggaattaagttgtttgcattcactttcaaaatctgcccatttctgtttatgtgcacttaccacagatgtgtcgggactttgcctcaggggagaggtactttagcacctgtgtcactgaggagatggagtggttgacaagtactgttgcgctgtgtaacttggggttggcccctgtgggcacatatattaggcagattgataccacacaaaagtattacaggattaaggcatgtaacttcaatggaagtccttatgtatcaagtataccaagtcgaaagcacaggtggcttataaaccttacctaagaactaagggcgtccaacctaaagcccaatggggggaataagaatgtaaaacaccaacaggggttcggaacccaaataccgtgctcccaatgagcactcgtatccccgcaaaaagaaaaaggaaaacaaaaaacaatctacaatggccccgcgagagaatagtacgcgagacacaacatcacgcgaaaacgagagcgacgaaattaacgagacaaccacacgaggcgacacaacagacggactctannn

SEQ ID NO: 12463 - DNA, 621 bp, Homo sapiens
  misc_feature 1, 621: n = A,T,C or G
nattcccccagaagagaacctgatgcttccaccagaacaactccaaggaaataagacttttaaaaagggcaagaagaaggagtcacctgtaatctctgcaggaatactagaagtgttcatcaaagaggcaaagaatttgacagcagtgaagtcaggaggcacttctgatagctttgtgaagggctacctgctccctgatgatagcaaagccaccaagcacaaaactctggtaataaaaaagagtgttaaccctcagtggaatcatacattcatgttcagtggcatccatccccaggatataaagaatgtttgcctagaacttactatctgggacaaggaggccttttccagcaacatctttctgggaggagttcgtttgaattctggaagtggtgtgagccatgggaagaacgtggattggatggactctcagggggaagagcagcgcctttggcagaagatggccaacaaccctggaactccctttgagggtgtactcatgcttcgttccagcatgggaaaatgtaggctctaaagggaccagttctccaagaatgaggccaccatgacctatctggctgtcttttcctaccattagcaaactgagacctgggattctgn

SEQ ID NO: 12464 - DNA, 379 bp, Homo sapiens
  misc_feature 372, 373, 374, 375, 376, 377, 378, 379: n = A,T,C or G
acctacaagacatcttatattctaccatgagcaaatttccaaagaagagaaaaggattttggaaccaagatctccactcccagcacgcctgatggctcgaatgaacatttcagccgaccagatgaagaccaacaaaacccagtcaagcgagcccaccaacttggggacagatcaagaggctgacccaccttgcagaggataacctgacaacacaacatgatccactagcctcgagtaacctgatggtagctatgattgcggtaattaccatggtgtctgcagatgcggaagatgcctctggagagagaccagacaccacgaacaagtcttattagcagtggcagctctaaaaaataaaaaaggggggcatgnnnnnnnn

SEQ ID NO: 12465 - DNA, 2828 bp, Homo sapiens
  misc_feature 1, 2, 3, 2827, 2828: n = A,T,C or G
nnncagggtccccgcgcaccgcggagtgggctgtgattggaggaggagcccgtgccgggcgggcccgagcgggtgtcgagccggttcctccagtctgccccgcgcgcggagctgcgcgcactgggtccccaagagcccgcgggcgtccggcagccgagcgcacgttctttcggatgcacacgcccgggtccctggcgtctgacgccgtggggagggcagcgaggccccaggtacttactacaccattctttggcgaaggctattcagcagtggtgacctcttccaatccaacactctacagattattatctctggactcccagctgacaccctgccggaggcaagagctactaagccaactggaactgtgccttttctcttgtcaaggtttttttcttacacaggaaaaagaaagaaaaaaaaaagatgaagttgggcaaagtggagttctgccattttctgcagctaatagctcttttcctgtgtttttctgggatgagtcaagcagaactctcaaggtccagatcaaagccctatttccaatcagggaggtcccggaccaagcgcagctgggtgtggaatcagttctttgtgctggaggaatacatgggttcagaccccctctatgtaggaaagcttcactctgatgttgataaaggagatggttccatcaaatacatcttgtcaggcgaaggggcaagttccattttcattattgatgagaacactggggatattcatgccaccaagagactggatcgtgaggagcaggcctactacacgctccgagctcaagcgctggataggctcaccaacaaacccgtggagcccgagtcggagtttgtcatcaaaattcaggatatcaacgacaatgaacccaaatttttggatggcccatacacggcaggagttcccgaaatgtctcccgtggggacctcagtggtacaagtgacagcgacggatgctgatgatcctacatatggcaacagtgccagagtggtctacagtattctgcaaggacagccgtacttctcagtggagccaaagacaggagtcatcaagactgcccttccaaacatggatagagaggctaaagaccagtatttgcttgttattcaggcaaaggatatggttggtcaaaatggaggactgtcaggaactacatcagtcactgtgaccctaactgatgtcaacgataatccacctcgctttcctcgaaggtcttatcaatataacgtcccagagtcattacctgtagcctcagttgtggccagaattaaagctgctgatgcagatattggagctaatgctgaaatggagtacaagattgtggatggtgatggtttgggcatttttaagatttctgttgacaaagaaacccaggaaggaatcattactatacagaaggagctggattttgaagccaaaacaagttacacgctacggatagaagctgcaaataaagatgccgaccctcgctttctgagcttgggtccgttcagtgacacgacaactgtgaagataattgtggaagatgtagatgagccccctgtgttctcttcacccttgtaccctatggaggtgtcggaagctacccaggttgggaatatcattggcactgtagcagctcatgacccagattcttccaatagccctgtgaggtactcaattgacagaaacacagacttggagagatacttcaatattgatgccaacagtggggtcatcacaactgccaagtctttggatcgagagacaaatgctattcacaatatcacagtccttgcaatggagagccagaatccatctcaagtaggaagaggctatgtggccatcactatacttgacatcaatgataacgcccctgaatttgccatggactatgagaccaccgtctgtgaaaatgcccagccggggcaggttatccagaaaatcagtgctgtggataaagatgagccatccaatggacaccagttttacttcagcttaacaacggatgcaacaaataaccacaacttttcattgaaagataacaaagacaacacagcctcaatactgaccaggagaaacggcttccggagacaggaacaatcagtttactatctgccaattttcattgtggacagtggatctccctcacttagcagcaccagcaccctcaccatccgcgtgtgtgactgtgatgctgacggcgtagcccagacctgcaatgcagaggcctatgtcctacctgctggcctcagtacaggagccctgatagccatactcgcctgtgtcttgacattattggtgttgatcctccttatcgtcactatgagaagacggaaaaaagagccccttatttttgacgaagaaagagacatcagagaaaatattgtgagatacgatgacgagggcgggggagaggaggacacggaagcgtttgacatggctgcactgagaaacctcaacgtcatccgagacaccaagacccggagggatgtgactccagaaattcaattcctgagtcgaccagcttttaaaagcatcccagataatgtcatctttagggaatttatttgggaaagattaaaagaagccgatgttgatcctggtgctcctccttatgactccctgcagacatatgcttttgaaggaaatggctcagttgctgaatcactcagctctttagattccatcagctcaaactctgatcagaactatgactacctaagtgactggggacctcgctttaaacgactcgcggacatgtatgggactggccaagagagtttgtactcatagccttggaaccttaattcgaaatgtactgaagaaaaagtaacann

SEQ ID NO: 12466 - DNA, 899 bp, Homo sapiens
  misc_feature 808, 809, 810, 811, 812, 813, 814, 815, 816, 817, 818, 819,820, 821, 822, 823, 824, 825, 826, 827, 828, 829, 830, 831,832, 833, 834, 835, 836, 837, 838, 839, 840, 841, 842, 843,844, 845, 846, 847, 848, 849, 850, 851, 852, 853, 854: n = A,T,C or G
  misc_feature 855: n = A,T,C or G
acctcagcacagcacagccacgctacaaaaacgtggccagactcttgtttacgtcagtccctgatcacatttctagttagcgggtgaagtctttcaaccggggtctctggctaccttgactgctgttctctggccgacagaggtctcaggcctccctgagtcagagctcccagggggaggaccagattgtcatctgtgctgggggttcacttttgagagagttctcctctgagacctgatctctggaggctgggcagtcttgcacttgaggtggggctggtctgatctcagcactccttagtctgctcgcctctcccatggccccagcctggccacacctgcttacggggcactcgtagatgcccacaccatagcttccatgctagtggactgtaccatatcagtggagagctgcagcaaggtggcccctagagccacgcaccagcctgcacattgcctctccatacggcagccctttatttggaaacttcctaaatcactttgctgtgtgtgtttacacgggtgggttttgctttacttgccctgagagcacacgggagtgcagcacacaccccaacccacatcaactgccattaaagaaaagaaatttcagcccagaatttcatgtccagcaaaattaagcatcataagtgaaggagaaataagatccttttcagacaagcaagtgctgagggaatttggtatcaccagatctaccttacgagagctcctgaaggaagcactaaatatggaaagaaaagatcatcacctgctactacaaaaacacactgaagtacctcggccgagnnnnnnnnnnnnnnnnnnnnnnnnnnnnnnnnnnnnnnnnnnnnnnnnaatcgatctcttttaatttttaggccaattttgagtagtcaaag

SEQ ID NO: 12467 - DNA, 956 bp, Homo sapiens
  misc_feature 1, 171, 172, 953, 954, 955, 956: n = A,T,C or G
nggctatcactactataggcgattgagcatcacgcgatgctgccgttccggcacccactcatatgcgcactccctcctgcgaggacagaacgcagtgggtctgagtgagtggaggttgagccctctggcgccaaagcagccggctggattcagtacttgtttttttaattnntggggggacggaaattaaggtttaattcagtaagtcgacagattaatacaatattattttaatataaaatttaccatttgtactaagacttttcttatatatcaatatgtcaataaggaaaaagaactaaaactaaattatatggaaggattttttcaagatatactagatataatttaataagagggataggtgagagtaaacagtagcgttatttaaaaacttcatgtttattcggtattttcttaagaagctaaatgattcattattaataagatgagtttaatatattataaactatatatagatattaatttatgatattaaggattctaatagtatatataagaatatacagttatttgagctcacattacttatgtcataaacataagtttagagttcacatataacattatataatgataatttacatatattaatattaatactactatagtatacaacagaaacgatgttaagacatattagaaatatcagtgagaattaaataataaataactaactaattacagaactatatcatttatcttagtataattgtgtacatttctattcatttcctttcaattactagaatatatatatgtgatattattacatactatttcattgtgtagattaactatattatataataatgttatgattgcagacatattaattaacttgtgtgtaagattggttagaatataacatttatgattatgtattatacagttgactcatatagtatatcaatatcagctaattatcaacnnnn

SEQ ID NO: 12468 - DNA, 3987 bp, Homo sapiens
attgacaaacttgaggaggcaatgcaggctgccgttcagtaccaggatggactgcaggcggtatttgactgggtagatattgcaggtggtaaattagcttcaatgtctccaattggaacagatctcgaaactgtcaagcagcagattgaagagctaaagcaatttaagtctgaggcctatcaacagcagatagaaatggaaagactgaatcatcaagcagagcttttgctaaagaaagtaacagaagagagtgacaaacacactgttcaagacccattaatggaactgaaattgatatgggatagcctggaggagagaatcatcaacagacagcataaactggagggtgctctattagccttgggtcagttccaacatgccctggatgagctcctggcatggctgacacacaccgagggcttgctaagtgagcagaaacctgttggaggagaccctaaagccattgaaattgaacttgccaagcatcatgtgctccaaaatgatgtattagcccatcagtccacagtggaagccgttaataaagcaggaaatgatctaattgaatcaagtgcaggagaagaagcaagcaaccttcagaacaagctagaggttttaaatcaacgctggcaaaatgttttggaaaaaacagaacaaaggaagcagcagctggatggtgccttgcgccaggccaaagggttccatggcgaaattgaggatttgcagcagtggctgactgacacggagcgtcatctgttggcatctaaaccgctgggaggtttaccggaaacagccaaggagcagcttaatgtccatatggaagtctgtgctgcctttgaagctaaagaagaaacatataagagtctgatgcagaaaggccagcagatgcttgcaagatgcccaaaatctgcagagacaaatattgaccaagacataaataacttgaaagaaaaatgggaatcggtggaaaccaaactcaatgaaaggaaaactaaactggaagaggctctcaacttggcaatggagttccacaattctctccaagacttcatcaactggcttactcaggctgaacagaccctaaatgtagcttctcggccaagtctcatcttggacacagtcttatttcaaattgacgaacacaaggtttttgccaatgaagtaaattctcatcgtgagcagataatagagctggacaaaactggaacccacctaaaatattttagtcagaaacaagatgttgttctaatcaagaatctacttatcagtgtacaaagtcgatgggaaaaagtggttcaacggttggtagagagaggaagatctttggatgatgcaaggaagagagccaagcagttccatgaagcttggagtaaacttatggagtggctagaagagtcagaaaagtctttggattctgaactggaaatcgcaaatgatccagacaaaataaaaacacaacttgcacaacataaggagtttcagaaatcactcggagccaagcattctgtctacgacaccaccaacaggactggacgttctctgaaggagaaaacctccctggctgatgacaacctgaaactggatgacatgctgagtgaactcagagacaaatgggataccatatgtggaaaatctgtggaaagacaaaacaaattggaggaagccctgttattttctggacaattcacagatgccctacaggctctcattgattggttatatagagttgaaccccagctggcagaagaccagcctgttcatggagacattgatttggtgatgaatctgatcgataatcacaaggccttccaaaaagagttggggaagaggaccagcagtgtgcaggccctgaagcgctcagcccgagaactcatagaaggcagtcgggatgactcctcctgggtcaaggtccagatgcaggaattaagcacacgctgggagaccgtgtgtgcactttctatatcaaagcaaacacggttagaagcagccctgcgtcaggcagaggaattccactcggtggtacatgccctcttggagtggctggctgaggcggagcaaaccctgcgtttccatggtgtcctcccagatgatgaggatgctctccggactctcattgatcagcataaagaattcatgaagaaactggaagaaaagagagctgaactaaataaagccaccactatgggcgacaccgttttggctatctgccaccccgactccatcactaccattaagcactggataacaatcatccgggcgaggtttgaggaggtgctggcctgggcaaagcaacatcagcagagattagcaagtgctctggctgggcttattgccaaacaggaattgttggaagctttgctggcttggttgcaatgggctgaaactacacttactgataaggataaagaagtcatcccccaggagatcgaagaggtgaaagcactcattgcagaacaccagaccttcatggaggaaatgaccagaaaacagcctgatgttgataaagtaacgaagacctataagaggagagctgctgatccttcctcattacaatcccatattccagtcttggataagggacgagcaggaagaaaacgctttccagcatcaagcttgtatccctctgggtcacagacacaaattgaaaccaaaaatcctagggtaaacttactggtgagcaaatggcagcaagtctggctcctggcgttggaaagaaggaggaaactcaatgatgccttggacagactagaggagctgagggaatttgctaactttgattttgatatctggcgcaaaaaatacatgcgatggatgaatcacaagaaatctcgagtgatggacttcttcaggagaattgataaagaccaggatgggaaaataacgcggcaggaatttattgatggaattctttcctcaaagtttccaaccagtcgcttggagatgagcgcagttgcagacatctttgacagagatggcgatggatatattgactactatgaatttgtagcagcccttcacccaaataaagatgcatataaacctatcacagatgccgacaaaatcgaagatgaggtgacaaggcaggtagctaagtgtaaatgtgcaaagcgatttcaagttgagcagattggtgataataaatacaggttcttcctgggaaatcagtttggagactcccagcaactgcgactggtccggatcctgcggagtactgtgatggttcgtgttggaggtggatggatggcacttgatgagttcttagtgaaaaatgatccttgcagggttcatcatcatgggagtaaaatgttacgttcggaatcaaactcttcaattactactactcagcctactatagccaaaggaaggacaaacatggaactgcgtgagaagttcattttagcagatggtgccagccagggtatggctgctttccgaccccgaggccgaagatcccggccatcatcacgaggcgcttcacccaacagatccacttctgtgtccagtcaggctgcgcaggcggcctccccacaggtccctgccaccaccacacccaagattctccatcctttaacacgcaattatggtaaaccatggttgacaaacagcaaaatgtcaactccttgtaaagcagcagagtgctcagactttcccgtgccatctgcagagggaacgccaatacaaggaagcaagcttcgacttccaggatatttatcaggtaaaggcttccactctggggaggacagtggcttgataacaactgcagctgccagagtccgaacacagtttgctgattccaagaagactcccagccgaccaggaagtctagctggaagcaaagctgtgcagcatggcagcagtcgacgaggcagtgatgcatcagactttgacatttcagaaatccagtccgtgtgctcagatgtggaaactgtcccccaaacacacagccctacaccctgagcagtttttcggccatccacagtgaacctttca

SEQ ID NO: 12469 - DNA, 1242 bp, Homo sapiens
  misc_feature 1, 2, 331, 1242: n = A,T,C or G
nnaacggcaggagaggagcgaagaggtggcaagacgagaagcagcgagcttgctctacacacgatgacttccgtcgtcttgcgtggtcgaatcttctgcactcatacgtttgtgtctgccgtactctacttcgatcgcggctgctcatctgctctttgtcctctgtcctgttcttccctacttctctccacttgtagtcttgttgcgtctttttctgcccatttagtcccatgggcgcctgtgttcagcccacatgggatactagggtcaacccgctgtacccagacccacgtgatctttggcaccgtgcccgctggtatgtctgcgccgncgtcccaagggccggcctgtcaccattcttcctccccctgtccccatgtacttgcatcccggcttcacacacacacacagctcccaatagctttcatcttacccgtcagctcccattgagtccaaagtgaccacccgcagaacccgtcctggctcacgcacgctaatgacttgccatctggggagaaagcaactcgttgagggccccctcgccccaccgtccacttaaggagagggttcctcgtggatttgctcttgcaagtgtgcacggcaaagctctctccctgcttcagaagctggtagtggggggctgtggtgccacaagtgtgctccacattatataagtacatgttcccactcgagtgggctactaggaaaaggctttccgaaccgggaacccatttgacacaggtaactcgtgacttgtctattagtctttcctcattaaaaagtttgctagtttcttttttgattgggtctataagctggacttggcctgcggaaaagcccactaggagagagacactttctgctgtggctgttaggtggttgaagtcatgacaagtaggctgtgttcctttgtatatccttttatctattggtttactcaagtcagcagccttgcggacccccttgtagatatagaagtacagctcccggcccacattgaagcagaggcggtcgccgttgccagactggtcgttgaggtttacgaaggagacgcggacagggttggatccctgcgagttgaagggcacccggttgggccggctgtactccgagtgcggcagcagcttgtacagaccttcccgggtggtgaattgggtcttaatctcgttcatctccttccctcctccctccgtcgccatcttgaaagcagcgttcatcggacgcgtgggtcgactccctatn

SEQ ID NO: 12470 - DNA, 765 bp, Homo sapiens
actcttcctggacagagatctgattgtttcctgagcaggataataaagatattgacttactccagggcaaagttagggcagatttgctagtagtcccttgtaagagtaggggtttcctaagatcagagttcctcagctatgacacagacccacagggctgctccaaaccacccctatgggactcacggagcaagggggatggatgtgaataagaggctcacgctgtctgctgtgttgtggtcacaaagtcctttgtctctgaccaggagccccgtgtctctgctagtatctgtgaaactgcagcaggctgttagcttgtaagcagaactttcacagttcttgacacagaggagccaaagatctcatttcatatctaagtcagatcaagtccctcctttactcaaaatcctacaatcactcccatttcagagaaaaatccaaagttcttacgatggccacaaaactctgactgatcactcccatcctcctgcacactctgccatctcatcctgtctctgaccccatccctgctcctctccctattcctcactcttctccagccatatgggcctccctgcagttcctcagacacgctgggcacaggccctactgtggacctttatactcgctcttctgtttgtgggactctccttccctcacacccttggcccacttgctcatcttcttctgtctttgttcaacatgcccttctgactgagctcgaaccccctatttaaaattgcatcctggctgggtacctcggcc

SEQ ID NO: 12471 - DNA, 336 bp, Homo sapiens
ttgcatgtgccatcccgcgtagtatgtgttgttaccactgcactttcttgctgtccgaaatactgccatcatgaacaagcccaggctggcgtgctgaaggtgaaagatacatgccagagaactgagggaccccggtggacagccagccaacctcctgaagcaaaccctccctgccaatctgcagttgactgcaaacacataagagacccagaataggataagcactgcccttctgagcccaacctaaattgctgacatgcagaatcagaaacaaaatatgtgtttttgaagtcacaaagtttagaggcggtttatcactcgcgatagataactggt

SEQ ID NO: 12472 - DNA, 517 bp, Homo sapiens
  misc_feature 516, 517: n = A,T,C or G
actaaatttacaaaatatctctgccaccaccaaaaccacaaaagtatgcttaatcttgctcttctaacatataagagtgacccagccatgagaaaaatgttgaatcatccatatttctatatcatgcctgtgtttaacgtcgatggataccattttagttggaccaatgatcgattttggagaaaaacaaggtcaaggaactcaaggtttcgctgccgtggagtggatgccaatagaaactggaaagtgaagtggtgtgatgaaggagcttctatgcacccttgtgatgacacatactgtggcccttttccagaatctgagccggaagtgaaggctgtagctaacttccttcgaaaacacagaaagcacattagggcttatctctcctttcatgcatatgctcagatgttactgtatccctattcttacaaatatgcaacaattcccaattttagatgtgtggaatctgcagcttataaagctgtgaatgcacttcagtcagtatacggggtaccnn

SEQ ID NO: 12473 - DNA, 631 bp, Homo sapiens
  misc_feature 1, 630, 631: n = A,T,C or G
ngtaccgcagtatggttggccatgggattatccttcattacatcaaatgaggtatggtggacaatcttgtttataacatcacctgaccaagttttctccaagaattccaacaccttgtggatctcatgttttggattttttttaatatcctcgtagaagaggtagaggatccggtgcatgtcttttgcagcccaccatcctttcacatggtcaaaccaggacccgccaacaacttttccggacatgaatttctcataaaattcctctaagttctgaggatcaggcataaaggaagccatcctgtgaaagtggtagtaggacaccaggcaatccttgggatttctggccacatagacaatcttgcagttttctttccagatagatggtggaatcagatgtgaagggagatgtgtttttatcagttgtggtgaggacatttcaagaacgaactccaaatctggtttttctttatggggaaatttcagttcaaggaaagcgtgtctatctagagtctgggctcttttgcatttctccacatcaccatcatttagaatcatgtctaaaatttcatgcatccatgttgtacctcggcaggcggccgctcggccaccgcggtggagctccaatcann

SEQ ID NO: 12474 - DNA, 457 bp, Homo sapiens
  misc_feature 1, 455, 456, 457: n = A,T,C or G
natagggagtcgacccacgcgtccgcctctatggttcattgtcaccatgtccctgctgtgcccactgctgctggctttagccctggtggctgtccctggtgcccatggcaattgcccggtgcccgcagacctgaagaagtcagatgggacgcgtacgtgcgccagactctatgagaagagtgaccatactatgacaactgctgccaggggcccgtgttgtctgtggagccaggtactgacctgccctatctgccctcgggctggtctaacactgcatcgtctctggtagtgggccagcgctgtgagatcactgtgtggtctctccccggtaagcatggcaagacccgcaagttcaccgcgggttcttgccctcgcctggaagagtaccgcaaaggcatctttggagactggtccgactccatctctgccctctactgcaagtgctattgatgccnnn

SEQ ID NO: 12475 - DNA, 384 bp, Homo sapiens
  misc_feature 1, 2, 379, 380, 381, 382, 383, 384: n = A,T,C or G
nnctctcctgtctgctgggcctctccctctggagacaaaactctgggagagggaagctccctcctggcgggacccctttcccaattattggaaacatccttcatatagatataaagagcgtgagcaaatccttcaactatttctcaaaagtctatggccccgtgttcactctgtacttgggttcaaagcctactgtggtggtacatggatatgaagcagtaaaggaagctctggatgaccttggagaggagttttctgggaggggtagttttcaaatttttgaaagaataaataatgatctgggggtgattttcagcaatggaacaaaatggaaggagcttcggcgcttctcaatcatgaccttgaggagttttgggannnnnn

SEQ ID NO: 12476 - DNA, 387 bp, Homo sapiens
  misc_feature 1: n = A,T,C or G
nagaactttgataagcattatgaaaagaagatggcagggtccacactgaacttctgcctggagatctgagaggaacaacaccaaactaggacccaaagcgggaaattgagaagatactgaagttcctggaaaaagacatatcagaggaaattctgaataaaatcatctatcacacctcctttgatgtaatgaagcaaaacccaatgaccaactataccactttgcccaccagcattatggaccactccatctccccttttatgaggaaaggtagataagctttgtagtctaagatgtcaaatgaaactctgtggtccccatggtctgcttagattttccagtaatgtttcattctccattatttattctttccagcagcaccactgt

SEQ ID NO: 12477 - DNA, 478 bp, Homo sapiens
  misc_feature 476, 477, 478: n = A,T,C or G
actttttctttttttctttttttaaagattttgataagaacacaacatgaaatccatcctcttcataaatttgtaactgcacagtacagtattgttaactataggtaaaatgttgataccagtagacggtgataagtcacatatgtacattgtattgccaagggcaaccgctaagaaaactttatatagtaatacactcagaaactctataaattaatcaagatggaatcataaaaatattctaataaccccagaaaagcaagaaaaaacagaggaacaaggaacagaagaaacaaacacaaaacaaataataaaatagcaaacttatggcctgacagaagtatttactttaaaaggatacaatatgaagaaaaggaaaaattgaccatgaaaaaaagatttgtctatgaaaatgatttttttttacatgaggtattcctgttgtcattgggagatatttatgagtagattctaannn

SEQ ID NO: 12478 - DNA, 2156 bp, Homo sapiens
  misc_feature 1, 2, 3, 4, 5, 2105, 2128, 2156: n = A,T,C or G
nnnnnggggagttatgcgccagtgccccagtgaccgcgggacacggagaggggaagtctgcgttgtacataaggacctagggactccgagcttggcctgagaacccttggacgccgagtgcttgccttacgggctgcactcctcaactctgctccaaagcagccgctgagctcaactcctgcgtccagggcgttcgctgcgcgccaggacgcgcttagtacccagttcctgggctctctcttcagtagctgctttgaaagctcccacgcacgtcccgcaggctagcctggcaacaaaactggggtaaaccgtgttatcttaggtcttgtcccccagaacatgacctagaggtacctgcgcatgcagatggccgatgcagccacgatagccaccatgaataaggcagcaggcggggacaagctagcagaactcttcagtctggtcccggaccttctggaggcggccaacacgagtggtaacgcgtcgctgcagcttccggacttgtggtgggagctggggctggagttgccggacggcgcgccgccaggacatcccccgggcagcggcggggcagagagcgcggacacagaggcccgggtgcggattctcatcagcgtggtgtactgggtggtgtgcgccctggggttggcgggcaacctgctggttctctacctgatgaagagcatgcagggctggcgcaagtcctctatcaacctcttcgtcaccaacctggcgctgacggactttcagtttgtgctcaccctgcccttctgggcggtggagaacgctcttgacttcaaatggcccttcggcaaggccatgtgtaagatcgtgtccatggtgacgtccatgaacatgtacgccagcgtgttcttcctcactgccatgagtgtgacgcgctaccattcggtggcctcggctctgaagagccaccggacccgaggacacggccggggcgactgctgcggccggagcctgggggacagctgctgcttctcggccaaggcgctgtgtgtgtggatctgggctttggccgcgctggcctcgctgcccagtgccattttctccaccacggtcaaggtgatgggcgaggagctgtgcctggtgcgtttcccggacaagttgctgggccgcgacaggcagttctggctgggcctctaccggacgcagaaggtgctgttgggcttcgtgctgccgctgggcatcattatcttgtgctacctgctgctggtgcgcttcatcgccgaccgccgcgcggcggggaccaaaggaggggccgcggtagccggaggacgcccgaccggagccagcgcccggagactgtcgaaggtcaccaaatcagtgaccatcgttgtcctgtccttcttcctgtgttggctgcccaaccaggcgctcaccacctggagcatcctcatcaagttcaacgcggtgcccttcagccaggagtatttcctgtgccaggtatacgcgttccctgtgagcgtgtgcctagcgcactccaacagctgcctcaaccccgtcctctactgcctcgtgcgccgcgagttccgcaaggcgctcaagagcctgctgtggcgcatcgcgtctccttcgatcaccagcatgcgccccttcaccgccactaccaagccggagcacgaggatcaggggctgcaggccccggcgccgccccacgcggccgcggagccggacctgctctactacccacctggcgtcgtggtctacagcggggggcgctacgacctgctgcccagcagctctgcctactgacgcaggcctcaggcccagggcgcgccgtcggggcaaggtggccttccccgggcggtaaagaggtgaaaggatgaaggagggctggggggggccccatttaagaagtaggtgggaggaggatgggcagagcatggaggaggagcctgtggataggccgaggaccttctctggagaggagatgcttcgaaatcgggtggagagaggcaattggcaaagggatagagacgagccccacgcgccatgacagccaacctccgctccgcaccccacagcctctccttactcttcccacgctgagtagtgtgggggcgcccagaagcgaagacaagcagcanaaatgtagagaaattggcacggngaggcgggcttagccaaatgatgcacan

SEQ ID NO: 12479 - DNA, 1447 bp, Homo sapiens
  misc_feature 1444, 1445, 1446, 1447: n = A,T,C or G
acctggatcaaggtggagtcctggttgctatgaaacacacatctctcccaattcgacatctttggttgagttttgatgaagggagatcttggagcaaatacagtttcacatctattccactttttgtggatggggttctgggtgagcctggagaagagactctcatcatgacagtgtttggacacttcagccaccgctctgaatggcagctggtcaaagtagattacaagtccatttttgatagacggtgtgccgaagaggactacagaccttggcagctgcacagccagggggaagcatgtatcatgggagcaaaaaggatatataagaagcgaaaatcagagcggaagtgtatgcaaggaaaatatgcaggagctatggaatctgaaccctgtgtctgcactgaggctgattttgattgcgactatggttatgagcgacacagcaatggccagtgcctgccggcattttggttcaatccatcctctctgtcaaaggattgcagcttgggacagagttacctcaatagtactgggtacaggaaggtggtttccaataattgcactgatggcgtaagggaacagtacactgccaaaccgcagaagtgcccagggaaagccccgcgggggctgcggatagtcacggctgatggaaagctgacagcggaacaaggacacaacgtcactctcatggtgcaattagaagagggtgatgttcagcggacactcatccaagtggactttggcgatggtatcgcggtgtcttacgtcaatctcagctccatggaagatgggatcaaacacgtctatcagaacgtgggcattttccgtgtgaccgtgcaggtggacaacagtctgggttctgacagcgccgtcctgtacttacatgtaacttgtcccttggagcacgtgcacctgtctcttccctttgtcaccacaaagaacaaagaggtcaatgcgacggcagtgctgtggcccaccaaggcaccctcacttatgtgtggtggtacggaaacaacacggagcctttgatcaccttggagggaagcatatccttcagatttacttcagaaggaatgaataccatcacagtgcaggtctcagctgggaatgccatcctacaagacacaaagaccatcgcagtatatgaggaattccggtctcttcgcttgtccttttctccaaacctggatgactacaacccggacatccctgagtggaggagggacatcggtcgagtcatcaaaaaatccctggtggaagccacaggggttccaggtcagcacatcctggtggcagtgctccctggcttacccaccactgctgaactctttgtcctaccctatcaggatccagctggagaaaacaaaaggtcaactgatgacctggagcagatatcagaattgctgattccacacgctcaaccaaaactcattacctgcccnnnn

SEQ ID NO: 12480 - DNA, 404 bp, Homo sapiens
  misc_feature 404: n = A,T,C or G
cgtactagcagaattcagctcctgcagtgataggactgaggtccctgtttccttgttggctatcaactggggtttgctctgggctcctggatactgctgcattccttgccaggtagtcctctccatctccaagccagcaacagcacataaacccctctcctgcttcgaatctcttacctcctcagcttctgacctctaaatacaggtttaaagggctctggcaaatgggtcaagcccactgacaataaattcccttctcgaagtcaactgtgccatatattaaacataatcacaggagtataagccaccctagtcacacagtcccatggattatgcaatatatactggtagtgggtctactggaggtcatttagaattctacctaccacaatttacaaggaaan

SEQ ID NO: 12481 - DNA, 341 bp, Homo sapiens
acggaaacaacacggagcctttgatcaccttggagggaagcatatccttcagatttacttcagaaggaatgaataccatcacagtgcaggtctcagctgggaatgccatcctacaagacacaaagaccatcgcagtatatgaggaattccggtctcttcgcttgtccttttctccaaacctggatgactacaacccggacatccctgagtggaggagggacatcggtcgagtcatcaaaaaaatccctggtggaagatccagctggagaaaacaaaaggtcaactgatgacctggagcagatatcagaattgctgatccacacgctcaaccaaaactcagt

SEQ ID NO: 12482 - DNA, 2626 bp, Homo sapiens
  misc_feature 1, 2, 3: n = A,T,C or G
nnnctactttgcgccaatcctacgagaactcccagaactccgcttccctagtccaacccaagccagagttgcccacacctaagatggcggcggggggcggagtcggcgcggccgcctctgggcgggaccgcggggactagacgtggccgcggggcggtgtcatcgcccccgccccgcccggtccagccagctcggcccgggggcttcgggctgtcgggccggcgctcccttctctgccaggtggcgagtacacctgctcacgtaggcgtcatgaggtctccggttcgagacctggcccggaacgatggcgaggagagcacggaccgcacgcctcttctaccgggcgccccacgggccgaagccgctccagtgtgctgctctgctcgttacaacttagcaattttggccttttttggtttcttcattgtgtatgcattacgtgtgaatctgagtgttgcgttagtggatatggtagattcaaatacaactttagaagataatagaacttccaaggcgtgtccagagcattctgctcccataaaagttcatcataatcaaacgggtaagaagtaccaatgggatgcagaaactcaaggatggattctcggttcctttttttatggctacatcatcacacagattcctggaggatatgttgccagcaaaataggggggaaaatgctgctaggatttgggatccttggcactgctgtcctcaccctgttcactcccattgctgcagatttaggagttggaccactcattgtactcagagcactagaaggactaggagagggtgttacatttccagccatgcatgccatgtggtcttcttgggctccccctcttgaaagaagcaaacttcttagcatttcatatgcaggagcacagcttgggacagtaatttctcttcctctttctggaataatttgctactatatgaattggacttatgtcttctacttttttggtactattggaatattttggtttcttttgtggatctggttagttagtgacacaccacaaaaacacaagagaatttcccattatgaaaaggaatacattctttcatcattaagaaatcagctttcttcacagaagtcagtgccgtgggtacccattttaaaatccctgccactttgggctatcgtagttgcacacttttcttacaactggactttttatactttattgacattattgcctacttatatgaaggagatcctaaggttcaatgttcaagagaatgggtttttatcttcattgccttatttaggctcttggttatgtatgatcctgtctggtcaagctgctgacaatttaagggcaaaatggaatttttcaactttatgtgttcgcagaatttttagccttataggaatgattggacctgcagtattcctggtagctgctggcttcattggctgtgattattctttggccgttgctttcctaactatatcaacaacactgggaggcttttgctcttctggatttagcatcaaccatctggatattgctccttcgtatgctggtatcctcctgggcatcacaaatacatttgccactattccaggaatggttgggcccgtcattgctaaaagtctgacccctgataacactgttggagaatggcaaaccgtgttctatattgctgctgctattaatgtttttggtgccattttctttacactattcgccaaaggtgaagtacaaaactgggctctcaatgatcaccatggacacagacactgaaggaaccaataaataatcctgcctctattaatgtatttttatttatcatgtaacctcaaagtgccttctgtattgtgtaagcattctatgtctttttttaattgtacttgtattagatttttaaggcctataatcatgaaatatcactagttgccagaataataaaatgaactgtgtttaattatgaataatatgtaagctaggacttctactttaggttcacatacctgcctgctagtcgggcaacatgaagtaggacagttctgttgattttttagggccatactaaagggaatgagctgaaacagacctcctgatacctttgcttaattaaactagatgataattctcaggtactgataaacacctgttgttgttcactttcctcataaaaattgtcagctctctctgacacttagacctcaaactttagcatctctgtggagctgccatccactgtataatttcgcctggcaactggactgaggggagtgtgcccaggcagctgccaagcactccctccctggcttcagggtcagagtgcccagcgtttatcagaggcagcatccaagcccagagccagtgtcgactcttcggctggtgcctttcctctgaggggctatcaatgtgtagataaagccctgagtaggcaagagcagtgagatccactgctatggtcttgatacatcctcaaactttcccttcccagcacagaggaatattggctggcatgcaacctgcaaaagaaaaatgcgaagcgggcggcgcaggaggtcaggcctgaaaccactcacggaggcagggcacagaacacgagtgacacgacgcgaggagggaccgatcaacaaaaaaaaggcgaggagcggaa

SEQ ID NO: 12483 - DNA, 2504 bp, Homo sapiens
  misc_feature 1, 2504: n = A,T,C or G
nctccatgccctaagtgccccgcgggcggcgggcggcgggactccatgtctagagtgccccgcagggcggctgggcggctgggactccatgtcctaatgtgccccgcggtcggcgggcgggggactccatgtcctagagtgccccgcgggcgggccgggctggggccgcggagccgatctggtccggtgactggtgcgctgcggcctcgtccgcgcgccggggcgggggcctagcgttcgacagcttcccggcggctgcgcgatggacacgccccgaggtgaccttcactctcgtcctatctggtgttcgccgtgtgcttcgtgttcactgcccaacgagttccacgcggcggggctcacggtgcagaacctgctgtcgggctggctgggcagcgaggacgccgccttcgtgcccttccacttgcgccgcacggccgccacgctgttgtgccactcgctgctgccgctcggctactacgtgggcatgtgccttgcggcttcagaaaagcggctccacgccctcagccaggcccctgaggcctggcggctcttcctgctgctggccgtgaccctcccctccatcgcctgcatcctgatctactactggtcccgtgaccggtgggcctgccacccactggcgcgcaccctggccctctacgccctcccacagtctggctggcaggctgttgcctcctctgtcaacactgagttccggcggattgacaagtttgccaccggtgcaccaggtgcccgtgtgattgtgacagacacgtgggtgatgaaggtaaccacctaccgagtgcacgtggcccagcagcaggacgtgcacctgactgtgacggagtctcggcagcatgagctctcgccagactcgaacttgcccgtgcagctcctcaccatccgtgtggccagcaccaaccctgctgtgcaggcctttgacatctggagctggaggcctgcataggctgcatgcagacacgtgccagcgtgaagctggtgaagacctgccaggaggcagccacaggcgagtgccagcagtgttactgccgccccatgtggtgcctcacctgcatgggcaagtggttcgccagccgccaggaccccctgcgccctgacacctggctggccagccgcgtgccctgccccacctgccgcgcacgcttctgcatcctggatgtgtgcaccgtgcgctgagtgggctggggccttgaggtgactctgtgtctccccgcaaagccacagggcagggaagggggtggctgggcctcctggctggcaaagggctctacttaaagcacatgatgtagagcaactcgcctctgccctgggtctgcagaaggctgaggacttttggttaaaagcaatcctcatgaaaacaccccaccctgcttggcagccagggtacaagtcctgggcacctcctctttgcctccctcctgcccctttcctgctggtgggggcagatcctgcacacacagacacagcgtctgcccccgagccattccctggagaccctgggtctaccccaggtggtcgtcatctgggccatttgccttacttctctggagcatacccaccctcagttacgtgccagacctggaccgcattctcctgccctgtcctggagctggcccctggctgcctggaggaccctgggtaggtcctgagggtgggatggagaagagggcactgctgtggtgtgggagcagtcctggggcttcctggtggctgtgaccagttgaggggctgttcctgggtggggtggcaatgggaggacaggtcagagcgccctcatttgtggggctgccctccgggtttctcatcctgtccttggtgcctttttctgcccaacaagtccagggaaggccgaggtctcagactcctgggtaggggtgggggtttgagttgaggaccaaagtgccatagcgacatccagaacacaagcccaccaggggtccagcccaggctacccactcccctagggtctcccaggctcagaaggggatgcacgccccctgtggtcaagcctctggtgggcgtcttgcccagttcctgatggttcaaggggaggggggatgttggccaggccccagggcacagccctgacacaggtgtggctactggaggggccttcatacctgcggccccaaagcccctgggcttggctgtttgaggcagaggtgatggactccgggggcctgacacttgggatttgggaggcttcctagagcgctcagcaggtgaaggcagcaggggccatggccgggagccaggcctagctttgaactgagtttcaagggctgccaaagaggggcagtgggttggggttgtttttactacaaaataagttacttagttttataaagacaaaccgattgtagccaaatgacaccatatttaataaaatttagtctgaagtgaaaaaaaaaaaaaaaaatgataaaactcgagggggggcccggtccccaattcgccctatagggagtcggattacaattcactgn

SEQ ID NO: 12484 - DNA, 876 bp, Homo sapiens
  misc_feature 873, 874, 875, 876: n = A,T,C or G
gacccacgcgtccgccatttctctcttccacggaactccagtggcaagggaatccagaaacgttttccttttgcctggagatgctaatccttagcctaagaataaggaaactggtccatgtaaggactgaccatcctttcacccatctgtctgcccacttgtgcatccatcccattttatccatccattcctccagttgtggacaccagatgactttcagctccccctaccccaaccagaactttgctgcaatggccattcttatatgcccctatggacccatgggacaattctctgggatacatgctaggagcagaattgctgaatcatagggaatgcatgtgcttagcttggctaagcaatgttggagtaaaagcttttggttttgcatcttctcagcacttctagggaggcaccaaaagggaggatggcactgactgagcccacctgagatagctcctagaccccagccctctgtgtcctcagaatcacacactgctgctcatcacttcagcttcccgaagatcatggcaatagcagcatgcctgtaactgtcccaagtacaaccaaaaattcttcctaaagagagggaaccaaagtcacacgggtcaccttgtccacctgtgtggacgttgctcatgttcacatacccttccttgcctccttcaaggcaggtctggccacaagcccacacctggctaatttgtaaaattttttgtagagatgggttcttactatgttgtccaggctggttaaggcctcctgggttcaagtgatcctcctgccttggcctcccaaagtgctgggattataggtgtgggccacccggcccagccttacccttttttaggaattaagtcctcccctccaaannnn

SEQ ID NO: 12485 - DNA, 1124 bp, Homo sapiens
  misc_feature 1, 1122, 1123, 1124: n = A,T,C or G
nacgaggtctaactataaatcaaaacccagaagtaatcaagaaaacaactagcaattagactacatacaaaaattttaaaatcctttctgatgaaaatcaccgtaaacaaaagataaatgacaaacagggaaaacatttgcaactctgttccctcattcagctactatttattcaatgcctactatatgccagctactcttctaggtgtttgagacatcatagtgaacaaaacagagagttaattgccctaatatacaaagagtttctagaaatcagtttttagataatcaacagcaaatggtataaacagacagcttacagttaaggaaacaagaaacccaataccatgtgaaaaaattttcagccttgcttataaaaagtgacgaaacaagatgaaactacactgaaatacaaattttcacatatcagattagcagaaaccccaaaattgtattgctcacagtgctggtacaagtgtggagcatgggcagcctcatgtgttactggtaggtggtaatgacacatgaataaagatataataggctaaaaagtatgttgttttactaatagttaattacaatatcaaaggaagatacaatgctaagttggtactattgtagtagctatcagagtgcagtttaccaaacagcaatttatcctacacataaactgcagacctaaacaataatacatatacatagttattttttgcaccattgtttgcaaacaacctaaataccagtcacctctatggcattcctcctccaaaatttgtattccctcatctaaatcatgagaaaagacaaaaccaaactgaaaaaggacttctacaaaatacatcaccagccgtcttcaaaagcatcaaggtcatgaaaaacaaggcagaaaaactccagagtggaggagaccaaggaggagtaggttctggagaagacaaaggacacttggggcaatctaaagtctggagttcacttaacagtatcaacccaatgttaatttcttagtttgatgaatgcatcgtgattatataacattagaggaagctggatgaaaggtctcaacctcagcaccactgacattgagggcagatcattcttggttgtggagactgtcctgtgcannn

SEQ ID NO: 12486 - DNA, 927 bp, Homo sapiens
  misc_feature 1, 926, 927: n = A,T,C or G
ncaccatgttgcccaggctggtcttgaactcctgactgcaggtgatccaccctcctaaagtactaggattacaggcgtgagccaccgcgcttagcctgtttttagttttctaaagcaaggtccctattgaaaggcaggccataaacagtgatgactaagaaaaatcctggaagagcctgagaaggaaaaagatgaaatataatgccagagaatgaagttagtcaaaggaacagtgtgaaaacaataaataaatagataaatgaaaatgttatttgacagagagatgaaactagactaaaccattcagctgcctttccactgtaacaaatgtaatttcatctttcagaagtgtaataccttgcagcaccagagctgaatatgaacatattaccaaaaatagattaccaggcatagatagcattccttttttaagtttgaattgaccacttgcgactctcgacctgatgtatgtatgtgcttgcctgggagaaggcagcggacgcatcacttgcacttctagaaatagatgcaacgatcaggacacaaggacatcctatagaattggagacacctggagcaagaaggataatcgaggaaacctgctccagtgcatctgcacaggcaacggccgaggagagtggaagtgtgagaggcacacctctgtgcagaccacatcgagcggtgaggcacaggacgagcaggggcgggaaatggggaagcaggtcaagaaatatttccgcaaatccatctttcctttgacatgccatttgaggataatttgcagtgtttcagctaataaccctaagataatttacacattattggttgttaaaactttttttaatgtcaagttttaaatttttcagaaaaaaaaaaaaaaaaaaactcgagggggggcccggtccccaattcgcccctatagtgann

SEQ ID NO: 12487 - DNA, 432 bp, Homo sapiens
acgtctgttcagttttctttgtttttgagcaaagtagtcagcccgggcagtgctagctcgcgattccaggatgtagttaacctagaaacaagagggcacagcccggtcaccttgccagccgctccctacccacccagggcatcggagggggtggcagggaaggccctgacctgggccgggtgcctcagggccaggtgctgtcgtgtggaaggagtccagtcatcacagcaacctggcagcggctgggcccagagccgctgctctacgatgggaaaacagaggcttggagaagccaagtggccagtccaggcttcccagtcagtgagcggcgagctcttcaggttccggagcccatgctccctcctggcgtgagccactcccggaaggctgtgccctgggctgcctggctatgcctcccacctgctgtgtgac

SEQ ID NO: 12488 - DNA, 1095 bp, Homo sapiens
  misc_feature 1, 2, 1094, 1095: n = A,T,C or G
nnaagaataaggagtgttgtttcccccttggatatcagtgtgtttcttattaagtctttgtgacgtctagtcggcgttgttaacgtcgttatatgtgcgatgtatgtatgtttgtgtcctaataatatgttaacataaacataacaacacacatattatttttctaccccttggcaactgaaaatgaagttaccattcctaggccaaatttttagacaaagctttctaaaaccatctttataaagtaaattcagatatgcttacaataaaaagacataaaagattcatcctgagatgaattctgagtcaataactaaaaaccatttctaccagtgcatcactaccatgtaatccattctacgcaagctctacaaatattgagtcaaatcctgtctgtcagaaaatgaagacccaataagtttgccgaagtattcagtacaagaggccatttgtcttgcctttttctgacatgtgcatactataaaatcacaggtagccaacatttagtatcagtaaaaaacaactacgtttgttcacctgtttggcatagggagaaaacaatgtatctcatagcattaaatgatacagccttaacacatatgatgctcatatttgcaaagttcccaaatgttgagaagttctagtgaaaagtcatactattgtgcaaagatgaaaatttggagccaatgtctgtattcaaaataaccaaaatatattttaaagcaaaatatatcctgatactactatagattctaggaattgtcctaaaagagtaaagtgttgtttcctttctgaacatgaataacatcaaaggaagaacccagttcttaagacttaagtaggaaatttatagaaatttgatttataccagtagtaataacattcataaggaaaaactattaggtaacaattttctccaagaagaggatcagattacttaaaattgttggagaattctggttgtttgtgcaataatcatagtgatttacattgcttttcttctttcagagcaataagaaagttatttggggtagtacctgcccgggcgcccgctaaaattatgtatatatacatcactcacacggccgcccgann

SEQ ID NO: 12489 - DNA, 988 bp, Homo sapiens
  misc_feature 1, 2, 3, 4, 5, 6, 7, 8, 987, 988: n = A,T,C or G
nnnnnnnngcgcccccgccgcgctttgatgtgtttctcgttctgtgtttccgttgtgggtgcgcgttggtgtgtctcctctgggggttttgtgtgcccgttgtcctctgcgacgtgcctccgcctgtgtcttctgggggtgtgttgtacctctgtctctcgtttccggttgtgtgcccctccgtgcaccccgtgatggccctgtgtgtcctttggcccttggacccgtctggagtaattcttttgggccctaacaggttgcctgtggccttctggaccttgtgcctttcccttggcatgaccaagccggtttctccctggttcatcgaacccgtaaccaccctcgacatctgggccatacagtcaatgtaccaccaggatggagtccacgggttcatggcaacattcaggtatgtccagtggcacagctggcacgtgctcagactcggcatgagaacaaaaccggaacagtgctttcccacgtgcccctgcctcccacctggccctgaacagtaagtccagaggcagagacgtggggcaagtggaaaagaatctctgcaatagctagcctcagcacaggaagaaacacttccacccatccacaaaatctgggctgaagttctagatgcatatggcctacctttgggtatgaaccttctaataccttgtgatctgtctcagtggcgtctggcagaaaagctccacgaaaggggcaaagggacagaagagcaggcagtggcagtttccaggtaacagtgctgccacccaggtgaccatggccatcctaggagagaagtctctggatgagaggaggcccccagccagtcactccagggttctccttcccacccgctgctcgccacgggtggaagggcttggccctgggaggtttggggagtgtcccgtactgcttgggacccatggatcagtgctcggctccaccacccaagcccccacccgccctcagtctaggctccccctcgtgccnn

SEQ ID NO: 12490 - DNA, 384 bp, Homo sapiens
  misc_feature 1, 2, 3, 384: n = A,T,C or G
nnnggagctcaccgcggtggcggccgaggtacatttttaacttctgatgattaccctataaagaactattattattcctaattttactaatgagaaaacaggctttgaaagattaaggagcttgcccatggtcacagagctggtaaattgtggaatcaagatttaaatccagatctatctgctcatgtttatctattcatcagtttggtagaactaaaatatttgaaaaaccactagtcattttttaaagtattaatgcttacagagttaatttatcttttaaagggaaaacacatagccattctactctagtggatggaaatagagtgttctaatttaaacttatggtctagaaagccaaataaatactcttgatgtcaggcn

SEQ ID NO: 12491 - DNA, 2351 bp, Homo sapiens
acggtgatctacatgccccagcctgccccgcgaagggaagaagtcaggaggccccgcttcgcgctaacgcttgcgatggttgaattcccctcctcacgccagcctaggagaagaagttcgtagtcccagaggtgaggcaggaggcggcagtttctggcgggtgagggcggagctgaagtgacagcggaggcggaagcaacggtcggtggggcggagaagggggctggccccaggaggaggaggaaacccttccgagaaaacagcaacaagctgagctgctgtgacagaggggaacaagatggcggcgccgaaggggagcctctgggtgaggacccaactggggctcccgccgctgctgctgctgaccatggccttggccggaggttcggggaccgcttcggctgaagcatttgactcggtcttgggtgatacggcgtcttgccaccgggcctgtcagttgacctaccccttgcacacctaccctaaggaagaggagttgtacgcatgtcagagaggttgcaggctgttttcaatttgtcagtttgtggatgatggaattgacttaaatcgaactaaattggaatgtgaatctgcatgtacagaagcatattcccaatctgatgagcaatatgcttgccatcttggttgccagaatcagctgccattcgctgaactgagacaagaacaacttatgtccctgatgccaaaaatgcacctactctttcctctaactctggtgaggtcattctggagtgacatgatggactccgcacagagcttcataacctcttcatggactttttatcttcaagccgatgacggaaaaatagttatattccagtctaagccagaaatccagtacgcaccacatttggagcaggagcctacaaatttgagagaatcatctctaagcaaaatgtcctcagatctgcaaatgagaaattcacaagcgcacaggaattttcttgaagatggagaaagtgatggctttttaagatgcctctctcttaactctgggtggattttaactacaactcttgtcctctcggtgatggtattgctttggatttgttgtgcaactgttgctacagctgtggagcagtatgttccctctgagaagctgagtatctatggtgacttggagtttatgaatgaacaaaagctaaacagatatccagcttcttctcttgtggttgttagatctaaaactgaagatcatgaagaaggcagggcctctacctacaaaagtgaatcttgctcattctgaaatttaagcatttttcttttaaaagacaagtgtaatagacatctaaaattccactcctcatagagcttttaaaatggtttcattggatataggccttaagaaatcactataaaatgcaaataaagttactcaaatctgtgaagactgtatttgctataactttattggtattgtttttgtagtaatttaagaggtggatgtttgggattgtattattattttactaatatctgtagctattttgttttttgctttggttattgtttttttcccttttcttagctatgagctgatcattgctccttctcacctcctgccatgatactgtcagttaccttagttaacaagctgaatatttagtagaaatgatgcttctgctcaggaatggcccacaaatctgtaatttgaaatttagcaggaaatgacctttaatgacactacattttcaggaactgaaatcattaaaattttatttgacataaaaaaacaacacacaccaacaaccaacaacacaacaaatcacaacaccaaaccacaacacacaacacaaccacaacccaaacaccacaccgactcaacgcaaaaaaacaaaaacaaaaaaggggggccacatatatacaaaatctcgacagagggagcacatattatgaccaccagtttttgttaaaaagaggcccaataattatgaaatttatataaaaaaaccagaacagcggattatacacacagcgctggaagaaacacattatatggactctcttgtggaagacccccaatacgaggggcgacacacagcggaaaaccaccacaaataattagagccgggagataaaacaaggaggaatgtgttgaaaccgcaattttgccgcgaaaagtgctccggattttttattaatagacgggggccgtggttcattaacacactacgtcgttaccgctatcgctgcgcgatcgggtgctgatgccgtctcgcctctcgggatgtgagtacaaccccagacacaacacgagtagtatgtagacttgtaccgaacaacgagagcagctcactgaacaacacagagagaggacgagatcaggctac

SEQ ID NO: 12492 - DNA, 2844 bp, Homo sapiens
cgatcccgctctttctgcggctgagagcagagacatgaatctgtgtcaataacacaccactgtgacctcaaagggattctcataaatacagctgtccaatccccgcacagtaaacatgcaagccacaacaagatgatcacctccctcagtccaccctctaagagacattcaagctgaactatcacaattcttaatcagttacaatttacaaacagataagcttaaaataaacaatttacaaaatttttgaagcataccttaacatcttgttttgcagttaaacagtggaaaagtatttctcctacactaaaaaaaaacttgcttacacacaactgaaaatagaatcttacttgataatacaaaagctaccatcagaagaaatcccttcaggatcattaagccacttcctttgctctgcagtttctatagtagttttaaattattattaaatcacctgaaaaaaattccaaaagagaaccacacactaccatatccaaacaacttttgcatttcccataattgtagttaatgtcagcccaggtgtagaaattgaacgttcaatttctacacaatttacatcacaacatgtaaattttagcagtaacatctgattctaacagcacatcatgctattcctttcatagagccttcagagattcaatgctaaacaaatttccttagttggcatcaaggcactgatcactttaggaggcttttaagaaattatttaaagatgcaaatgcctctgagtgaagtgtactgtactatcccatcactgaagcccacaggaacaagtcctacaattttaaaaaggctcgatggaaaaatttctcaatcctgaaatcccctagggaaggggtcaggagaaagtgccatggttgatatttaagaactccacagctcttaaaaataagcacttatccctaacatgcaatactgcagatgcaagttaaacttatctgttaaaagctgcctgctgttttctgctcccagatgaaatgaagcaactcttctgataacgaagagatacctgtctgaggcaaacgaaacattggcacacagcacagcctcctcaatccacttgatcccagctcatctctcatttatttcggcttcttttattccaggattaatgtagtgtaacattttcattttttttcgcttttattctgcttttgtaaaagcagtattttgagatggacattgcctcttcattgtatttctcatcaattcattatttttgtggttatagcttgacaagcaattaactttaaaatggtagattccgtaactttaaattggtagctttcatttgcttaaaatttttttggcatatgcagataatgttctcatcagtagtaagaatctcagggttatgcttattccccaatggaggtatgacatataatcttttctgcctttacttatcaattcaccaaggagctgttttctctgcatctaggccatcatactgccaggctggttatgactcagaagatgttatctgaaaaaagtctatagaaaaaaaaaaaagtttcccctccctcatcaacaaaagcccaccctctaagagacattcaagctgaactatcacaattcttaatcagttacaatttacaaacagataagtttaaaataaacaatttacaaaatttttgaagcataccttaacatcttgttttgcagttaaacaatggaaaagtatttctcctacactaaaaaaaaacttgcttacacacaactgaaaatagaatcttacttgataatacaaaagctaccatcagaagaaatcccttcaggatcattaagccacttcctttgctctgcagtttctatagtagttttaaattattattaaatcacctgaaaaaaattccaaaagagaaccacacactaccatatccaaacaacttttgcatttcccataattgtagttaatgtcagcccagtaggccagaccaacccccagttcaatactttccttccccaaaagctctatactttgaaggaaaacagatacagtatcaaattatgacactttccttgcccaaattaatgcactggtacacccagtggctcatatttaacttcccccagcttcccaattcaaactggggggaaaaaaactaaatcattgggagttacttgccaacttggaagttgatatttctttactttttccattctaagactttaagttctctggcatgagtttatctgcaatcataaactaaacaattacctaaacccaccccaccaatcccaaccgtaacaggccactgccaactaattgccaatatttgcccctcccctttaataaaacttttaagaagtcacattattggaaaacttaacttcaacatttggcctactcaagctcttctgaagttctcctgagatgactgaatatgaaccaaagctgcactgtgctgtacttttcagcttcaactgggaatactcttccaaggataaaagcagctccagtccctgaaggtgttcgtgccaacagcacagcggtacactccttctctaacccagtttgtcaatagtactatagcatctgtggaaaatcttagaaaaaaacattttctcccccaccctctctcttccctgttaagaccatcccaaaatgcttcaagtaaaaaataacaagtttaaggggttaagcacttttaaagtctgattaagggggtggggggaaaaaaagagtaactaccagccatttctgtcaatggacatctcttcgcacagacctcaacgtgagtactcctctagtttctataaactgtaaacctgtggtggtctgattatcctgatattggattttcttcttttatatacagc

SEQ ID NO: 12493 - DNA, 1630 bp, Homo sapiens
  misc_feature 1630: n = A,T,C or G
cgcgtccggttctggatgatggaacagtgtacacatgtggatgtaatgatctaggacagctaggtcatgaaaaatccagaaagaaaccagagcaggttgttgccctggatgcccaaaatattgtagctgtttcatgtggagaagctcatacgttagcgctaaatgacaaaggccaggtgtatgcttggggtctcgattctgatggacagcttggcctggtaggatcagaggaatgcatcagagtacccagaaatattaaaagtttgtcagatatccagattgtacaggttgcttgtggttactatcattcacttgcactttctaaagcaagtgaagtcttctgttggggacagaataaatatggccaattgggtttaggtactgactgtaaaaagcaaacttcaccgcagctgcttaagtctttgcttggaatccctttcatgcaagttgcagcaggaggagcccatagttttgtactcaccctttctggagctatctttggatggggacgcaacaagtttggtcagctaggtcttaatgatgaaaatgataggtatgttcctaatttactaaagtcactaagatctcagaaaatagtttatatttgttgtggagaagatcatactgctgctctaaccaaggaaggtggagtgtttacttttggagctggagggtatggtcagttgggccataattctaccagtcatgaaataaacccaaggaaagtttttgaacttatgggaagcattgtcactgagattgcttgtggacggcagcacacttctgcttttgttccttcatcaggacgaatttactcttttgggcttggtggtaatgggcagctgggaaccggttcaacaagcaacaggaaaagcccctttactgtaaaaggaaattggtacccctataatgggcagtgtctaccagatattgattctgaagaatatttctgtgtaaaaagaattttctcagggggagatcaaagcttttcacattactctagtccccagaactgtgggccaccagatgacttcagatgtcccaatccgacaaagcagatctggacagtgaatgaagctctaattcagaaatggctgagctatccttctggaaggtttcctgtggagatagccaatgagatagatggaacgttttcttcctctggttgcctaaatggaagttttttagctgttagcaatgatgatcactatagaacaggtaccagattttcaggggttgatatgaatgctgctaggcttttattccacaaacttattacactgatcatcgcagatatctcagcaggtggcagctagtcggaaaagaatcttattcctaaaatggactagtcttttaccgatgtggaagcatgaggttcatcttactctaacagaatgttcccggttagtggttccacatttccaaatagaattccttggtgccccctgtgaaccttaaaggggcccggacgtccacgaaacgcggtctggtgaccccatcccagaaaagaacctcaggcacgggcgcatcgggacacagaaggcgtcccctgtaaagattcccgctccaggccaagcgaacacaggacgcaccgcgcgacacatcacatatgtcacaacaaatatcgtcn

SEQ ID NO: 12494 - DNA, 298 bp, Homo sapiens
  misc_feature 112: n = A,T,C or G
acccttccagtgcaacctccacgatagcaccctcattgggcttagcatagccttcaccgcgagtctgtattctgcgaatgattccgccatcttcctcttccgtcagatcttnctcccttaaaacattcaaacaaacttccacccttaaaattacaagccgtggcattggggggaatctttggaggactgcctgctgaaccgtaggcatattctggtttgcaggtgatgtggcacacctcccccaccttcatggtggctatggcaatgtcccaagccttgatgacctccccttttccca

SEQ ID NO: 12495 - DNA, 5818 bp, Homo sapiens
  misc_feature 1, 2, 3, 5792, 5793, 5794, 5795, 5796, 5797, 5798, 5799,5800, 5801, 5802, 5803, 5804, 5805, 5806, 5807, 5808, 5809,5810, 5811, 5812, 5813, 5814, 5815, 5816, 5817, 5818: n = A,T,C or G
nnncttgcggccgccagcacccgcgttgccgcggggccgctccgaggagcctgagagacccacggaggcttcgcgggaagacgcggcggcggcggcggaggatgagcctgcagagcgcgcagtacctccgattctaagctgggtccagctgaagtctggacatccaggcaggctctgcaggacctgtaccagaaaatgctagttaccgatttggaatacgctttagacaagaaagtagaacaggatctctggaatcacgcctttaagaatcagatcacaacactacaaggccaggcaaagaatcgagcaaatccgaatcggagtgaagttcaggcaaacctttctctgttcctagaggcagctagtggcttctatactcagttattacaagaactgtgtacagtatttaatgtagatttaccatgccgtgtgaagtcttcccaattgggaattatcagcaataaacagacgcataccagcgccatagtgaagccacagtctagctcctgttcctatatctgccagcactgccttgtccaccttggagacattgctcgatacagaaaccagaccagccaggcagagtcctactataggcatgcagctcagcttgtcccctccaatgaagcattgctgtgaagttccctttcccagctgcctccactaatctgcaaaaagcactttctaaagcactggaaagccgagatgaggtgaaaaccaagtggggtgtttctgacttcatcaaggcctttattaaattccacggtcatgtgtacctgagtaagagcttggaaaagttgagccctcttcgagagaaattggaagaacagtttaagaggctgctattccaaaaagctttcaactctcagcagttagttcatgtcactgtcattaacctgtttcaacttcatcaccttcgtgactttagcaatgaaaccgagcagcacacttatagccaagatgagcagctatgttggacacagttgctggccctctttatgtcttttcttggcatcctgtgcaagtgtcctctacagaatgagtctcaggaggagtcctacaatgcctatcctcttccagcagtcaaggtctccatggactggctaagactcagacccagggtctttcaggaggcagtggtggatgaaagacagtacatttggccctggttgatttctcttctgaatagtttccatccccatgaagaggacctctcaagtattagtgcgacaccacttccagaggagtttgaattacaaggatttttggcattgagaccttctttcaggaacttggatttttccaaaggtcaccagggtattacaggggacaaagaaggccagcaacgacgaatacgacagcaacgcttgatctctataggcaaatggattgctgataatcagccaaggctgattcagtgtgaaaatgaggtagggaaattgttgtttatcacagaaatcccagaattaatactggaagaccccagtgaagccaaagagaacctcattctgcaagaaacatctgtgatagagtcgctggctgcagatgggagcccagggctaaaatcagtgctatctacaagccgaaatttaagcaacaactgtgacacaggagagaagccagtggttaccttcaaagaaaacattaagacacgagaagtgaacagagaccaaggaagaagttttcctcccaaagaggtgagaagggactatagcaaaggaataactgtaactaagaatgatggaaagaaggacaacaacaagaggaaaactgaaaccaagaaatgcaccttagaaaagttacaggaaacaggaaagcagaatgtggcagtgcaggtaaaatcccagacagaactaagaaagactccagtgtctgaagccagaaaaacacctgtaactcaaaccccaactcaagcaagtaactcccagttcatccccattcatcaccctggagccttccctcctcttcccagcaggccagggtttccgcccccaacatatgttatccccccgcctgtggcattttctatgggctcaggttacaccttcccagctggtgtttctgtcccaggaacctttcttcagcctacagctcactctccagcaggaaaccaggtgcaagctgggaaacagtcccacattccttacagccagcaacggccctctggaccagggccaatgaaccagggacctcaacaatcacagccaccttcccagcaaccccttacatctttaccagctcagccaacagcacagtctacaagccagctgcaggttcaagctctaactcagcaacaacaatcccctacaaaagctgtgccggctttggggaaaagcccgcctcaccactctggattccagcagtatcaacaggcagatgcctccaaacagctgtggaatccccctcaggttcaaggcccattagggaaaattatgcctgtgaaacagccctactaccttcagacccaagaccccataaaactgtttgagccgtcattgcaacctcctgtaatgcagcagcagcctctagaaaaaaaaatgaagccttttcccatggagccatataaccataatccctcagaagtcaaggtcccagaattctactgggattcttcctacagcatggctgataacagatctgtaatggcacagcaagcaaacatagaccgcaggggcaaacggtcaccaggaatcttccgtccagagcaggatcctgtacccagaatgccgtttgagaaatccttattggagaagccctcagagctcatgtcacattcatcctctttcctgtccctcaccggattctctctcaatcaggaaagatacccaaataatagtatgttcaatgaggtatatgggaaaaacctgacatccagctccaaagcagaactcagtccctcaatggccccccaggaaacatctctgtattccctttttgaagggactccgtggtctccatcacttcctgccagttcagatcattcaacaccagccagccagtctcctcattcctctaacccaagcagcctacccagctctcctccaacacacaaccataattctgttccattctccaattttggacccattgggactccagataacagggatagaaggactgcagatcggtggaaaactgataagccagccatgggtgggtttggcattgattatctctcagcaacgtcatcctctgagagcagttggcatcaggccagcactccgagtggcacctggacaggccatggcccttccatggaggattcctctgctgtcctcatggaaagcctaaagtctatctggtccagttccatgatgcatcctggaccttctgctctggagcagctgttaatgcagcagaagcagaaacagcaacggggacaaggcaccatgaaccctccacactgaggccaaagtggcaacctgggaatgaaggctccataaaccatggcatgttgggtttgcaggactggcccacacagtcccctgcaggtggcagccctcttttctgtttctcgctgtcaagagggtgtaagtattccaccagcccgctgagtgtgcacgaaatgttcgcagtgcaacaaaaagaaaaatccatcaggaactctccgtccccccggggccttccggagggagagagagaggaactgctgtttatctcactcagttacttggtatcaccgcctctcaccttctccatcgtgcatgtccccagccacatgggaagtgaaagctgagaagggaaggcagatgggagaagccaatgggaacttctcagtccttttttcctctttggggaataaaataggaatccattaatgattgctttgctgactgagaatgtagttgaaattattcttaaacatcttttattattattactctcagtagtaaaatatcacactgaattcttccatacacaggtgtgcttctagtcagtgtgtagcaaggaaagccccgttcactgctcctgtgagaggttggtggtgacaggatggggaaccgacctcttcagccagtggaaatgttccataagggagagttcaaggcctgtcagaaggctctggtaggccttcctctggccaggagactccagcagggaatgcccttcactctgtaggtgctcgagccccaatcgaggatacagtgtgggtggtggtgctgggctggactagcaggtagactgctgtaggatttcaaattacgtttttgattcctgtacattttacagtcgcacagcaagcagtctcacagaaggcaggctagtccattcacagcctgacacgttctaataggtagaagctttcagtgtggttattttttctttggttggtttttgtgcccccattctacttcccaccctcctgccccatctccatcccttcttttacccaatgctgtatgctagtaattgtttttattcctaatgtgtgcaacatcacatctccccaagaagcaacagcatggggtccagcagttggggcccaaaagacagtctgaagaggaaggaagcagcagtatctgcgtagcccacagagggcccaggcccctgcccagctgcagtctcccagcctccactttcagagtgaaattcaaggcagcacggacatgtgcccatcaggcacagaagaaaacacgacgtcgtccattttggaagagacgaaagaaaggaaaataaactctttgtatgatatttattaggaggaaagaggactgaaaatgttcttgtgtagaaacagaaggacagcatttctgttagtcatttcctggaaaagtaatattttaaggggaaattatggaaacaatctaattgttcaattgctgtgctagtggtagggtttattttctgggaggtctctcctttgtgtgtctgtatgtttgtgtacacacacgtgcccatctgctgtcccagaggggaggggttgtgtgtgcgagtgtatggagttagtgtggaacttaagagctggaagacagctgtagagcaaagcacatccaggagccccagttgtcactgcagtctgggcaaccccagcaatgaaaaggggtgagataacgctcattgctcttcagagagagtggttggagccccccccgccccgtatgcttacattattgctcttttagtttgacatggtgtttgggttttgtttttttgaaaggtctgaaaaggtgaagccccctacccaatggcaatatgaaaccttttgtgcttctcttcagccccttccctgtgtccacctttctctcctcttcccaagcctttttcctactacctttacccagtttgtgtgtttgagctctgcattcaggcagctgcaacattccagtgtttgaactgtcactgattcttgcgccctagacaagctaaccaggtttaccatctcactcccagtaatacccagctcctatctaaagccccattctgcatgagaatttggtgtttggaatgttttctgactcttggggcgggattcctcgccttatcatcctcactgtggagtaatgagggggaggagaatctttatcagaaactggttttgtgtagtaaactttcttttgtggttttttgttttgttttctgggttttgttttttgtttttgtctgtgcaagacctgcagctgctgaaaatcagctttgcctttaattaaaccatgttctctccaaccaaaaaaaaaggggggggggataaaataatgagggggtaagatcccgggggcattggaccctttgaagggccaggagataaagggggtaacggggaagttgttggaccttggatggcccaccggaannnnnnnnnnnnnnnnnnnnnnnnnnn

SEQ ID NO: 12496 - DNA, 2487 bp, Homo sapiens
aacacgccctcaagacctgggattggacacatcaagggcacccaattactgaggaagaacaggcagcaaaattgaaagctgagaagatcagagttgccctagagaaaattaaagaggcacaagtgaaaaagctggtgatcagagtccacatgtctgatgacagttctaaaacaatgatggtggatgagaggcagacagtaagacaagtactggataacctgatggacaaatcccactgcggttatagtttagactggtcactggtagaaaccgtttctgaattacaaatggagagaatctttgaagaccatgaaaacttggttgaaaatcttcttaattggacagagatagccaaaacaagcttatatttatggagcgtatagaaaaatatgcacttttcaaaaacccacagaattatcttttggggaaaaaggaaacagctgagatggcagatagaaacaaagaagtcctcttggaggaatgtttttgtggaagttctgtaactgtaccagaaattgaaggagtcctttggttgaaggatgatggcaagaagtcctggaaaaagcgttattttctcttgcgagcatctggtatctactatgttcccaaaggaaaagcaaaggtctctcgggatctggtgtgctttctccagctggatcatgtcaacgtttattatggccaggactatcggaacaaatacaaagcacctacagactattgtctggtgctgaagcatccacaaatccagaagaaatctcaatatatcaaatacctttgttgtgatgatgtgaggacactgcatcagtgggtcaatgggatccgcattgcaaagtatgggaagcagctctatatgaactaccaagaagccttgaagaggacagagtcagcctatgattggacttccttatccagctccagcattaaatcgggatccagttcttccagcatcccagagtctcagtcaaaccactccaatcagtctgatagcggagtttctgacacccagccagcaggacacgtccgttcccagagcattgtgagctccgtattctctgaagcctggaaacgaggcactcagttggaagagtccagcaaggccagaatggagtctatgaatcggccctacacttcacttgtgcctcctgcagcagcagaagacggctcgaagcaacatggacaacatgttcgagagctacatcaacaaccttaggcggcagctggagactctgggccaggagaagctgaagctggaggcggagcttggcaacatgcaggggctggtggaggacttcaagaacaagtatgaggatgagatcaataagcgtacagagatggagaacgaatttgtcctcatcaagaaggatgtggatgaagcttacatgaacaaggtagagctggagtctcgcctggaagggctgaccgacgagatcaacttcctcaggcagctgtatgaagaggagatccgggagctgcagtcccagatctcggacacatctgtggtgctgtccatggacaacagccgctccctggacatggacagcatcattgctgaggtcaaggcacagtacgaggatattgccaaccgcagccgggctgaggctgagagcatgtaccagatcaagtatgaggagctgcagagcctggctgggaagcacggggatgacctgcggcgcacaaagactgagatctctgagatgaaccggaacatcagccggctccaggctgagattgagggcctcaaaggccagagggcttccctggaggccgccattgcagatgccgagcagcgtggagagctggccattaaggatgccaacgccaagttgtccgagctggaggccgccctgcagcgggccaagcaggacatggcgcggcagctgcgtgagtaccaggagctgatgaacgtcaagctggccctggacatcgagatcgccacctacaggaagctgctggagggcgaggagagccggctggagtctgggatgcagaacatgagtattcatacgaagaccaccagcggctatgcaggtggtctgagctcggcctatgggggcctcacaagccccggcctcagctacagcctgggctccagctttggctctggcgcgggctccagctccttcagccgcaccagctcctccagggccgtggtttgtgaaagaagatcgagacacgtgatgggaagctggtgtctgagtcctctgacgtcctgcccaagtgaacagctgcggcagcccctcccagcctacccctcctgcgctgccccagagcctgggaaggaggccgctatgcagggtagcactgggaacaggagacccacctgaggctcagccctagccctcagcccacctggggagtttactacctggggaccccccttgcccatgcctccagctacaaaacaattcaattgcttttttttttttggtccaaaataaaacctcagctagctctgccaaaaaaaaaaaaaacctcggccgcgaccac

SEQ ID NO: 12497 - DNA, 956 bp, Homo sapiens
  misc_feature 942, 943, 944, 945, 946, 947, 948, 949, 950, 951, 952, 953,954, 955, 956: n = A,T,C or G
tgacattgtcattgctattatctgattaacaatgtaccccaatgttgtacatgtatgaaaatgggtgtactgtatactttaacatgccccatactttgtattggagagtacaataatgtaaatcctaaaagcaccactattttagcataataaaagaaagtccaaagagctcctatatagactactccagataacttcgcttctttgatacttgtagcttatgtaattttttttaagaaattcaaggtcattattatgtacaaaataagcgctttgattaacacagctatatagtttttttaatttttaaaaaacctgtggagacggtgatcttgtctttaaaacatgatagtcctttcagtataatgtcttagattaaagacgttgcctttaatatctgttgggaaggaaatgtccagacttttcaaatctcttattatatgtttccttttttgtttacatagggaacaatgtttatagtcgtgtgtacagtgggggtctacaacaagaagtgtatattttcaaacaattttttaatgatttaacaattttgtaaatcattttcaggcttctgcagctgtagattctcactgtgaatcccttgcttgtcatgcataagtgtattgaataccaaatatacaggtttagtattttggctgttagtgattgtttcacatgtgtaacgtttggtgggaagttaaatggggcgagtactgtgggatttgatgcgggaagaatttatcattgtaatgggcacaagggcaattgggtaatatgggttattacaagctgctgttgatgctaagtcgggttaaatggggtctttccaggggcggttaatggacatttcaattgggggcatgaaaacttagggttttaaaaaaaggggcagatcgggaaaccattaagcgagagaaaagggaagaaagtaatgtgaaaaannnnnnnnnnnnnnn

SEQ ID NO: 12498 - DNA, 299 bp, Homo sapiens
acttttttttttttttttttttttttttgctctaatctttgtttatagaaggagtaaataatcgaaacaaagaacattccagtatgcagtgctgatggttacacgataaggcagggccaggcaccaacactaagactggctatctatgaaggtgaaaacacataactttgataatgaagctgtctcctgatttatagaagctaggctgtcttaactcttgggattcagagccaaccaaggtctggagaaaactctgcctggagggagagagccgaatatgcagccaggatttaaagaga

SEQ ID NO: 12499 - DNA, 1002 bp, Homo sapiens
  misc_feature 1, 2, 3, 4, 5, 6, 7, 8, 9, 10, 11, 12, 13, 14, 15, 16, 17,18, 19, 20, 21, 22, 23, 24, 25, 26, 27, 28, 29: n = A,T,C or G
nnnnnnnnnnnnnnnnnnnnnnnnnnnnncatgtatatatccacagtatcttatttttcacagttacaaaaaataaaagttgcattcaactcagtcacctgataagccacgctgaattcctcactgtatggatttggaggaagtgggagtacaaagtcttttcaacaacctggattttaagtttctttcttcaatgtctgccctctacatggaccttccagaatctttctgcaatgtgatcatgctctgagatgatggcagaaaggaagcattggggtgggatgaggcaggctgggctggggcttctttttccagccagctttaggagggctgatcgaacccagtctttttaatgttatattttaaggcagtctgaatttcaatcaaatgcccacacctccagatcctgaactatgaagtcttcctttttggaaagaatatcattattgaaagtgctgcaagagttgcttcgtccgtggtataaatcagcatctagccataaaccaaatcgtccccctccaccaccaagttctaaagaacttatgtctccattgataaagtatgaattttctccactccacttaaagaccttggggaagaaacacaaaaaagaaaacagacattttaatctggagaattagcaatgaggaaatatgaaatagtatctatatgtaaaagggaaccacctcaccccattgacggaggaagttcctgactaccagacctggcccacaccaggatgagatctcccaaggggttacgaaggaaggaagacctttcagacacgtggtggctctgacctgcgactctctggatcccagcctgagcagcccagaaggccagggacgctaagcagtttgcgagctacagtcataaagggctgacccagcccggagtcagttcaggagaagttacaggacagctagctgccccaatgcctatccccttccccaactgaggacactgtgacacatggccgttggatatttctcctatctaggt

SEQ ID NO: 12500 - DNA, 2834 bp, Homo sapiens
  misc_feature 1, 2, 3, 4, 5, 6, 18, 38, 39, 41, 43, 45, 47, 49, 50, 51,52, 55, 57, 59, 62, 63, 66, 67, 68, 69, 70, 71, 73, 74,76, 77, 78, 79, 80, 81, 82, 83, 86, 92, 94, 95, 96, 105,2817, 2818, 2819, 2820, 2821, 2822, 2823, 2824, 2825, 2826: n = A,T,C or G
  misc_feature 2827, 2828, 2829, 2830, 2831, 2832, 2833, 2834: n = A,T,C or G
nnnnnnccacgttttgcntgaccctgtttgctcaactnncntntntntnnnnttntntnttnngcnnnnnnannannnnnnnnttnaaaaancnnnaaagttaantggtaagtttagtctttttgtcttttatttcaaggtcccggatccggtggtggtgcaaatcaaagaactgctcctcagtggatgttgcctttacttctaggcctgtacggaagtgttacttctgctctaaaagctgcggaattctaatacgactcactatagggagtcgacccacgcgtccggtgggcaggccgggggtgagggctcgcgctccgggagctgcacggggctgcgtggaaagagcgccgagcggtggcgtcgttgtcgccccctcctcgtcgggaagaatcgtttggtctcctgccgtgcccggaatcccagtcagaagttccagcctgccactgttctctgatgccatgccagcaccaactcaactgttttttcctctcatccgtaactgtgaactgagcaggatctatggcactgcatgttactgccaccacaaacatctctgttgttcctcatcgtacattcctcagagtcgactgagatacacacctcatccagcatatgctaccttttgcaggccaaaggagaactggtggcagtacacccaaggaaggagatatgcttccacaccacagaaattttacctcacacctccacaagtcaatagcatccttaaagctaatgaatacagtttcaaagtgccagaatttgacggcaaaaatgtcagttctatccttggatttgacagcaatcagctgcctgcaaatgcacccattgaggaccggagaagtgcagcaacctgcttgcagaccagagggatgcttttgggggtttttgatggccatgcaggttgtgcttgttcccaggcagtcagtgaaagactcttttattatattgctgtctctttgttaccccatgagactttgctagagattgaaaatgcagtggagagcggccgggcactgctacccattctccagtggcacaagcaccccaatgattactttagtaaggaggcatccaaattgtactttaacagcttgaggacttactggcaagagcttatagacctcaacactggtgagtcgactgatattgatgttaaggaggctctaattaatgccttcaagaggcttgataatgacatctccttggaggcgcaagttggtgatcctaattcttttctcaactacctggtgcttcgagtggcattttctggagccactgcttgtgtggcccatgtggatggtgttgaccttcatgtggccaatactggcgatagcagagccatgctgggtgtgcaggaagaggacggctcatggtcagcagtcacgctgtctaatgaccacaatgctcaaaatgaaagagaactagaacggctgaaattggaacatccaaagagtgaggccaagagtgtcgtgaaacaggatcggctgcttggcttgctgatgccatttagggcatttggagatgtaaagttcaaatggagcattgaccttcaaaagagagtgatagaatctggcccagaccagttgaatgacaatgaatataccaagtttattcctcctaattatcacacacctccttatctcactgctgagccagaggtaacttaccaccgattaaggccacaggataagtttctggtgttggctactgatgggttgtgggagactatgcataggcaggatgtggttaggattgtgggtgagtacctaactggcatgcatcaccaacagccaatagctgttggtggctacaaggtgactctgggacagatgcatggccttttaacagaaaggagaaccaaaatgtcctcggtatttgaggatcagaacgcagcaacccatctcattcgccacgctgtgggcaacaacgagtttgggactgttgatcatgagcgcctctctaaaatgcttagtcttcctgaagagcttgctcgaatgtacagagatgacattacaatcattgtagttcagttcaattctcatgttgtaggggcgtatcaaaaccaagaatagtgagtggctctttcactggcaattctcaaatgatatacatttaaagggcagattttttaaaaagatactactataataaacatttccagttggtcattctaagcatttacccttttgatactctagctagtcaggtactccaaattgactttgcagcagggtggcagggtcaggagagtctggtcctgcctagctcagatttcatggcacctgcacttgaagcaagtcacttctttatcacaggtgtcttgaaacattagcttcttttaccaacctgagaaaattaggatgacctggcaaataagatcttgaataggccaaaagcaagtatcttgctgtgtgtagtctcttggttaaagtgaagaaacagtactgttcacacctttcttcactgagattccagtgtacatgagaacatatatttattgcatgattttctagatacacagtctatgcattattcatatacatttattttagcctaaagtggttttcaaatccagttcttcaagccataaatgaccaagatccaagcaatctgaatttgtttttgtgattatttgactggaatgcttcttaagtggaataactatactccgttatccacccgatttcctaatgtaattgaaagattttctattttgccacacacttggagacaataagggtttttagttttatctactcttctattgaagttaaaaaaaaaaaaaaaaaaaaaaaaaaaaaataatgaaaagcnnnnnnnnnnnnnnnnnn

SEQ ID NO: 12501 - DNA, 613 bp, Homo sapiens
  misc_feature 28: n = A,T,C or G
ccgcccgggcaggtaccgtcatctgaanctggagtggtagctctacttttagtatgtgaatatctgatgaaacttttcaatggttttgtagcattggattcaatttcagggttgggctcctttctaggaatagaggaatattcttatctcagaaaaaaaatcttttgcggtttttcccggggtgggtatggtggaaaaaggaatcattgacccaacaaaggttgtgagaactgctttattggatgccgctggtgtggcctctctgttaactacagcagaagttgtagtcacagaaattcctaaagaagagaaggaccctggaatgggtgcaatgggtggaatgggaggtggtatgggaggtggcatgttctaactcctagactagtgctttacctttattaatgaactgtgacaggaagcccaaggcagtgttcctcaccaataacttcagagaagtcagttggagaaaatgaagaaaaaggctggctgaaaatcactataaccatcagttactggtttcagttgacaaattatataatggtttactgctgtcattgtccatgcctacagataatttattttgtatttttgaatcatttgtacattcctgatc

SEQ ID NO: 12502 - DNA, 972 bp, Homo sapiens
  misc_feature 1, 2, 3, 28: n = A,T,C or G
nnnccggccaattccaacttgtccacanatccaacctatttctctataagcccaagctgcctttctaatcttctctcttaatgggaaacttttgattcagcccagtggttcagctgtctgtacaccccatgagttcacttcttcccacctgtggcttattcctgagctttgtcccctgccttgaaagctcagccaaatcctgtcttgagaaatagcctggtgtgacctctgtgaagtctctctgaccactcagcctggtgtttctctccctgctgaatcctttaagctcctaacctcattcttcctagatgagctaaataaacttccttcttgctactatcttttcatgcatataattttcccccaactacaccatgaactcattgaggacaaagaccaaatgtcatgatttttatacattcaacatggtctaggacagttctctctgcctaaggacattcgataaatacttactgaatgaagtgattaatttcttccttttcattatgttttactctttctatgaaatatcttaaccaaattctattcctttctagttttccttacaggacgtgataggctgcatgcaagaggcatacagaaaatggaaatagtatttcgctgtcctgaaactttcagtgaaagagatcacccaacatcaataacttgtcataatattctctccctccctaagtattctacaatggaaagaatggaggaagcacttcaagtagccatcaacaacaacagaggatttgtctcacccatgctcacacagtcataatcacctctgagagactcagggtgggctttctcacacttggatccttctgttcttccttacacctaaataatacaagagattaatgaatagtggttagaagtagttgagggagagattgggggaatggggagatgatgatggccaaagggtgcaaaatctcacacaagactgaggcaggagaatagggt

SEQ ID NO: 12503 - DNA, 487 bp, Homo sapiens
  misc_feature 487: n = A,T,C or G
actaccctgcgtgcggcggtgggaagagctgtgagcctggaggactcggggatgacctgtgttctctgcttccgttgtccccagtgtgctttgcaaagcatgttcccaggatgtgggacctgaggaataacttagcagtggccagcatctgaagctatgtgtgtgagcctaggacttttgctagatccctgatcagctcttaaagtaacaggaccccaaaagggaagggaaattcagatttaagtgggctagataatggtttctctggtgccacgctgcttgggttcagatgccagctccagcttttactagctgtgtgacattggggaagttgtctaacctctctgggccttattttctttacctgtaaaacaaggctgctgggcacggtggctcacgcctgtaatcccagcactttgggaggctgaggcaggcagatcacatgaggtcaggagttcaagaccagcctggccaacatggtgacacn

SEQ ID NO: 12504 - DNA, 533 bp, Homo sapiens
  misc_feature 531, 532, 533: n = A,T,C or G
accacaagctgtgtgtctttaagcaacagaaatttcttccctcacagttgcggaggtcagaggtcagaaaacaaggtgtctgcaggaccaacctctcctctggatgctctaggtgagaatcttttccatgcctttctcttagcttctgatgttgccgtcagaacttcagatggtgttccttggcttcattttcttgtagggggattcccctgggtctgtgccactcctgggtgaatggttgatctgtctcactcttctccgtgatccgaaggtcacactatgtcactgatgaatccttatgtgtccacctggatgttccggttgaagagctagtgtctcaccactctttctgctatttgtgagagtggtacacactagctgcttctagtcaaccatcttggccccacctcactcacttttctcaagtaatcaaagacttttgagaagtggagatgaatgttttgaattgccccttcgttttgcatcctggaaatttcaacacctaaaatgcacaggagccaagaagcatgnnn

SEQ ID NO: 12505 - DNA, 333 bp, Homo sapiens
aggtacccttctgggtcatttcaatgcatgtgtgtagggatgagcgtaggaactcataatgcaacttcaggggacccctttcttgagctccctcctctttgtggtttccccaacactcttagacaccagggggcgctttctctcccctccggctggcaagctggggtttgagcctctctgctctgtcttgtatctcccacaactaggtcttcttctggggcaaaggggtaaaagaaaagaaagaaaaacaagtaacaggaattctctcacactctttgaaccccaggggttcctttactcagtttctctggccaaagagaaggactctgaggt

SEQ ID NO: 12506 - DNA, 647 bp, Homo sapiens
  misc_feature 647: n = A,T,C or G
acaatgaactatttcagtgtagaatgaattacaaaacagtaatatgaaggaaggtttgattgtaagcacagcagcagcaaatcctccaacatttaccccattatcatttggtgagaggggaaccttaactctaacccttttactgttgttgctctctaccattttgctttttcataaaagttctacatcaaaactgttactccctcttccacaacagcactgaaaactgtatttccttagagctatactgtccccaaaattggaatacagacttcatgagagaatattttatctctgcctaccacagcatgtgaaaaaaaaggaattttttaaaatttaaatgttaaaaattttccaattctaccaatacctaccaacttacaaaactctagagaactcagaaatacacaaacacacattccattaaccaccagagtgatgatgctgtcgcgtcatagagcctctggaaaaccccactgtataactggtgagagaaacagaaggaaaaaggcaaacaacttgagaagaattacttaacaagacatagggaagagtaatcactaaatcctcaataacacaatttccaattctatttagaatttggtatttgggcccagtgtggtggctcacagcagtaatcctaacan

SEQ ID NO: 12507 - DNA, 630 bp, Homo sapiens
  misc_feature 1, 630: n = A,T,C or G
naagtatcagcagaaaatatcttaactgtagccaaggatccaagatatgccagatatctcaaatggttcaaagtgggtgtaccacaagctgtgtgtctttaagcaacagaaatttcttccctcacagttgcggaggtcagaggtcagaaaacaaggtgtctgcaggaccaacctctcctctggatgctctaggtgagaatcttttccatgcctttctcttagcttctgatgttgccgtcagaacttcagatggtgttccttggcttcattttcttgtagggggattcccctgggtctgtgccactcctgggtgaatggttgatctgtctcactcttctccgtgatccgaaggtcacactatgtcactgatgaatccttatgtgtccacctggatgttccggttgaagagctagtgtctcaccactctttctgctatttgtgagagtggcacacactagctgcttctagtcaaccatcttggccccacctcactcacttttctcaagtaatcaaagaccagaaaggatgtcctttacaagagcagatcccccaaaatgtaagagttcactgaaaaggtgggagctcaaaccaagagaggacttatctcgcagcataaagacaacttgtacn

SEQ ID NO: 12508 - DNA, 390 bp, Homo sapiens
agaaaaaaagaaagaaaaagaaatctataaaagcagacaggaggggaaaactattggggccattgctttcaaaatacccaacttctgaaaacttaggttacaatgacgcctctccataatgggagtcaatgatggagactatgccttggctccatcccccaattcctgcagtggtgttgggggcagggcatcctcaggtcaaagggcaacctggcaggctgggtaatggagctgattcaccgatcccttgggtcacgtgacttgctgagtgttctccacctgttactcatcgagtgttatttattcgtttttaaagaaatccagtaaacctggcagtgttaaaactgaacgagcaggggcttttggacaaattgaaaaacaaatggtggt

SEQ ID NO: 12509 - DNA, 449 bp, Homo sapiens
  misc_feature 1, 2, 3: n = A,T,C or G
nnncaatttattgaatactgtacagaaagtgaaaaatagaggtcgtatgagtacttgaggaacagtttctactgaatgcggatcacttttgcaccattgcaaagtagaaaaatcctaagtcaagtcatcatgagttggggactgtccgtaagagttattaacagaggactggaatggggattgggtagtaaggaataaagagaagcctgggcagatgcatggaacagccgatatgggcttttcaccccaggctgagacagaacaactcaaagaagaaagctcagggctgagatccgggctgagatccagacttcgtgtgagaggacacagctgtgaaagacagaggtttgctgaggctgtggagttgcagctggagaaggtgctgggcttggggcactttgcagagaagggaccttgtgcatgtcaagggaagccattcatgtgggggt

SEQ ID NO: 12510 - DNA, 2221 bp, Homo sapiens
  misc_feature 2220, 2221: n = A,T,C or G
cgcgtccgcggacgcgatggcggctgtcgaagcggctgcagagccggtaacggtggtggcggctgttgggccaaaggcgaaagacgaagaggaggaggaagaggagccgctgccaccgtgcgaggcggtgcgctgggccccagtgggggcggtggcggaggcccggcctggggcaaccgcgtttttagaagaggcgacggccgaggagcctggcgcggccccgggctccccgccggattcgccgggccggacgctgcggcggctgcgggcagagcggcggcggctggactcggcgctgctggcgctgtcctcgcacttcgcgcaggtgcagttccgcctgcgccaggtggtgcgcggggcgccggcggagcagcagcgccttctgcgggagctcgaagacttcgccttccgcggctgccctcacgtcctaggttacgaagggcccggcgaccccgccagcgatgagggcgatgggctgccaggggaccggccacggttgcggggcgaggaccagagtgagcaggaaaagcaagagcgtctggaaacccaaagggagaagcagaaagaactgatactgcagctcaagacccagctagatgacctggaaacgtttgcctatcaagagggcagttatgactcgctgccacagtccgtggtgttggaaagacagcgggtgatcatagatgagttaataaagaaactggacatgaatctgaatgaggacatcagttccctgtccactgaagagcttcgtcagcgtgtagatgcagcagtggctcagatcgtcaacccagcccgagtcaaagaacagttggttgagcaactgaaaactcagatccgagaccttgagatgtttatcaacttcatccaagatgaagtgggaagccccttgcagacaggtggtggacactgtgagtgcaaggccggtgggaagacaggaaatggctgcagcagaacaggcagcagcagaacgcctccaggaaacagcaaaacaaaggcagaggatgtgaagaaagtccgggagacggggctgcacctgatgcggcgagcgctggccgtgctccagatctttgctgttagccagtttggttgtgccacaggccagatccctccaaccctgtggcagagggtccaggctgacagagactactctcccttgctgaagaggctggaggtgtcagtggacagagtgaagcagctagccttgaggcagcagccacatgaccatgtcatcacctctgccaacctccaggacctctctctgggaggcaaggatgagctgactatggctgtgcggaaggagctaacggtggctgtgagggacctgctggcccatggactgtatgcctcctccccagggatgagccttgttatggctcctattgcttgtttgctgccagccttctcctcggccccagaggccatgcacccgtgggagctctttgtaaagtactaccatgctaagaacggccgtgcttatgtggaatccccagcccggaagctctcccagtccttcgcccttcctgttacgggaggcactgttgtcacccccaaacagagcctactgacagccatccacatggtgctgacagagcatgacccttttaagcgcagtgcagactcagaattgaaggccttggtgtgcatggcactgaatgagcagcgtctggtgtcctgggtgaacctcatctgcaagtccgggtcactcatcgagcctcactaccagccctggagctacatggcacacacaggctttgagagtgccctcaacctgctcagtcgcctcagcagcctcaagtttagcctccctgtagatctggctgtgcgccagctacaaacaacatcaaagatgccttttgatgagagtgccctaaccccagacaagctccttgttcagtagggatagatgtgctagtcttctagcataggacgcacggaatcagacggtgcgggcacaaggccattttttcccaggaccctgcgtcaggatcgtcggccaaatgagtgcaacagcctgctacccaacaactaagctctcgaaccatgtgctgccgcgaccctcttgtcacgaacgtctgcaggccggcgcgcggtccacctgactcccaacttggacgcggggggaaacaaggcggcgtcaccaacatcgttaaacggaaccactatcagaacaaatcatccgatggcagacttgccctccgctcacgaccgcgccacagnn

SEQ ID NO: 12511 - DNA, 2387 bp, Homo sapiens
  misc_feature 1, 2, 2359, 2360, 2361, 2362, 2363, 2364, 2365, 2366, 2367,2368, 2369, 2370, 2371, 2372, 2373, 2374, 2375, 2376, 2377,2378, 2379, 2380, 2381, 2382, 2383, 2384, 2385, 2386, 2387: n = A,T,C or G
nncgacccacgcgtccggttccctactgtgaagaggaagaagcgaacgcgagtaggagcgcagcgctcttcggacctctgaggctctctactgtgaaatcgcagcgacatttacgaaggcctccgggtcctaccgagaccgatccgcagcgtttggcccggtcgcgcctattgcatcgggagcccccgagcaccggcgaaggactggcgggtggggtagggaggtggcggcggcatggcgaggttcccgaaggccgacctggccgctgcaggagttatgttactttgccacttcttcacggaccagtttcagttcgccgatgggaaacccggagaccaaatccttgattggcagtatggggagttacctcaggggccttccctcacacagaggaggaggtggaagttgattcacacgcgtacagccacaggtggaaaagaaacttggactttctcaaggcggtagacacgaaccgagcaagcgtcggccaagactctcctgagcccagaagcttcacagacctgctgctggatgatgggcaggacaataacactcagatcgaggaggatacagaccacaattactatatatctcgaatatatggtccatctgattctgccagccgggatttatgggtgaacatagaccaaatggaaaaagataaagtgaagattcatggaatattgtccaatactcatcggcaagctgcaagagtgaatctgtccttcgattttccattttatggccacttcctacgtgaaatcactgtggcaaccgggggtttcatatacactggagaagtcgtacatcgaatgctaacagccacacagtacatagcacctttaatggcaaatttcgatcccagtgtatccagaaattcaactgtcagatattttgataatggcacagcacttgtggtccagtgggaccatgtacatctccaggataattataacctgggaagcttcacattccaggcaaccctgctcatggatggacgaatcatctttggatacaaagaaattcctgtcttggtcacacagataagttcaaccaatcatccagtgaaagtcggactgtccgatgcatttgtcgttgtccacaggatccaacaaattcccaatgttcgaagaagaacaatttatgaataccaccgagtagagctacaaatgtcaaaaattaccaacatttcggctgtggagatgaccccattacccacatgcctccagtttaacagatgtggcccctgtgtatcttctcagattggcttcaactgcagttggtgtagtaaacttcaaagatgttccagtggatttgatcgtcatcggcaggactgggtggacagtggatgccctgaagagtcaaaagagaagatgtgtgagaatacagaaccagtggaaacttcttctcgaaccaccacaaccataggagcgacaaccacccagttcagggtcctaactaccaccagaagagcagtgacttctcagtttcccaccagcctccctacagaagatgataccaagatagcactacatctaaaagataatggagcttctacagatgacagtgcagctgagaagaaagggggaaccctccacgctggcctcatcgttggaatcctcatcctggtcctcattgtagccacagccattcttgtgacagtctatatgtatcaccacccaacatcagcagccagcatcttctttattgagagacgcccaagcagatggcctgcgatgaagtttagaagaggctctggacatcctgcctatgctgaagttgaaccagttggagagaaagaaggctttattgtatcagagcagtgctaaaatttctaggacagaacaacaccagtactggtttacaggtgttaagactaaaattttgcctatacctttaagacaaacaaacaaacacacacacaaacaagctctaagctgctgtagcctgaagaagacaagatttctggacaagctcagcccaggaaacaaagggtaaacaaaaaactaaaacttatacaagataccatttacactgaacatagaattccctagtggaatgtcatctatagttcactcggaacatctcccgtggacttatctgaagtatgacaagattataatgcttttggcttaggtgcagggttgcaaagggatcagaaaaaaaaaatcataataaagctttagttcatgagggatcgacacctttggttcaaatgttctctgatgtctcaaagataactgttttccaaagcctgaaccctttcactcaaaagagcaatgatgaatgtctcaagattgctaagaaaaacagcccatgcaagagtgagaacaaacccaaaataagagattttctacannnnnnnnnnnnnnnnnnnnnnnnnnnnn

SEQ ID NO: 12512 - DNA, 290 bp, Homo sapiens
  misc_feature 1, 2: n = A,T,C or G
nnctgtggcggccgcccgggcaggtacttttttttttttttttttttttttttgttagaaattgcctcagacagggattgatgtcaggaggcttcaaggagagaaatatacatgaatgggagaccccaggttgcaggcaacaagagtcacaggtatgggagaaaccaggaagtctgtgccatgttaactttgctcatctcatcgtgctttgtactcagataagaatatcatccagaaacacagcatgttacttcttgtaagtgagtcttactgttccacaaaacccgcgt

SEQ ID NO: 12513 - DNA, 577 bp, Homo sapiens
  misc_feature 1, 2, 3, 4, 574, 575, 576, 577: n = A,T,C or G
nnnnccgaggtactgtggtctttgtcactctaagctaatgagctggtttttactgactgattgatttttgtccattttgcaagtaagcttgtaatgagcatgcataacatccaggccagaaagggaggggcagagggtgggcatcctgtcaggcactcaaacttttctgaaatttgtgccactggacatatttaataattaactttgggattgaatttggattctgtgtggttaaaagagaatagtacgaaaggaccctgatgtaaagccagaagcagagatgccatggaaaagtaaggctgaacttagcacatcagttcctgggggttaacagaggtggctgaggctgttaatgggccattcatcccctgattcaaaatctgaacagacttcacttattctgctccctggtgatgctaaaaaattatcagcctatcattagtcatgggaaaggagtggaagaggagttggtagaacattccgtgcaggtacacctagaacaattttaaaagaaaaacaaactttcacagaatacaagaatagaatgtctccttctacctacactggctgtagnnnn

SEQ ID NO: 12514 - DNA, 743 bp, Homo sapiens
cgacccacgcgtccgcgtggcgacccgctgaatttaagcatattagtcagcggaggagaagaaactaaccaggattccctcagtaacggcgagtgaacagggaagagcccagcgccgaatccccgccgccgccgccgccgccgccgggtcgcccctggcccggcgcgcccgtccccggcagcgacaatgagtgaacagagtatctgccaagcccgggcttccgtgatggtctacgatgacaccagtaagaaatgggtaccaatcaaacctggccagcagggattcagccggatcaacatctaccacaacactgccagcaacaccttcagagtcgttggagtcaagttgcaggatcagcaggttgtgatcaattattcaatcgtgaaagggctgaagtacaatcaggccacgccaaccttccaccagtggcgagatgcccgccaggtctacggcttaaactttgcaagtaaagaagaggcaaccacgttctccaatgcaatgccgtttgccctgaacatcatgaattcccaagaaggaggtaagtagggctttgtcttggcctgatgctgagaccctctcttgttctacctctgccctcccacagctctggctctccgggtaccctagcactgtcactgcattgagctgaggttgcatgtgttctcagagaaacctgctgcctgcctttagatttagagatattaacaattcagaggaggaaagaatggagtttgtatctcttt

SEQ ID NO: 12515 - DNA, 341 bp, Homo sapiens
acaccaaaaatggatcataagctaggccttaaacaagttttaatacattttaaaataactgtaagcatattgactatgttctcttacaataactgtattgaattagaaatcatcaacaataatatttctaagaagttgttctgtgcaggaaatgcacaaggggaaaggaaaagacacacacaatacttttaagggtaaacagtctttatcccaagtatatggcaatacagatataataaacaaatcatataataagcaaatcatatgataagcaaatcatgtaataagcaaattgcaatgggaaggggagaagggaaaatatatatatatttacactcacc

SEQ ID NO: 12516 - DNA, 481 bp, Homo sapiens
  misc_feature 480, 481: n = A,T,C or G
actattccctcccttattcaagactttgcttaaatgtcacctgtgtaatggaatctttcccaatttgtcaatttgtcccattagacaaatagatcaatagttcactgatctattcccagtgctgataacaatacctggcatagagtagatggtcaatgaatatgtgttgaatgaataaatgagcaacgtgggtcagccaccccatgaagttagctggaggttttacaacatcaacagagtgaggtaagagcacgggagacaagccaccatggtcactgtaaaccaggctgccaaactgatttcaattactgcttacaaggaggaagaacaaggatcccatgtggtgcctaggaagtcaacaaagttaataaagcagagttttctagagcctgaggatcaagtatccagtaggaaagctgcccttttacttttcagaaacatctatcccaggcctcgcaacacaagctgacacacccgcgnn

SEQ ID NO: 12517 - DNA, 524 bp, Homo sapiens
  misc_feature 519, 520, 521, 522, 523, 524: n = A,T,C or G
accaagattgaagccccttaacattcagttcaagtgttggttccacttgcctgagcacaagttggaagtagctttgttaggattctagccggcatccttgctgtcactactggttcttgtatagtcaagccccactctgtgcagagcaaatctttgctcagttaagcgagcgtcagtcactggtaagcttggctgccggcccggggttgttaggcttttccatgctacacctgaatgagatattgacgagacattgctacctaaacagagttgagaaactggataaataaataaattaattaaattgtcacagggctgagagaataattttgaaaatgcaacttacacttccagtgcagaaacagatcaagggaagtacctcggccgcccgggcaggtacttcctgtataacccatgttctcatttgtaaaatgaactaacatggtgatgtactgcgaaaattaaatgaataaatgtaagagcctcaatgcacaatctggccagtaggtggcactatannnnnn

SEQ ID NO: 12518 - DNA, 1030 bp, Homo sapiens
  misc_feature 1029, 1030: n = A,T,C or G
gcgtccgggctgaggctggataattgtttgaacccaggaggtggaggttgcagtgagccgagagctggcctctccctccagcctggcggcagagggagactccatctcaaacaaacaaacaaacaaaaaaagatactttaagttgtttaaaggccagagagaggccagtggtgtgtggcagtcagctggggatggacatggaatgtacctggaagtctaaagaatgaggtgcgttcagagagggtatctctgctgtgctgaaggtgccacattgggctttccatgacctcggccatactagggaaagtgcctgtcaggagggggtggactttatgtcacagccaccgcacagatacctatttgttcaactaactattgttgttggtggctgtaccccatgaccagtgggcctagtttctcctatgtttgaggaccttgagaggaggatgtgcgagagtagatgtgtgggagagatggattgtgatacctcagcataggggtggtttgtggtttcatctgtcaacatcataacagggcacagtgacttttgaagacgtggctgtgaaatttacccaggaggaatggaatctccttagtgaggctcagagatgcctgtaccgtgatgtgactctggagaacctggcacttatgtcctccctgggtaagttgctcacactcaccctgtgacttgagctagtctctgttttcccctgtctttccccattggcaagactttctcatgtcaggagcatggacacagcttcctgcttcagttctatgggtaggttcttggttgtaggactgaggtatgcatactgccctctccattcttggagcagccccaacacctgcttatctgagctcccacgggaagaattacagagtcagaagtcttacaggcaacttaatgcaggctaccctgtttgtcctgtggatgtttgtgtgatttcatccagatttcaggttcgggatctaattcattctacctgttatttcttcatgcctcccagcacggagggttaccgagcnn

SEQ ID NO: 12519 - DNA, 978 bp, Homo sapiens
  misc_feature 973, 974, 975, 976, 977, 978: n = A,T,C or G
acccacagctgggagagagctagtgagctccagggagggtcagctgggggagtttcaccattggctgtgtcagccaatggcaaggtgtgtgaacagggaactcctgtgttgagcagagagaggaagaagatgcgtccgagatggagttggggaaggcagcacttgcgtgtttgtgtgtccagagtcgagcggccgcccgggcaggtacgcgggtaaacacatccataaaaagaggaaactagctgaaggaagagaaaaaaccatgagttcagacgatgaagactgttcggcgaaaggaagaaatcgtcacattgtagtcaataaagccgaacttgctaactccactgaagtgttagaaagctttaaattggccagggagagctgggaatgctctattccctagaattccttgacaaagaatttacaaggatttgcttggcctggaagacggatacttggctttggttaagaatcttcctcactgatatgatcatctatcagcgatgcttttcccctccttgctattctatctttcttagggtcaatataaaaaggcgatagccagcctgcatcacttagcagctctccagggatccatttctcagccacagatcacagggcaggggaccctggagcatcagagggcgctcatccagctggcgacgtgccactttgcgctaggggagtacagaatgacatgtgaaaaagtccttgatttgatgtgctacatggtactccccattcaagatggaggcaaatcccaggaggaaccctcgaaagtaaagcccaaatttagaaaaggtacagtgacatgttttatgactattttgtaaaaatagctttagaaagccaggcacggtggctcacacttgtaatctcagctactcggaagtcgaggcgggaggatagcttttgagcccaggagtttgagaccagcctgggcaatgtagtgagaccccatctcttaaaaaannnnnn

SEQ ID NO: 12520 - DNA, 771 bp, Homo sapiens
gcgtccggtatctttcctaatttgaaatactgttactgttacctgatctttgtataaaaacttgcctggtatgatttttctttaaaaaagagagtgcttatatttaagcatatttttgtcttcatagctcttttatcttcctgccaagaagaatgtggattccattcttgaggattatgcaaattacaagaaatctcgtggaaacacagataataagtaagaatatacatttttcagatgacactcaaaagacatttaaaaaagtttctaaataagtcatctgaaacttgtactgactccgaaacattaataccaccagaaactagcaaaatagaatttcactgctttgacacaggagttggctggctgactttttcttaaagggccagatagtaaatattttaggtaaaatttaagctatcatgtaggtatttgcataaccatttaaaatttaaccatctgaaaatgtaagaatcatcttaattgctttagtttgtcaaaccctgctttcatatgccctttaaaaaaatctcagctatggttcattattactagctcagcttttaattctttaaattggttgaattattctctatgtcagttatttttattgaccagttttggaatatttttgttcatttatcagggagtatgcggttaatgaagttgtggcagggataaaagaatacttcaacgtaatgttgggtacccagggccagcacgctcctgctcatgcgggataagccactcagagcaaaccagctggaagga

SEQ ID NO: 12521 - DNA, 667 bp, Homo sapiens
  misc_feature 527: n = A,T,C or G
acttttttttttttttttttttttttttttatttttttttttttttttttggctggttttaagtttattttgacggaacttttgataagaaatctcagattagacttttaaaagcctttcaagggtcagaagtcaaaggagggcgaacatcagactttggctgcagtatctaaaaatctgcatgaatttctctcttcttgaggtctccaatatatctggaggttcctggccattttcttgtagggggattcccctgggtctgtgccactcctgggtgaatggctgatctgtctcactcttctccgtgatccgaaggtcacactatgtcactgatgaatccttatgtgtccacctggatgttccggttgaagagctagtgtctcaccactctttctgctatttgtgagagtggcacacactaactgcttctagtcaaccatcttggccccacctcactcacttttctcaagtaatcaaagaccagaaaggatgtcctttacaagaaccgattcacccttgataaacanaaaaatctgtggtttattaggccagttattctaaaaggtagagaaaacatttcactattttctattaagagcaggtcaatactcaaagaaaagcttgttgtttcagcacaggggacaaatttcaagttttccattcctgt

SEQ ID NO: 12522 - DNA, 550 bp, Homo sapiens
aggtaccttgcacatctctgcctgcgctgctcacccactgtcaagaaagaaaggtagagcctggtgctctccctaagcactgtgggcctcacagttcgggcgggagcccccagcacctggctcttcctgcatggaaagcttggtttcactcttcagaggtggtggcaacatccccagaaaaccggtaggcgtgggcacagtggctggaggccgagggctcctcgccatagcagaagcacggccgtggcttccagcctgtaaccccatctgaagttgtctggggatttttttgccgcacattgtttttgcattttgtgggttgtcttgtttcgtcgggtcttttgcttgtttctgtctcactttcacatttggcagccagctcctaccctcagccaacagcctgctcagctccaggtcgacatgaggcgctggtgtgggaccaggcacaggcctgactctgacagacccaaaaaaaaacaccacaccaggcagcctggccagagagggctccgagcaaaccagcatctccaggcctagcaggttttttttt

SEQ ID NO: 12523 - DNA, 330 bp, Homo sapiens
ccgggcaggtacaggaaacctcatacgacgggtgcatgttatccagtgatcttccttccttccttcaacaaatatgtattgaaccccttccatgtgccaagccctgtgatattaaaatgacgattaaaatagagtgatcaatgccatgataggcggtgtgaatgcattgcagggagctctccctagtttagaggtcagggatgactccagaggatgggacatttaacatttaagctaagatatttatcagattatctagttgagagtggggaggaaggtgggagttagagttggccatttggagcgaggaggtggggatggttaatgggt

SEQ ID NO: 12524 - DNA, 435 bp, Homo sapiens
  misc_feature 434, 435: n = A,T,C or G
actttttttttttttttttttttttttggtttaagccttctctgaccaggaaaatcatctttttaactgagaaggtcgagggaaagaaaggctgatattaggtcaagaaattgaaagcaggtttctaactattttttgaaaactaaactgaaccagcaagtaagcaggtttctcggtgttctaacatgagtgtatgcctccttttccaaaataattctatcccaatgagggaaatcttaataggagagaatgccacaccaccatggtaagcttaagaaactttggaagactgaagaaaaacacatactgaactgattttgttaaaagaaataaaggtgatttctacagctattttaaaacattctcagatggatagcctatggagagaggcatttttttttgagacagagtctcactctgtcaggttggagtann

SEQ ID NO: 12525 - DNA, 554 bp, Homo sapiens
acagatcaaaagcttgccttagtgaggcagctgcagggggataaagttagcaggaggcctcaaagatcttaagtcaggcctgatgttgaactttgcagggatttcatcgctctggaatacgaatgtggcaaaaaatcccattgtgtctagtgggggcgaaagagaataacaggcaagcagcaaatgcttgtcagctttctcatagggtagctttccttttaacacgtgtttatccatgacagtttctgcttcatacttgaaggcattgttgaggaggagaggatcctgaagatggtgaatctactgtattacctttagtgagtgtttcagacgtggccaaactataaatattagtgtttttggaatggccatggagagctaaaatgtggccataaaggtgctcagatttactgccataactggtaatcacatctcctcctgcaagtgctcaagatatccaggaagtgagtgggtatcagcctggctatgcatctgtccctcatgtaattaaaaaacagaacagctattaaaaaaaaaggaaaagaaaaaaaagt

SEQ ID NO: 12526 - DNA, 2187 bp, Homo sapiens
  misc_feature 1, 2186, 2187: n = A,T,C or G
nctctcactcggtgccgctgcctaggggctgtagaggtcgcgccgctcctgctggggcctgcccacgccaaggacctgcctctgtcgcctcctcttctattgcccagtttccccagccagaacatcccctgaagatggcagaggagagcagctgtaccagggattgcatgtccttcagcgtgctcaactgggatcaggttagccggctgcatgaggtcctcactgaagttgtacctatccacggacgaggcaactttccaaccttggagataactctgaaggacatcgtccagaccgtccgcagtcggctggaggaggcaggcatcaaagtgcacgacgtccggctgaatggctccgcagctggccacgttttggtcaaagataatggcttgggctgcaaagacctggacctaatcttccatgtggctcttccaacagaggcagaatttcagctggttagagatgtggttctgtgttcccttctgaacttcctgccagagggtgtgaacaagctcaaaatcagtccagtcactctgaaggaggcatatgtgcagaagctagtgaaggtttgcacggacactgtccgctggagcctgatctccctctccaacaagaacgggaagaacgtggagctgaagtttgtcgactccattcggcgtcagtttgagttcagtgtggactctttccaaatcatcctggattctttgcttttcttctatgactgttccaataatcccatctctgagcacttccaccccaccgtgattggggagagcatgtacggggactttgaggaagcttttgaccatctgcagaacagactgatcgccaccaagaacccagaagaaatcagaggcgggggacttctcaagtacagcaaccttcttgtgcgggacttcaggcccacagaccaggaagaaatcaaaactctagagcgctacatgtgctccaggttcttcatcgacttcccggacatccttgaacagcagaggaagttggagacttaccttcaaaaccacttcgctgaagaagagagaagcaagtacgactacctcatgatccttcgcagggtggtgaacgagagcaccgtgtgtctcatggggcatgaacgcaggcagactctgaacctcatctccctcctggccttgcgtgtgctggcggaacaaaacatcatccccagtgccaccaacgtcacctgttactaccagccggccccttacgtcagtgatggcaacttcagcaactactacgttgcccatcctccagtcacctacagccagccttaccctacctggctgccctgtaactaaccttgagacctgagggtttccacagtgggaaccccaatagggctagggctctcaggtaggggagcctccttctagatgtaggcatttggcttttaaaggggaactcagctctgattctgctttttttttttttttcctttgtgtacccattggaatgggtctacagtgtatcatgagccaaccctcaaaggacccgtattacagtgccacgttggaaaacgctacaggaagcatgacctatccacatctttccaagatagacactaacatgtcatgtcccaaacattagcacgtgggggttgagctctgtgcagtaatcgagattgggagaatttgggcagcgcgtgagaagtgctaagctacttgttttctcacttgagcccgggtaggctgtgttggccctcacttgggattctcagcagttacatgaaagttgtgctgataatctcttctcttgtaccaattttagtcaggcagaaaatggtaaacatgagggtgctcttgtgacttaatttttgttcaagggactaaattgcttatgtttattccctgtcagcggagtggagaatgtcattcatcaataaaccaaagccaatagctggagaattgagatctggttgaaagtggtttatggtttacatgctgtactatcctgaggaattgcgagatattgctgaggggaaaaaaaaatgaccttttcttgaaatgtaacttgaaaacaaaataaaatgtggaacataatgtttaattagaattgtggtggtggtagtggaaggggataattgtaaataggaaacatgaatgttcatttttttctttaaagaattcttattaaatggctccttgccttttttttcttttttcctcatcagctcnn

SEQ ID NO: 12527 - DNA, 421 bp, Homo sapiens
accactaaagcaaaaaaagaaaactctctaacagcaggacctctgatctggaggcatattgaccataaatttacgccaccccatgagagctcaaaggctgtgctgttctcgtcctctctcagtccccatttccaggtgatcaagcttgggcttagggtagtggcagtgtggctttagctgtcagccatcaccatggaagagcaggaggtttaggggccttcataacctttcaagtgttggtttccgttggaagtagttgaatatctccaccccacccatgcccctgagagaaagccgggaagaggggccaccatcgggggctcagcacctgcaagcccaatgctgacatgaaggcttcgcttcattccattcggccacgagagctatactcgcttcctagggctcccctagccacgcgggt

SEQ ID NO: 12528 - DNA, 333 bp, Homo sapiens
  misc_feature 333: n = A,T,C or G
acagctggcaagaatccagggcaacgtggttccctcgctcacggtcccggaaatgtccagggaagcaggtctgagcctgctgctgttagtgcattcagtcgcctgcctcagtctctctgtagagcctggggctgggtgcagaggaggcgagcgcactcctccgcggaagcgtattaaacgtcacccctcctctcccaagcccctgccaaagatcactgacaagctctcatagcaaatgaacaaggagggaaagcaccgcgctcgcacggctttgtccgtgctacaaagcagcctgttaaactattggaactaatgcgccgcccccgcgtaccn

SEQ ID NO: 12529 - DNA, 552 bp, Homo sapiens
  misc_feature 1, 2, 550, 551, 552: n = A,T,C or G
nnatgtttagggagatgaagtgggctccctgttcacagccctcagggagactgtctagagccactccttcattcgttgtcctgccacattgctaagtgggccctctggctatgagtattaccttcttttttttactagctttagagttctaagatatattgcaaagtaataatataaacagtataactctttggaaaaggtgtggtttttgagactgaggtgtcaaggaggacatcctatttcctgaggattaatgaacttacatctttctttaacctttaaatataattatgtttgtcaattgttagacttttttaaggcttggtttccagtaattatggtatgtagtctccagtccaaacaacaggctctgtacagagaagttttattctatgttattttatctgaatcaagatcacactcaaccatctcaagagtccctactatagaagaggggtgtccaatcttttggcttcccagggccacattggaagaagacttgtcttgggccgcacataagatacgctaatactaacgattgctcatgagnnn

SEQ ID NO: 12530 - DNA, 909 bp, Homo sapiens
  misc_feature 1, 2, 904, 905, 906, 907, 908, 909: n = A,T,C or G
nnaactaccggcgggtcgtgggcacctccagataagaaaacaagctcagagagatgtggtgacttgctcaaatagtgacagaacttcctcggccatatggaggggtcatataatacccttgtgtcttcagtttgaggagagcttgtttcatatccatatcccactgtattcctgctaatctgctaatgcagtaaattggaggaaaactgttaccaggataacctgtaatgggcaaggagccacaaagaagaaaacatttcttttaatttttaaacttggtttgaaaggtatccaaatatatcttgtgagttgctcacttctgatgtctcccagatgaatgatagactgggagaagatgaatccttgctaatgaaattatatagcttcctcctaaacgattcccctttgaatccactacttgccagtttcttcagcaaggtgctaagtattcttatcagcagaaaaccagaacagattgtggatttcttaaagaagaagcatgattttgtagaccttattataaagcacataggaacttctgctatcatggatttgttgctcaggctcctgacgtgtatcgaacctccacagcccaggcaagatgtgctgaattggttaaatgaggagaaaattatccacaggcttgtggaaatagttcatccatcgcaagaagaagatgtaagttcacttgtgtgactgtaaacttgattagaaaaaaaaaaacaaaaaactgtttattgggcacagagcatacttatattaaatgtgaacatgatcagagcatacagggagaatagcagcgatctagtgttcttaaagttgatacttttctaaacaatattacattttgccaatactcagaaattccgaagtgtacacgcgccttgtatagccctctccatgnnnnnn

SEQ ID NO: 12531 - DNA, 753 bp, Homo sapiens
cgcgtccgcggacgcgtgggtgcgtgtccacatacgaggggacagggctgtggatgaggagaaccctggggacccagaagaccgtgccttgcccggaagtcctgcctgtaggcctgaaggacttgccctaacagagcctgaacaactacctggtgatgcctacttcagcccactggtgtgagcagcttcttaacatgaactacagcctccacttggtctttgtgtgtttgagtctctttactgagaggagaacccgtacagatagcgctgactctggacattgcaagtatctctagcatttcagagagtaacatggactacacagccaccatatacctccgacagcgctggatggaccagcggctggtgtttgaaggcaacaagagcttcactctggatgcccgcctcgtggagttcctctgggtgccagatacttacattgtggagtccaagaagtccttcctccatgaagtcactgtgggaaacaggctcatccgcctcttctccaatggcacggtcctgtatgccctcagaatcacgacaactgttgcatgtaacatggatctgtctaaataccccatggacacacagacatgcaagttgcagctggaaagctgtaagtatacatcctacaggctcctgagatgattttcctgggtgacttaggtgtgtgtattcatgaaaagtatctcatacacagtgacctttcttttcttaatgttgattcatcgtggattcagcccttctgactgt

SEQ ID NO: 12532 - DNA, 642 bp, Homo sapiens
  misc_feature 641, 642: n = A,T,C or G
acacgggagtgtatggcctagaactcccatcatacctgtgcaccaattgaggagagacacatgggtgggaaattgcaataaaaagacggcccacagcaggctcgcattcccatggctggccagaggaggaacgctttgtgttctcatcggagctgcatgggaagtctgcatacagcaaagtgacctgcatgcctcaccttatggaaaggatggtgggctctggcctcctgtggctggccttggtctcctgcattctgacccaggcatctgcagtgcagcgaggtaagtattctgctcacctggcatctcagatgtcaaggaagacctagcaagtgaggatagaagtgcagagaaggtggctcaggtaaggaagaggaattggcagttctaaagcaaaaactcagagctagaagtcaagggaaacataatgagaaacaatggaaatcaagtcacaatctctcaaagagcctaatcagaaattcctctgaaagggcagtgggagccagttaacataatttcccatgcccatatctttgggagattagagaccccagattaaagaagatcaagagatacataactcagtcaccttgtgctggcaagtgccttctccttttcctgaaagggctagattaagtgann

SEQ ID NO: 12533 - DNA, 1425 bp, Homo sapiens
  misc_feature 1, 2, 3, 4, 5, 6, 7: n = A,T,C or G
nnnnnnngagatggctcctcttggaactatgcatctctcctgatacttggatgcttttcctctgactgatgaagatccctgaatccccaaagagggcccgcctgacagggccctaggcagtacacttctagcacctagcagagagaggcttcactacatcatgcttcctgacatctctccctttgaagagcagtcagactcctgctttgctcttcagacttaatttgggggtttaacaggtgaggttgctgggggaactcttttacaacatctctctgaaagaatccgggctgccagtttcatttggtttgggtgtcagtagcatgatggaaagacaaaaaaacacaacttgacatctgcagaaatgggttcaaattttacctgcaactcaccaattctgtggccttggttcagcaattaaactccctaaaattcagttttttctttgtaaaatggggttatgaacagtaccaaatgaagtgtgaagacaaggccatccaccactttatagagggtgtaaaaataaaccagaaatcaagggagaaagaaaagatgaaagacaaactgcaaaaaattgccaaaatgcgactttctaaaaatggagcagattctgaggctttgcatgtcttggcattccttcaggagctgaatgaaaaaatgcaacaagcagatgaagactctgagaggggtttggagtctggaagcctcatcccttcagcatcaagctggaatggggaatgaagaatagagatgtggtgcccactaggctactgctgaaagggagctgaaattcctccaccaagttggtattcaaaatatgtaatgactggtatggcaaaagattggactaagacactggccataccactggacagggttatgttaacacctgaattgctgggtcttgagagagcccaaggagttctgggagagggaccagattggggggtaggtccacgggcttggtgatagaattatttctcgattgacttcttgagtgcaatttgaactgtaacatttgcttagtcacctttagtggagtaatccactgggcttgtttctatatttatataaagcagccaaatccttcatgtaatattgaagtccatttttgcaatgttgttccatacttggagtcattttgcatcccatagaggttagtcctgcatagccagtaatgtgctaagttcatccaaaagctggcggaccaaagtctaaatagggctcagtatcccccatcgcttatctctgcctccttcctcctccttcccagtctatcatcaaccttgagtattctacacaatgtgaattcaagtgcctgattaattgaggtggcaacatagtttgagacgagggcagagaacaggaagatacatagctagaagcgacgggtacaaaaagcaatgtgtacaagaagactttcag

SEQ ID NO: 12534 - DNA, 615 bp, Homo sapiens
cgggccctgcgcgccctgcgctcgccatggcggttagggcggcgacgtgagcggctccgaggaccccgagcggggccccggccgtgacctgagccgtcggcgagggcccggggccatgcgaccgaccctgctgtggttgctgctgctgcagctcggagtctttgtcgccgacgccgcggccccggcagaccctttttcccagctgcccgttccttagcacccgaagattctccttgtacaacgcagagcaggtcctgagttgggagccagtggccctgagcaatagcacgaggcctgttgtctaccaagtgcagtttaaatacaccgacagtaaatggttcacggccgaggtacttcagttcgaaatgcagaaatcacccaccttctgggtttggtctcgctgggagctgcagatgggagctgttcctatttggccatcttcagaatgttttaaataaatataaacaaatgccatttcaagcacttgcgctacctttgttcgggcccctgccagctggaacctagaccactgcttaccccgacttgccccagcatcattccccagtattttcagcatctattgtcagagtggtcttagactctttattcattcca

SEQ ID NO: 12535 - DNA, 806 bp, Homo sapiens
  misc_feature 1: n = A,T,C or G
ntgagccttgagcaccttttggaaaggctcagaggtaactgttttgcaaacacatttcattaaagaagcagcctttgtaaaatgatttttttaactatcagaaactttgaagatatcttgaaaggtataaaaacgtatttattgtggggagtgaaacattcactgaaattaaaaatcacactcaccagatttatatacctacgggcataaaacctctatcgttattacttttatgtgtttaacaaacccctacactttgagtctaactttctactcatctgagctgttttctactttatgaaaaagtggcagactgggattaaaatttggtctaatgacaaacatcatacaacagaaataactgtagtgtttttgatcagtacagatcacaagaaaatgtagtaaaagtgacataataaaatccaggaaatcagttgtattcgaacctttcagggctataagcccttcacacagaaaagcacacaacatgctggagtttgggtcttgccagcacacaggcgcaagccagcttggcagtgctggccacagcagcagcagcactcacacccactcgctctgtgctagagttctgcatgctccacaggaaaccattcagtcctcccaagaatctcttagctgggtactatcaacatgcccatttcactgaaaagaaactgaggtgccaaagtcacctgccaatggcagcacagcctgtaggtgacagaggtgggtttagaatgcaggcagtctgcttccaaagcttgtgttgctcttaactgctatgctggtatcaacaaagcggacgc

SEQ ID NO: 12536 - DNA, 375 bp, Homo sapiens
  misc_feature 374, 375: n = A,T,C or G
acagtattgagaagtagggaaagaatagaaggaggagttgaatctgtaattgactgagcaatcagttgagataactcactgcctccacataaccttgggctgtcctatgagtcagtggagagcaacccctctcatgtaggttcagtctgaggtagctcactggcactgggaaagttgatcagggtagtcccatctcatgcacagccccatttccccatgagccgctagagtggctcgtatcagaaagatgccataccaaatgctggcaaggacctggagcaactagaatgcatgtgcatttaccttgtcctgacagccactttagagaactctttggctgtttcttataaagctaaacataatcttcccaaatnn

SEQ ID NO: 12537 - DNA, 374 bp, Homo sapiens
  misc_feature 1, 2: n = A,T,C or G
nnacataaataatgatcgagtttgtgtgatcttgtatacgtgtgagtgtgtgcgtgtgtgtgtgtgaataaatagaagacttttttaaagttataaactcttaagaggccaacataatttgtttattgagttgttaatgaattaattgatttattaagaccccatcttgttccagaaataatttaaggcagctcagtctaccaatcttcataaaatataacttataatttgtgaggaattctcttatattttagctcttttcgatccttaaaaatatttccaaataaaggagatctattacaacatgaggttcctgcttagagtgaacttaagttcttactcattctcatgttccacatagaatcacgaaatgt

SEQ ID NO: 12538 - DNA, 4109 bp, Homo sapiens
  misc_feature 4108, 4109: n = A,T,C or G
ccacgcgtccggccaactgaattgcctgacgagaaaattggcaagaaaagaaaaaggaaagatgatggagaaaatgctaaaccaattaaaaaaattagtcggggatggaactagagatccatgtctaccatactcttggatctctccaaccacaggcattataatcagcgatttgacgatggagatgaacagattccggctgattgggccactttcccactccatcctaactgaagcaataaaagctgcttctgtccacactgtgggagaggacacagaggagacacctcaccgctggtggatagaaacctgtaagaaacctgacagcgtttcccttcattgcagacaagaagccattttcgagttgttgggaggaataacatcaccagcagaaattccggcaggtactattctgggactgacagttggggatcctcgaataaatttgccccaaaagaagtccaaagctttgcccaatccagaaaaatgccaagataatgagaaagttagacagctgcttctggagggtgtgcctgtggaatgtacgcatagctttatctggaaccaagatatctgtaatattttcacagataataaaatctcggatcaggatttaaaccggatgatgagtgaattgctggtgcctgggtcacagcttattttaggtccccatgaatccaagatacctatacttttgattcagcagccaggaaaagtgattggtgaagatcgactaggctggtgaagttgctgggatgtcctactcccaaatggctggggcatggctttctggattccatttatttatctaggtgtgatattcgtatggttgaaatagtctgcagtgcattctcagtataagaggtcgcctaatgtcccaggcgattttccagactgccctgccgggatgctgtttgcggaagagcaagctaagaatcttcttgaaaagtacaaaagacgccctcctgcaaaacggcccaactacgttaagcttggcactctggcacctttctgctgtccctgggagcagttaactcaagactgggagtcaagagtccaggcttacgaagaaccttctgtagcttcatctccaaatggtaaggagagtgacctaagaagatctgaggtgccttgtgctcccatgcctaaaaaaactcatcagccatctgatgaagtgggcacatccatagagccaccccagggaggcagaggaggtaatggatgcagggtgtcaagaatcggcagggcctgagaggatcacagaccaggaggccagtgaaaaccatgttgctgccacagggagtcacctctgcgttctcaggagtagaaaattactgaagcaactttcagcctggtgtgggcccagttctgaggatagtcggggaggccggcgagctcccggcagaggccagcaaggattgaccagagaggcttgcctgtccatcttgggcaacttcccaagggcccttgtttggttcagcctgtccctgctcagcaagggcagccccgagcctcacaccataatctgtgtcccagccaaggaggacttcctccagctccatgagaactggcattactttgggccccaggaatccaaacacagtgacccattcaggagcaagatcctgaaacagaaagagaagaagaaaagggagaagaggcagaagccaggacgtgcctcttctgatggcccggcgggggaagagcccgtggctgggcaggaagctctgactctagggctgtggtcaggccctctgccgcgtgtgacgttgcactgctccagaactctcctaggctttgtgactcagggagatttttccatggctgttggctgtggagaagccctggggtttgttagcttgacaggcttgctggatatgctgtccagccagcctgcagcgcagaggggcttagtgctactgaggcctcccgcctctctgcagtatcgatttgcgaggattgctattgaggtgtgaatgcgtgcttgtatcccagcagggcatagataatacgttattattgtctgccaagttctacatgtggagaatctgcttctgctttaaaatatcatgtgaaactccctggaaacaagaataaaaaattatgtattatgcagatgatgaaatgtttacatcattccagtaatgtcattgattttcatctttccctgtccttgctgtaatacttttaaattatttggccaaaagctttgtattatgatctcttggtctgtgtagttgtggctgaaaataatgagaagctctacgagttatcatcccctttttttgttagaaacaaagggcttgtcaggtctatttgaaaaacctcatagtcatgtgataagcaacaatagatgtttaatgatttcactgttatagcagaagacaagagaagacgcttggcctctgtacatgaaatatgggctcctgatggacctcattcaattctgtactgtgatttccatgccgaacaactcaagccttaaagagagaaatcatggacaactgatttctgcctgttttcaggcaggcacagtttatggcgtcagtgctaggctggaattagaaagtgggggtctatgacgtggacttcctgactctttgatctctttgttgttgaccaacacttgatcctactagttacttaatttttttaagtaaaaaattattattattttgtttctgcaaagattttctcaaagccatagaggagcatttctcagaatatgttctatgatatgtgtcacctaaaaaagtaagagattccaaggttaggttgatatggaaactctaggttaaataaagttaagcatttctttatgaaagaacttctggaaacttccatgtgataatgtgcattgcggatctctaggaaggaaatgatagtgtatagtattttctaaatacttgtgattcctaaagttctcttacaaggagccctttgtaggaccagtgttcttagtagcgcgctttgggcagtgtggctgtgtagtgcatagctacctctgcaaggtgataactaagccggcaagctgcctttcaacactcatgcagtcacgttgtccacctgagattctcaacagggtataaaaggaaggtctcatcttgcctcacaggaagagtgggctcagtgtggcttttttccaactatggagaaactcagtgctcatctactttaagtttccacatatggcttgctcatagccttggtccttacctttcctgccataactttctagaagagcttaatgggattttttttctaaaaaatgtaaatatgcagttaggcattattttatgtaaatgcattgggtttttactgtagcatttggcactaaatggctttgggggtgatgaggtggggaaggatacagcaggtggtacagtagtcaggaagtacctgccaccaatgagatgtctgatgctttgcctcttaccatgcctctgaatgtctttggatccaacccagatgagactgaaaaaaaaaaaaacagtgtaactaagtggcatctgtaaacagaataaatgaaaatgtcacctgaaaaaaaaaaaaaaaaaagaaacaaaacaaacaacacaacaaaacaaacacaaaaaaacaaacagcaaacccaaaaagagacaagaaagaaactacagcaacgaagaaacaaaaagatagaggcgaaaatgaacagagcacaaaagcacacaaggcacggagacgccagagagagcacgcaacaaagacaatcagacggcgagcgcgcggggagcgagacagaaatagcgcgagaaaggagaaggggcgcagaccacgccaacgtaagacgcataggcatcgaggacacaaaaacacgaggcagacgagaatagcgagctaggagacagggccgaggctggacaacaacctgagccgcaccgacgcccaccaaggaacatgcgctaccacgcgaacgactggacacacggtgagagtcggagacggaggcaatacaccacaacggactggaagagacgacaagaacagtaatatcaagcgaatgcgcacgtcgagccgaccacacgacagacacccggtcaggacgagttaccgaatggagtagaacattcgggagaggagatatgcnn

SEQ ID NO: 12539 - DNA, 876 bp, Homo sapiens
  misc_feature 872, 873, 874, 875, 876: n = A,T,C or G
caagagcagcacgaaggacttggaacctatccttgtaaagagttccttgatgggtaatggtgaccaaatgcctcccttttcagtacctcggccgaggtacttggctccaggctggagactggtctgagccggactggacacaggctgggctgccggattcactttcaccgagttacaggaagccacactctcgttgtctgatgagatgcctttctccttgtctgtttggttgaccagacctggtagagagctgcctagggctgttttggaaggctccctcagtttgggcactggcaggcctgcggacttgctgctaatgttggaatctatgctgctggtgctagacctgttcccagccccgttccggctgttggacttactgggcctcggcaaactccggtactgaaggtttgtccgggagcttagggctagatacccgtcatcctgattctgagccccatccatacttgacttccgaccagcagaccgactgacgagtgcagatgactttgggattttgcccagtgtggctgacctgctggtgacagtcaccccgctggctgtgatcatggccaggccggcggcggaaccactctgcttcttgaacccaaagctgttggcattggcagtaggtgtcctagagctgctggggaggggctttttggattcgtcaccactgctccggcctgcatctgatggggagcgcttcacctgggaggctttaggagaaagccttcctttctcagacacctttgcgtcgtctgtttttccagttcctggggtcttcagtgcgcctgccggggctgaagccttcgtccttggcatggtgatgcccacctgagctgtcatgcctcgccgccatgagcctgtcnnnnn

SEQ ID NO: 12540 - DNA, 400 bp, Homo sapiens
actttttttctttttttttttctttgcgtatttcccgtctaccctccccaaacaaagccatttagagacagatggaccagaccttccgcaatctcagtgagcccatgagcatcccagactgaacagaaattcagctgtagacctagcagatgtttattatcctccctccttcttttgttgtttttcacacacctctgtgctggaaaagagccacctggtatattaactctacacagatacttggaattttctgtccttttaacctagcaaagaaaggagttgtaaaacataaagacttctttttttaacttttaaaataaatgaaatcggctgggcatggtgactcatgcctgtaatcctagcactttgggaggctgaggcggggggatcgcttgaggtc

SEQ ID NO: 12541 - DNA, 1169 bp, Homo sapiens
  misc_feature 1, 2, 3, 1167, 1168, 1169: n = A,T,C or G
nnnacttctggtggttgccactcacctgaggatattcaggacattctgaaggtgctggtgtccgaccttaaccgttccaatggggtagcgctccccccattggacaagtggaagacacccaaggacaatgctgctactctacaaccatctgatgacaccgtgttacctggcggtgtcccttcccctggtgccagtctcactagcatggcggcatctcagaatcatgatgctgacaatgtccctaatctcatggatgaaaccaagactttctcatcaaccgagagcctgcgacaactctcccaacagctcaatggtcttgtttgtgagtctgcgacatgtgtcaatggggagggccctgcatcgtctgctaacctgaaggatctggagagccggtaccaacagctagcggtagccctggactccagctatgtaacaaacaaacaactcaatatcacgatagagaaattgaaacaacagaaccaagaaattacggatcagttggaagaagaaaagaaagaatgccaccaaaagcagggagccctaagggagcagttacaggtccacattcagaccatagggatcctcgtatcagagaaagctgagttacagacagccctggctcacactcagcatgctgccaggcagaaagaaggagagtctgaagatctggccagccgcctgcagtattcccggcggcgtgtgggagagttggagcgggctctctctgctgtctccacgcagcagaagaagggcagacagggtgacggagctggactccacaaagagagagacgccctcaggctggagttatacaagaacacccaaagcaatgaggacctgaagcaagagaaatcagaattggaagagaagcttcgggtcctagtgactgagaaggctggcatgcagcttaacttggaagaattgcaaaagaagttagagatgacggaactcctgcttcaacagttttcaagccggtgtgaagcccctgatgctaaccagcagttacagcaggccatggaggagcgggcacagctggaagcacacctggggcaggtaatggagtcggttagacaactacaaatggagagagataaatatgcggaggttgcagtgagtggagatctcgccactacactccagcctgggcgacagagtggactcccatcnnn

SEQ ID NO: 12542 - DNA, 1191 bp, Homo sapiens
  misc_feature 1, 895, 951, 1190, 1191: n = A,T,C or G
ncccaggtgctacagcatcagcttcccttgccgcttcctgcggctgaagggatggtccgaccaaagcctcctgccctggggcagccgatgccactgcatgctttttcctgcgcttgggcttcacggtgccacggatattggccggcttgctgcgcttggagcgtagggtaatgtacctcggccgcccgggcaggtacgcggggagccaatggttgcccccgcagtgaaggttgcccgaggatggtcgggcctggcgttgggcgtgcggcgggctgtcttgcagcttccagggctaactcaggtgagatggagccgctatagtcctgaattcaaggatcccttgattgacaaggaatattatcgcaagccagtggaggagctaactgaggaggagaaatatgttcgggagctcaagaagactcagctcatcaaagctgctccagcagggaaaacaagttctgtgtttgaagacccagtcatcagtaaattcaccaacatgatgatgataggaggaaacaaagtactggccagatccctcatgattcagactctggaagctgtgaaaaggaagcagtttgagaagtaccatgccgcttctgcagaggaacaggcaaccatcgaacgcaacccctacaccatcttccatcaagcactgaaaaactgtgagcctatgattgggctggtacccatcctcaagggaggccgtttctaccaggtccctgtacccctacccgacggcgtcgccgcttcctagccatgaagtggatgatcactgagtgccggataaaaagcaccagcggacactgatgccggagaagctgtcacacaagctgctggaggctttccataaccagggcccgtgatcaagaggaagcatgacttgcacaaagatggncagaaggccaaccgtggcctgggcccacttacccgctggtggtacgagtctccacngaggaagccaggcctcgggccgacagaaacacgggggggctactgcacgctgaaaaactaccgggggtaagagtgaatcccttggtaggggggcggcctcaaaaaattgcagattatatcggaacctctcttgagggaaggccctggccatctgtagaagggcagatgagaaccagaacagaggggtcccagggggcggcagaaagaagactaaataacaaccgcggatggcgaaacann

SEQ ID NO: 12543 - DNA, 1112 bp, Homo sapiens
  misc_feature 1, 2, 3, 4: n = A,T,C or G
nnnngatcttcagttatatcaagagattctcaagacaatccaggcagaagatattaagaagtctttcaggggaaataatattggccttggagcatgtggtatttgactgcaaaattctgatgcttgacatcaccacaatatattatttgactttgggcaagaaatttggtacaactatataaaaatgaagatgacatggaaatttcaaagaagattaagactcagtggacctctttgggcctagaagatgtacagtttgtaaattactctgtgctgcttgatctgccaggcccttctcccagcactgtgactctgagcagcagtggtcaatgctttcatcctaatggccagccttgcagtgaagaagccagaaaagatagcagccaagacctgctctattcatatgcagcctattctgccaaaggaactctcaaggctgaagtcatcgatgtgagttatggaatggcagatgatttaaaaaggattaggaaaataaaaaacgtaacaaatcagatcgcactcctgaaattaggaaaattgccactgctttataaggttggtccagtgaatgttattcagtggtttggtcaatattttgccttgttttgttggaattatatgcttttgtgagtgtggagtgtgtgtgcatataggtgtgtgagagagaaggggagaggaagaaagagaggcagagagtgtcacagaaagatggcttttccacattagaacattttaatttaagatatttaagaacaatatatttatgcccttatttctttagagagaaaataccttaagtcaggtaacactgagtttgtgggaccttaataaaattggcatactcttcataatggtacctatctggaatagtaaaaaatgagaaccaccctgtgttcatcttatgacatatgtgaaacttctaatctattatcaaatggactaattatcatgttctctatgttagacaagtatctagatgatttacaccctttagtgattattttgtcaactatacaactacagttactaactgtgatcaggattttaattaaaagataattgctaagagtaaaaaaaaaaaaaaaaaaaaaaaacacttgcggccgcaagct

SEQ ID NO: 12544 - DNA, 1251 bp, Homo sapiens
  misc_feature 1251: n = A,T,C or G
tacatgcactcgacgatcggtctttttaccctgggagctccacacaaagagggggaaaatggctttgttggcctcaaatggctgctttattagatgcaatgaagcaggggacatagaagcaaaaagtaaaacagcaggagaagaagaaatgatcaagattagatcctgtgctgaaagagaaaccaagaaaaaagatgacattccagaagaagacaaaggaaatgtcaaacaatgtgaaatcaattatgtaaagaaatttcagagcttccaagagcacaaacttaaaataagtaaagaagacagtaaaattcttaaaaaggctcagaaagatggatttttgcatgagacgcttctggacagaggaccaaattgaaagccaacagatactgcaaatgactgggattcttggttctgccttatctttttgcgttttttttctgaataaaatattcagaggaaatgcttttacagagttcttgagttgttgtgaacttattgtttagctagtagctagtttaaccaggattaaacaagtttaatcaggattcttcatggatgtactttttagctaactacagtttttcacatggaaatgaaacttacagtaaacacttaacgtaccacagaatttttttctggatttctggtcctgaagcatgaagtgtactagaaaccaattcttcctgcgctacttgtggaatctttcttactggatcataatcttactttactttatacaatagatgcttaatcagtgcctttaataggaagttagaaactcccaatccaatcaacaaggctttgattctacctcctaagtactacccagatcacagacaatccaaatatcagaactagggggctgggcagagaggacaaatcatctattagggagtgggacagaaagtggaaacattacaaaggagcaagtaggctcagaacagaggggagagtaatactggggaaactccctactgaggacaggtttgccacagtggatatgtatgtgatgcttttgtcctcatgggctggaatggaagctgataaagaagttcagacgctacgtgttgcttaggtctgctttgttgaagcatgtctctttcagagttcctaaacacaatattcccgtggcatctaatcccagtgagtgctccaaatccaggctgtgtatcagatgccacgggaaattctgcctcacgactaaggttggttcaagcatctggatgatgtcaaaagtccacgttgtgtgcn

SEQ ID NO: 12545 - DNA, 348 bp, Homo sapiens
  misc_feature 348: n = A,T,C or G
acagaaaaacctttaggctgaacttaaaatatgtaagcagagagctttaggctgaacttgatttaacatggttttattttgtttttaacaaatagaggccatgatgactgtttaggctgagtaatggaggcctctgctccaagggcaggctgcttttcaaacagttgccatctcagtaatttttatccatttgcatctcacaacatcacaagacaggtttacataaaagtccaggttaccctgcaggctgcgtggtaacctttgattttaggttgatactggagagaaggtccgagaagaagccatccttaacaggaaatacattaaaaaaattctttgaaactggtn

SEQ ID NO: 12546 - DNA, 595 bp, Homo sapiens
  misc_feature 1, 584, 585, 586, 587, 588, 589, 590, 591, 592, 593, 594,595: n = A,T,C or G
ngggatcatcttattaactccagttatctggagctacagtccccatgatttaatattgagctggtgttaactttgaccttttcttctgtagagtttgtcagtagagaagtcagagttgaacactggggttagaaatattaataactgaatatcctcagtagggcttaaaagaatacatgcaagagcaggtcaacagataaaagcaaacaagtatggatttcagagcccacactgctttattatttttctgctcacttaaattatcttttctctttctataggcaagtatttagaaaacttagcaatgaggagaataagatgatctctgaagtctctccatgttagtattagatgaagcacagggagcaatccgagtaccctagcaagagaggaatctggtgggcagaccacttaaaacttgtgtgaatgacaggagtggggaccatgggtggggcagtgacgcttgtctttctttccaggggtgtgcacttgtgacagcagtatgctgtcttgccgacggggcccttatttaccggaagcttctgttcaatcccagcggtccttaccagaaaaagcctgtgcannnnnnnnnnnn

SEQ ID NO: 12547 - DNA, 781 bp, Homo sapiens
  misc_feature 778, 779, 780, 781: n = A,T,C or G
cgattggaatcaagttgcaagccagtgaacttgctggggtgtgcccaggtcagaacagttacagcttaaaagcctttgctgccctttttcagatcctgttcctgggagagtctcccacactaagttcagtgtgggtaccagctgtggtgagggtgtgctgccactgcagctgctgtctgggcatctgtgttagggccaatacttcaagaagtgtgagtcattgtgaagtgactgtaggcagctgggaaataacagctgtgaacagaaaaaagactggaggcgtgctctctggaggtctgggcatagtgatgagaggctgaggaacagagagggaaaagaaaaatgcaattctaaaattaaaaagaaaaccttaatttaaaccgtgatttacagataattcccatgtgtgagagacagtataggaaacactccaaagagcttgcgttaaaacaaaaataagtaaaaatgtaaagatttcctgcccctatgtgaaaaaagcaatctgtgattgttttgttttattttgttgagacagggtcttgctttgttgcccaggctggagtgcagtagcatgatcacggcacactgcggccatgaactcctaggctcaagcagtcctcccaccttgagtagctgggaccacacacatgtggtaccatgcctggctaatttattttttgtagagacggggtcttgctatgttgcccaggctgatcttgaacttctgggctcagtgatccttcacctcagcctccaagtgctgggattatagcatgannnn

SEQ ID NO: 12548 - DNA, 930 bp, Homo sapiens
  misc_feature 1, 2, 3, 4, 5, 6, 7: n = A,T,C or G
nnnnnnnacacaaatgtgtatggtttaagggtaggtgtgtatcctctactctgttgtattgataggaggaaggactggtacagggtgaaggagctgcttctgtcttgttgcgatccaagttgtaaatgttaatgaagtcttgtttgacctcaggatatcccagaagctcctgagagactgatgacagacaccattaatgaaccaatcttgctgtgtcgatttcctgtggagatcaagtccttctacatgcagcgatgtcctgaggattcccgtcttactgaatctgtcagtttctgtttcaaagagtattaataattttgctttttaagggggtggggactgtcatctggaatcaggtacagctcatgccaaatatttcattctctatctagaataacattatttaaagacgttgggttttttcaccctcccctgattgaagttgacatgctttgttaatattagtagaatatgtaatacatttgaatattacatgatcatagtggctcctttagcccttggagcttaattgtaattttcatttaaactctagggtagtgctgtgtctgatcgcttgatagtaattgtgtatcttctttcacttatatttaaaggtcgacgtgttgatgcccaatgttggtgagattgtgggaggctcaatgcgtatctttgatagtgaagaaatactggcaggttataaaagggaagggattgaccccactccctattactggtatacggatcaggtaaaaccaattttttaagtactcaacatttttttccactgtaatcgttctgtatatattgaaaaagatgagtatgcctgccgtgtgaaccatgtgactttgtcacagcccaagatagttaagtgggatcgagacatgtaagcagcatatggaagtttgaagatgccgcatttggattggatga

SEQ ID NO: 12549 - DNA, 214 bp, Homo sapiens
actgtgtgtggatcaagtgtcatgagaacccacataacagcatggctgattctgctgaggaaagtcagggaatgtttcacagcagagaggacattcaggttagggcatgttgcctaagtaggagtttctcagttgaagaagattggaggtggaaggggagggaggtaaacttctcaggcagagggaaaagcaggtgcaaaggcaggaagtctgt

SEQ ID NO: 12550 - DNA, 404 bp, Homo sapiens
  misc_feature 404: n = A,T,C or G
accctgagcatcagcagagatgctgagatgaaatcagggaactcctaggggatgggtcttctattacctgggaacacctgagccagatgccttacgccacaatgtgcatcaaggaatgcctccgcctctacgcaccggtagtaaacatatcccggttactcgacaaacccattacctttccagatggacgctccttacctgcaggtcttaaaacaactttttttttttaacaatgcagctatgtttggattgaaatgtcttaacacactcatgtctttaacagttatttatccttagactctgtggaacctagggccattcttatttcccagagagggagaaagaggagagagctctcaggactatctaaacaggcacaggattatgcaggtgcaaaggtaccn

SEQ ID NO: 12551 - DNA, 1731 bp, Homo sapiens
  misc_feature 1, 2, 1711, 1712, 1713, 1714, 1715, 1716, 1717, 1718, 1719,1720, 1721, 1722, 1723, 1724, 1725, 1726, 1727, 1728, 1729,1730, 1731: n = A,T,C or G
nnatgttgccgcccaggctggtctcaaattcctatgctcaaatgatcctcctgccttggcctcccaaagtgctgggattataggcatcagccactgtgcttggcctagcctagcattctctaaacaggtggttagaagcggtggataccaggcttctgacgatcaaattgtaaaaaaaggggtcaggtgttatctccagactgtggaattagattgtagtagaatatattttacctacaaacattttgacctcacccaagagtaaggctctcttttttttcttttttaatgaaaaaagaaaggagaatatttgctatcttatcttaaaaaaatagatccttaggtgattacaattttaaaataagaattgagagcccttactatgcacagtcctttaagttcataaagcttgatcccaactctgggagatggggcaggacaggtgttaatgtccctgcctttagcagatgaagaaaccaggctctgagaggagaagctacttgcccaaggcctgaaggcctctgaaagaggagcagagctcagggcacctggccctccttggtcccctctctactccacggtgctgctactcagggtcatctcaaaactatgtaaaggcagatgttgccaatccacaggcttcagggactcttatcaagactcatcccaacttttaaggcacactttcacaccgctcacattgtgcattacattttggagtccttgttggaagtgaactttccgcctgtaagcctgccattccatgtctaatatattgggatggcatcaccttctgtactatgcagcagaaggagactggcctgggattctggaaacatgagatccatttgcatattaatccccggctcgctgtgtgaccctgagcaagtctccttcactttctgtgcctcagtgtccttatttgagtaaaaagggaataaaactagatgagtggttttcaaactttaaaacactggaagctctctttgaaaacaaaagatgagaattgaaatggatggcactggaagctgttcttgtctactggggtttggagctgccaggggacctgctcacatccactcctcactcagcccctcccgcccctcccttctccacgcactgtgactgacttccatgtgtgaaggcctgcagttaattctcctgtgtcttgaatggttgggagatgagttggtcagacccttagtgaaatgatgtgggaaggaacaggaatgctgtggctctgaagaaggtagtagaacatcccacacctgctaataagcacattttgcaaactcagttgactcacctcagatttgcctagtgaaaactgaagggctggatgtagacccagagagcagggtggacagagcccatgctggaagtactgagcatcaggactgtatggggctggctttagcatcatcattctgtgcaaagacaaataattaatgtcacactgtctgaaattttcaccaaaaccaaaaaggcgcattaacatgattgttccaacctcatggtttttcaagtgtgagcgcccagagacctcttcagaggctaagagagcatgcgctgccacagctgttagcatttggagacgtaattacaatgcccccactccccgcaccaaacctgggtttttctaccgtttttgtagatgtcatgatgtcacgacccctgcaccctgaaaaaaataaatgtttttaaggacagnnnnnnnnnnnnnnnnnnnnn

SEQ ID NO: 12552 - DNA, 1333 bp, Homo sapiens
  misc_feature 1333: n = A,T,C or G
acctggcgatggtttgcaaaatcttgacgttaaaaatcaccactgtttcatgtgtgtgggaaataagaaggcagggagacagaatgaaaagccctggtacagcaaaggccaaacagctaccaggaggcagcctgaacgtgtcaggtcctgggcacgacacttgcctttcttggaggagtgatttgaagccatagtggaagactgagcctctataaaaaatgaacgaggacactcttaatggacagatacaaaacaagccccaggagaaaggtgtatcaaccattttaaatctgccctcaaaagcacagaacatatcagacagcattttgctcacagaggagagggtctatgagaaccaaattccagcttcagcacatggccttgggtacagctacaagatggaggaagctatttgacctgcatcagactttacgtgaacaaacagggtgtagttatgtccaaagccatcttgccatgcgcagcctgagaatggagccaatgactgagggtggcagagcagaacgatgagataaatggtacgaggctgatatgggagcatccatcactgactaccaggttgctactcccagctcctgtcttcacatctgcataccaaccagtcaagaagaggcgaaggagcaaggcacgagcacataaacttcccttataacggacacaacctagcatgcccatgctgctgaagctgctctgctgagaggaggacctgtggccgaggtaactagtatgggcagcccacgacaggcaacagccagctgccatgtagtgagatagcctaatggagcgaggcccacaccactggtaagcgtaactgcgcacatcctagagactcaacacacattcagagcacggcaccataacgcgcgcccaaatcgcaccataccggaagcatgcaacccatatacttccccccacatgcgacgactttagacatagactgacgttatgatgacacacctaatggctgccatcatcggacacacatacaagcggagaccaagtaacaggccaccagtctagtaccgcgcgacaacgggaagaaccacaaacaactacgctctataagtcaaacacaaaagaggaataatcgatgacagcaaaaactcatctcagaacgtccgacaacagctgcgcccactcccaccacacccagagatgcaacacatgacatctactgaaacaaagcgcaaccgctgaatgacccactgcaagcaaagtcacagaccagcaaatcacaacagaacaatcagcgtcataactacagaccgaacaactctgcacctgcaatgacgttatgtagtacacagcgatgcan

SEQ ID NO: 12553 - DNA, 600 bp, Homo sapiens
  misc_feature 600: n = A,T,C or G
actcatggcagaaccagcccctctggggacagggtctaagtttagaaggaaacaccaggagagcggttaattgacattccttcaaatgctgcttcacacacccaaaacaatttcatctggaaaatgggcggaaggaacgaaggggttggttctgaggctatccagagggatgagggaggagcacagcgcaggctcatgggccagaagaagagacgcttacacggggtaggagagggttctcactttccctcagtactgagggagatcaaacaccctcaaattaagggtcacctaactcctggtgcacaagctcagcaaagccagagtcacacaagtgacaatacagaagtggatctgcaataatgcaaaactacacagtctgtggacaaagtataaaaatacaaattgttacgttacataaatggaattatgggtaatttcgtttctttctgaaatttatttctacactatctttgcacttgaaacaaatactcaaaaaaaagaaatgttaaataatgcacatttgccacaagaaatcttccttgaactgttagtttcttcttttttaaaattatctgtcttggcttgaatgaacttcan

SEQ ID NO: 12554 - DNA, 149 bp, Homo sapiens
  misc_feature 1, 2, 3, 141, 142, 143, 144, 145, 146, 147, 148, 149: n = A,T,C or G
nnnactcacatgctgagggtacgaggctgattgtcttgcgcttgaagatatcaggatcttttccaaagcctggatctgatgaccccttgtgtacatggaacttcaggtatgactgaatccgtgagtccataggatgccacnnnnnnnnn

SEQ ID NO: 12555 - DNA, 531 bp, Homo sapiens
  misc_feature 530, 531: n = A,T,C or G
actattgacccagcgatgggggcttcgacatgggctttagggagtcataagtggagtccgtaaagaggtatctttactatcccgcgtactccaagtcccaaagaatctgttctgatggtgtggttacacaaccagccaagcacagccttaggttgctctcaactcagaactcaccctatcacacgttgacgaatgcaagagcctgttagagacactggaacccaagatgatgaagtttcattcttgtcgcccaggctggagtgcagtggtgcgttctcggctcactgcaacctccgcctccccggctcaagcgattctcctgtctcagcctcccaagtagctggaaatacaggcatgtgccaccatgcccagctaattttgtattattagtaaagatggagtttcttcatgttggccaggaagaaaccttcactgaagaagggcgctaccactactcgattctctctaagttgttcaaataccatgcaggatactgactgttatgagtaagacctggaaaggaaaatgann

SEQ ID NO: 12556 - DNA, 447 bp, Homo sapiens
  misc_feature 445, 446, 447: n = A,T,C or G
acagtaggtgaaaggtgaggattcatccaaaatctgctgtagtgtgagtgcctgagcaagccagcagaaagattctggtcagagtgggccatctaaatcagtgatgttgcaggaagaacactggagtggggtgaattgattgagtgttactgtaggagcctatgggtgggaagaggcggaatagagggaatgatggatggcatggctgtcaagactctaaaaggacctggcattggatgatttggccatctagaggctgaagtcgtgcaggataatggcaggaagggcaggaggcattggggtgaagaggaagccacagactccaagccagggtggtcagtgaatgtggccatgtctggcatatcatgaaggagagtttcaaggatgggtggaagatttggccagatgataggcgcctcaaaggctgaaagtttgcttgcttgcnnn

SEQ ID NO: 12557 - DNA, 1162 bp, Homo sapiens
  misc_feature 1, 2, 3, 4, 5, 6, 7, 8, 9, 10, 11, 12, 13, 14, 15, 16, 1161,1162: n = A,T,C or G
nnnnnnnnnnnnnnnnaaaaaaaaaaaaaaggaaaaaagaaaacagacatcgaaccctgcttgaccttgtgagttgtggtcgtcaggtatgaggcttgagtatatacttggccttggagacaagggaccagtgtgatcaagggcaagggcaagttgtttaacctgagcccctggttcctcatctaaaacatggaattgatcattataagacctggctataagctgtaatgaggtgatccatgtagacaccttagggctattgcctgagacatggtgaccagcactcaggagacattagtgataaaccccacaaaacccattccagttattaagctcaaggaggccttagtactgttattcttcactacctctcagaatcaaaagtggctcatttagattgagaggctggaacagtccaaagctctcccagctaataagtgacaggactgaggctgcaacccagacatctgattcatgtcagcgttagttccactgtcacataagaaccacatgagtccttccatcatgtaacttatgagcctgttagaaagaggtggacagattagagagacatgtgaagggcctcctttttcatgatgggaaactgaagccttgggggagtattttacctactcaggagtattttgcacttgtgactacctcactatacccaggacagagaaagcccatagtgccctgtcaggccacaggggcttgctggctttttgtgtctttgcagccccctttaaaacctgacgtgcagtacacgtgagcattctagaacctgctataccagggcttagccgacagcaggccaagagtaggaacaaagcaagaaaacgttccgtggggagacttgagctgggaattagggtgttggtgcccctagtgaagacctagtgggcatctgtaggccactgccacctctgcttttggccacagtgccactcaggcagtggcctccattcacccaaagactaagtaacttgcccttgattacactggtcttttgtgtccagggccaagtatctgctcaggcctcctgagttctctgcttctcagagccatggcattatctgctcagcaggaggcaagttctccttaaaggactgaggctgacttggttcctgtaggcagccatcaccttgtggtgtctggtgnn

SEQ ID NO: 12558 - DNA, 3259 bp, Homo sapiens
  misc_feature 1, 2, 3254, 3255, 3256, 3257, 3258, 3259: n = A,T,C or G
nnccgccaacctctcactctccaggcgcagctgcgcggctccctctggtggagctgcggcgggcaatcggaaatcggctactttggcctgtctcctccctgcagcgcgcgctttgagtgcccggctcggcctccgctcccgcgcggttgggagtgtccagcgccctccgcgatttgggctccagcgggcagggtgacttcctttttctgcccactctggtaacttattgctctgctgggctctttcccttagggtctctggccctgttcttgccccagcatgacttttatcgggacgccgttgtggaagcctcacgcaggagccctgcccccgtggagaagatcccactggtgactccaaccctaccaccatgaatggggtcctgatcccccatacgcccatcgcagtggacttctggagcctgcgccgggctggcaccgcacgtctcttcttcttgtctcacatgcactcggaccacaccgtgggcctgtctagcacctgggcccggcccctctactgctccccaattacagcccacctcttgcatcgtcacctacaggtatctaagcaatggatccaagccctggaggttggtgagagccatgtattacccctagatgaaattggacaagagaccatgaccgtaaccctcctcgatgccaatcactgtcctggttctgtcatgtttctctttgaaggatattttggaaccatcctctacacaggtgattttcgatacacaccatccatgctaaaggagccagccctgacactggggaaacagatccatactttatacctagacaacaccaattgcaatccagccctggttcttccttcccgacaagaagctgcccaccagattgtccagctcattcgaaaacacccacaacataacataaagattggactctacagcctgggaaaggaatcactgctggagcagctggccctggagtttcagacctgggtggtattgagtcctcggcgcctggagttggtacagctactgggcctggcagatgtgttcacagtggaggagaaggctggccgcatccatgcagtagaccatatggagatctgccattccaacatgctgcgttggaaccagacccaccctacgattgctatccttcccacaagccgaaaaatccacagctcccaccctgatatccacgtcatcccttactctgaccattcctcttactccgagcttcctgcctttgtcccagcactgaagccttgccaggttggttgcccattgtaagtcggcggcccctgtggaggctttcaggacagtctgagccccaggatctccgtgcccctgattccggactctgtacagcaatacatgagttcttcctctagaaaaccaagccttctctggctgttagaaaggaggctaaagaggccgagaacccaaggtgttgtgtttgaatcccctgaggaaagtgctgatcaatctcaagctgacagagactcaaagaaggccaagaaagagaaactttctccctggcctgcggaccttgaaaagcagccttcccaccatcctttgcggatcaagaagcagttgttcccagatctctatagcaaagaatggaacaaggcagtgcctttctgtgagtctcaaaagagggtgactatgttgacggccccactgggattttcagtgcacttaaggtctacagatgaggagtttatttctcaaaaaaccagggaggaaattggtttagggtcccccttggtacccatgggagatgatgatggaggtccagaagccacagggaatcagagtgcctggatgggccatggttctcccctgtcccacagcagcaagggcacccctcttctagctactgaattcaggggtctagcactcaaatatcttctgactccagtgaactttttccaggcagggtattcttccaggagatttgaccagcaagtggaaaaataccataaaccctgctgaagacaggagagtacagaatgacaacattgagcccacactgcagttttgaagatagtaactgatggctggtgggaaagagtttgtttttggggcctacttttctatctttacaagactcttatgggcccaccgtggagcagcacttcccaaaacttgttcactggggtcctcgtgcctatggaatccttctttttataactaagtttaagaaatactttttttataaaatctttggagtatgcgtgagcaaattaaaagttctttgaagtcctacagtaacttaatctgtttaaccttgtttaacccagtatttctcaaacttttgtgaacatgcaatcatcttatgtgggtacagaaagaggtaaagagtctgaatcaaaaaggaccaggttattgctgttgctgttttgtggtgtcatgagccattctccatgtccccttctccctcttctcagatcaaaatccctagggagttctatttttaaaattatgaactatggcgctgcatgcttcaatcctgaacgtcactgacttgctgtgaccatccaaataattttcctgtctctgcctctgggagggaacaggaagcgatgaagaggtcttggaacagtagtgaaaattctacctctatgtccttcatgaggatgtgcagtatcccagtatcactgggatccatgtggaacagagccagctggggggttgggcagctctctccaaggcagtacctagagcccagctgaacaacaaggctttgggtgtgaagggactccccagcctggagaccctatttggctgaaacagttacaaaatatcaaatgtgttgtcagatattcctccaatgttcacatagctgggatatttgttgctcccctcaccccttggattatgtagggagccagtgcacacagcctgtttgttttagtatccaagggaagagacaagggagccagctggcgggaaggggtgggggtgtgcagtctggcctgtacttctggtcattaacctgacaaaatggccaaactagtaagcagatagctgataccacgggtatgaggagtaagctctgagaggcccgaatgtgggctggctctggtccaactgctggtggactcgagccagcggggaaatccacctgtcggaggaaaagtggttgggaaaaaagtaaggatgccggaaggtcaccccgttgactgttgtcccgcatggccagcggtgtggcgaagcgcagtacgccacagggccccagagaacaatagaaacccgccgtttcgccaccattacnnnnnn

SEQ ID NO: 12559 - DNA, 550 bp, Homo sapiens
  misc_feature 1, 2, 3, 4, 550: n = A,T,C or G
nnnncctctcattgtactggaaaagcagcgtaaaatctatgtgctgaacctgaaactctcctggcctgcaatccaaggagcctgtcattggctacaccatgtaagtacagtttgtttccaaggccatctctcaccgactttgttcttattaaaataattttttaaataatttttacttttccttcaaaggaagtttttttttagtaaatatgttcatattcccatcataagaagttgaaacaacacaagataaaaattccctggattcttcccagttttcatttactacctctgagataactactattacccatttggagtgtttcctttgtacagcctgggtagggggaaaatcagttctttcagctaccacccatccaacctttgggcctatgtgaaaagaaaggaactaagctgggtgtgttctgtctggacctggggaggcccctgaaggcaaagagggaaactgtcccagctgttctgtcctaggggagggggacatagccctagcaggagctcccagcccctcttggcactctgacacacaagn

SEQ ID NO: 12560 - DNA, 224 bp, Homo sapiens
  misc_feature 224: n = A,T,C or G
cattgtgcagtctggggcctcactgaaaattggtattgttggattgccaaatgttgggaaatctactgtattcaatgtgttaaccaatagtcaggcttcagcagaaaacttcccgttgtgcactattgatcataatgagagcagagtacctctgagcgttgctagaatcactgaagttcgggagttgcagaatagcatgatcaacatggagaaaccccatctgn

SEQ ID NO: 12561 - DNA, 1285 bp, Homo sapiens
  misc_feature 1, 2, 3, 4, 5, 6, 7, 8, 9, 10, 11, 12: n = A,T,C or G
nnnnnnnnnnnngtggctcatgcaggtgggtgctggcagcagtggtgatggcaggcttgacagacccatcccttagacccctgggaggagtgcacagacaccagtggtggtagacagggcgggtgaatcctcagatccctggacaatgtgtctggactccgccaggctgggttggtacacaggcctcaatgatgtgggcaggcactggcaggggcagtgctgggtggggaggaactgtcttcaggctctctgatggtgtatgtccatgggaaatttaaaacatggggtgacatgattaatgctgtatttttgaaagtgaactctggaaacagagtataggcattagatttagaaatgactagataaatcaacagatggataagtcattcccccaccaaatgtttaaaatgatttcaaagttgcttgaatctcagattgcacttcattcattcttctctcatgtagttgtcaaaattcggtactcattcaccactcctgaaacttctagatgggctccaaggggaactcaaagctcacgtcaatgcagatatttaattgctttcatcacgttctcagagctcagaactgctacaactaggacggcattcttcaagggctagggtcatcccttattcatggttttgtcaccagctgtcacacagggcctggcctactggctgtatggcctcataaatgcatctgagtctatgttctagtctctacttgtgctatggtatcaatctagcattcaaactccccgtacaaccgctatcatatcatgctgtacgtccttttctacccagagcagaatgctgaagatactatgagaatactcaatgaaaatgctaattggctgattactatcaataaagacaataaacacatataatggcttctcggacgcgtgtattcagtggcctgccaactaggtactgggagctaagtgcccatgaagatgcagagttactattcttacagaaaatatgcaacgtctaaaaaattgcattattttggggccaaatatgaatttcataaaatattggaaatactgtttaaagaactttaatctggctatgaatgatctcaactatcatatgcccttaaactggtaagtgcttggaagtctgcaaaaaaatatggacgcataggttgttttgagcctatcttcaccaattacaaaaacactcatttgtcacatattagaacccctgtaggctggaaattttcaagaaggaaaattaatgtaaatatctagaacatatttatgaaaatatacacctttagt

SEQ ID NO: 12562 - DNA, 1456 bp, Homo sapiens
  misc_feature 1, 1452, 1453, 1454, 1455, 1456: n = A,T,C or G
nccacttccgggagtcggaaaggaaagctgtgggaccatcctggcaaccccggtgtttggctgggttctagcgtagccgtctgtgtggccggtgggggacctgcggtcggagtgggagggccagtctgcacccaagaggtggaagaggacgggctttaggctggaagcgccttagaggagccatttttccaggtggggccccaggcagaggctccgacagggagcctggccatagtcgcgcagccggggaggtggagcgcgtcccagacccgagcccccgacctcagccaaacccattccttctgtccttggaggccagaggggactctgagcatcggaaagcaggatgcctggtttgcttttatgtgaaccgacagagctttacaacatcctgaatcaggccacaaaactctccagattaacagaccccaactatctctgtttattggatgtccgttccaaatgggagtatgacgaaagccatgtgatcactgcccttcgagtgaagaagaaaaataatgaatatcttctcccggagtctgtggacctggagtgtgtgaagtactgcgtggtgtatgataacaacagcagcaccctggagatactcttaaaagatgatgatgatgattcagactctgatggtgatggcaaagatcttgtgcctcaagcagccattgagtatggcaggatcctgacccgcctcacccaccaccccgtctacatcctgaaagggggctatgagcgcttctcaggcacgtaccactttctccggacccagaagatcatctggatgcctcaggaactggatgcatttcagccataccccattgaaatcgtgccagggaaggtcttcgttggcaatttcagtcaagcctgtgaccccaagattcagaaggacttgaaaatcaaagcccatgtcaatgtctccatggatacagggcccttttttgcaggcgatgctgacaagcttctgcacatccggatagaagattccccggaagcccagattcttcccttcttacgccacatgtgtcacttcattgaaattcaccatcaccttggctctgtcattctgatcttttccacccagggtatcagccgcagttgtgccgccatcatagcctacctcatgcatagtaacgagcagaccttgcagaggtcctgggcctatgtcaagaagtgcaaaaacaacatgtgtccaaatcggggattggtgagccagctgctggaatgggagaagactatccttggagattccatcacaaacatcatggatccgctctactgatcttctccgaggcccaccgaagggtactgaagagcctcacctgggggcattttgtgggtggagggccagagtgtgtatacccaggcttgtctggaaggagaaggcctttgctgcctgaaagtctcaaaaaaaaaaaaaaaaaaactcgagggggggcgcggtannnnn

SEQ ID NO: 12563 - DNA, 412 bp, Homo sapiens
  misc_feature 411, 412: n = A,T,C or G
aggtacacgtccctagaagcacatagctccagcaacaaagctaatctgagagtaatacccaagatgcctcctaccttgcaaatttcaaggaatttctcactggtgtatttcataggatgctcagtgaaagtagcataaggaacttcagtggaccatgggttccagcgggacagaagagactgctcctccggactcccccagtagatcctaaggccttctccttgtctctttgtcaagagccagaagccttgaatggtctctccagaagtctcagctacgtgacctttcaagtcttccatggcagtctcaatggcccccggccgaggtacgcgggatagaagagcttatcacctttcatgatcacgccctcataatcattttccttatctgcttcctaggcctgtatgcccnn

SEQ ID NO: 12564 - DNA, 279 bp, Homo sapiens
acctggggcaacacaagcccgtgaagatgagtctaggttacattcagtgcaaaaaaccacaacccagaactgccttgccatggcttcccagggctgtgtttactaactgcaaaatcatctccctgctgcagtctcaaagtcttcagacatttcttgatctggctgtcttaaaaagcaaatttaacatcagccacgtagccaggttttccttgccaacaatcatgtgagtttgctattctgttcctgtgcatcttgcgcactccccgcgtacctgcccgg

SEQ ID NO: 12565 - DNA, 3262 bp, Homo sapiens
  misc_feature 1, 2, 3, 4, 5, 3261, 3262: n = A,T,C or G
nnnnnagggacaggactgcggccgggtcgttgggcttgcttccggagagcgggaaggctaaaacgcggtagctaaactgcagccaactttggttgtgtgtggaaaaggctttagccatggacaggagtggctttggagagatatcatcccctgtaatccgggaggcagaggtgacacggactgcacggaaacagagtgctcagaaaagagttttacttcaggcatctcaagatgaaaattttggtaatactacaccaagaaaccaggttatccctcgaactcctagctcatttcgacagccttttaccccaacaagccgaagcttactaaggcagccagatatttcctgcattcttggaacaggagggaagtcgccccgacttacgcagtcttcagggttctttggaaatctctccatggttactaatctggatgacagtaactgggcagctgcattttcatcacagcgttccgggctgttcacaaacacagagccccacagtataacagaagatgtaactatcagtgctgttatgttacgtgaggatgatcctggagaagctgcatccatgagtatgttttctgatttcctgcagtcttttctgaagcactcttcgagtacagtttttgatcttgtggaagagtatgaaaacatctgtggtagtcaggtgaatatactgagtaaaatagtgagtcgagcaacacctggacttcaaaaattttcaaaaacagccagtatgctctggcttcttcaacaggagatggtcacatggaggctgctggcttctttgtatagagacagaatacagtctgcattagaagaggaaagtgtattcgcagttactgctgttaatgccagtgaaaaaacagttgtggaagcgttatttcagagggattcacttgttcgacaaagtcagctggtggtagattggttagagagtattgccaaagatgaaattggagaattttctgataatattgagttttatgcaaaatcagtatattgggaaaatactctgcataccttaaaacaacggcagctgacttcttacgttggaagtgttcgtccgcttgtcactgaattggaccctgatgctcccataagacagaaaatgccccttgatgatctggatagagaagatgaagttagattactcaaatatctctttactctaatccgtgctggaatgacagaagaggcacaacgactctgtaaacgctgtggtcaagcatggagagctgcaacacttgaaggctggaaactgtaccatgaccctaatgttaatggaggaacagaattagaacctgttgaagggaatccatatagacgcatttggaaaataagttgctggagaatggcagaagatgagctttttaatagatacgagagagcaatttatgcagctttaagtgggaatcttaagcagctgcttcctgtctgtgacacctgggaagacacagtttgggcctacttccgggtgatggtggacagtctggtagaacaggagatccagacatcagtagcaactctggatgaaactgaagaactccctagagaatatctgggagcaaactggacgttagaaaaggtttttgaggaacttcaagctactgacaaaaagagagttctggaagagaatcaagaacattatcatatagttcaaaagtttcttatcctgggagacattgatggtttgatggatgagtttagcaaatggctttccaaaagcagaaacaatctacctggacacctgcttcgctttatgactcaccttattttgtttttccgtactctgggactacagaccaaggaggaagtttctattgaagttttaaagacatacatacagcttttaataagagagaaacatacaaatcttatagcattttatacctgtcatttgcctcaagacctagctgttgcccagtatgcattatttttggaaagtgttacagaatttgaacagcgccaccattgcctggagttggctaaagaagcagatttggatgttgcaacaataacaaaaactgtagttgagaatattcgaaagaaagataatggtgaatttagtcatcatgacctggccccagccctagatactggcactactgaggaggatcgtttaaaaattgatgtaattgactggttggtatttgacccagcgcagagggcagaagcactgaaacaaggcaatgcaattatgagaaaattcttggcatcaaaaaagcacgaagctgcaaaagaagtatttgtgaaaattcctcaggattctatagcagaaatctataatcagtgcgaggaacaaggaatggaaagtccacttcctgctgaagatgataatgctatccgagaacatttgtgcatcagagcttatttggaagcccatgaaacctttaatgagtggtttaagcatatgaattcagttccacaaaaacctgctttgatacctcaaccaacttttactgagaaagtggctcatgaacacaaagaaaagaaatatgaaatggattttggtatttggaaagggcatttggatgccctaactgctgatgtgaaggagaaaatgtataacgtcttgttgtttgttgatggagggtggatggtggatgttagagaggatgccaaagaagaccatgaaagaacacatcaaatggtcttactgagaaagctttgtctgccaatgttgtgttttctgcttcatacgatattgcacagtactggtcagtatcaggaatgcctacagttagcagatatggtatcctctgagcgccacaaactgtacctggtattttctaaggaagagctaaggaagttgctgcagaagctcagagagtcctctctaatgctcctagaccagggacttgacccattagggtatgaaattcagttatagtttaatctttgtaatctcactaattttcatgataaatgaagtttttaataaaatatacttgttattagtaattttttcttttgcattaccatgtaaaatttagacatttgaattttgtacttttcagaatattatcgtgacactttcaacatgtagggatatcagcgtttctctgtgtgcttgttaataaaactatataaaaattaaaattttctgttttaccaaaaaaaaaaaaagggggggtctaaagttcctgcgagggcaagttaaggttaccagttttgaaaaggggcctaaggggcgattaaagaagaggggggtaaagttggtgggaaggctgggttggaggcccttgggggcaatggann

SEQ ID NO: 12566 - DNA, 566 bp, Homo sapiens
  misc_feature 177, 178, 192, 565, 566: n = A,T,C or G
acttatttaagacattacttaatagaaactgcacctctcaagtctattctaatatgatgcatgcaggaaatgcaaatttgcatccaaaatatttaatgtttaaataatactagacaagtttttaaaatcattagtaaattattttgttgtccattcaagaagcagagaaagttatannttctacgtaatacnaatattctgatttagtttcctcatctgtaaaataagactgttatggattaaatgaattaatatttgtttagtatttacagtagtccctagcatatagattaaatgctacataagcaattattaaataaagtaatatcattgtggcagatcatatttccaaaaatggcttcagccgtatttctggtccagcatgctcttccagaatcttgccaaccccacccatcacatggtagagtctatttctctcctcttgaacctagggggatttctaattattctggccaacagagcaaaatagaaataatgttctgtgacttccaaggctctgtcataagaaagatatagcttctgcctatctttctctttttgaaann

SEQ ID NO: 12567 - DNA, 545 bp, Homo sapiens
  misc_feature 541, 542, 543, 544, 545: n = A,T,C or G
actgtggctgagctggtatccaaaatgcaagacaaagttctctttactttcctctcttcgagcagaaggaaggagtcactttccttgctgtgagctctgctgcctggggttggtggagaggtggtgcaacctctcccttagccactgtgtctggtacagttaatctttgaaaactggtgggttcaaaaggtttttttttcttccacattggaagagaggaagtattgtatatactgccaagatttgtcctacagaaaaggattatatggccccaaaacagacttcttttgtcattttagatggcagagtgaattttgttcattatgtttcttaaggattaacaattccagaagaactggaaaggggaaatagatgtttgagctgagaagttattatcttaccagttttaaaaaaatactgcaaatactctgataccttgtttttcatgtcctgccattttgtaaataaataacacttttcatatacagagactgtattatataccttctaaatattacatgtcaagggcttaagatctgannnnn

SEQ ID NO: 12568 - DNA, 624 bp, Homo sapiens
  misc_feature 624: n = A,T,C or G
gcgtccggaaaactgattgtgcgaaaagaaataattagacaaatcaagcctgaaagaagaaaaataaaacaaccaataaaatcatttcagtgaataaatactgtgatgctgcactagaaagcatgcagattttcagcaaagttatggttttatgggtacagagaacagaagccatggtctagcaccaaagaagggaggatgctaatgaaagccaactagggaagagtcaaggagaatagggtcagtgccacagcatgaaactgtagcgttgtagcagaaagttattatataaggtgggaggctgcagcccatttacacctaggccgctccagtcatactgggtgtgggaagatttaagaaacaacaggcaggatttggggaataggcttcagccccagtaaaggataagaagaggaaccaagggctttgacactgcagagctcatactcttaacactgaggcaattgcttgttctcaagacctccctctaacaactggacccaactcaactattctcattcaatgggaatatcttagacattcctaacccagcagttctttactcaatttctacagtaacacatttggtcggtgagtccttctttatcacacatattcatgaan

SEQ ID NO: 12569 - DNA, 569 bp, Homo sapiens
  misc_feature 569: n = A,T,C or G
accacatccacttggtcgagctcctggctgtgtgcacggagggtaagaatgtctacacagagatcaagtgcaactccctgctcccgctggatgacatcgttcgcgtggtgacccacgaggactgcatccctgaggtgagcgagcccagcctggctgtgcccttctcgttgctatgtggtgtgtgctgtcgtggctcactgggagacatggtggtggctggcctgggggagccctcatggctctgaaagctgcagctcattttgtagtgggatttcagttccctaaaacattttctcgagcattgattttgcatgaaaggaacacggaagaagttagtcgttctttctgtatctttaagaacagtgaggaaaaaagcttcagctctgtggactaatttagcctgttgagcaaaggggatatgacctgaatgaacttttcagaaatgtgacgaagagtaggttgagatctagtccatatgaatgtaagacttagtaagttaattctttaaaacaaaaacccttattacagaaataatggccattataaaaaatttaggaactacagacaan

SEQ ID NO: 12570 - DNA, 349 bp, Homo sapiens
  misc_feature 343, 344, 345, 346, 347, 348, 349: n = A,T,C or G
acagtgcctatgcatagtaatctctcaaaattgtttgttgagtgagtgaatgtgtgaacattttatgaaattatctttaagagtagttactcatgatcagtatactttaaaagatcggcgaaagcattgatgagctttttaagaaagtaatgtttgggccaggagcatggggctcatggcctgtagatcccgaacactgggaagtgaagtgggggaggagtcacttgagggccaagagtgtcaaaactagggctagtggacgtagccagaccacattcgatacaaaagaaaaatgttacaaccagctggatgtggttggcatgtgcctataatcccagctacnnnnnnn

SEQ ID NO: 12571 - DNA, 1391 bp, Homo sapiens
  misc_feature 1, 2, 1093, 1386, 1387, 1388, 1389, 1390, 1391: n = A,T,C or G
nnacctgggaaggagcataggacagggcaaggcgggataaggaggggcaccacagcccttaaggcacgagggaacctcactgcgcatgctcctttggtgcccacctcagtgcgcatgttcactgggcgtcttcccatcggccccttcgccagtgtggggaacgcggcggagctgtgagccggcgactcgggtccctgaggtctggattctttctccgctactgagacacggcggacacacacaaacacagaaccacacagccagtcccaggagcccagtaatggagagccccaaaaagaagaaccagcagctgaaagtcgggatcctacacctgggcagcagacagaagaagatcaggatacagctgagatcccagtgcgcgacatggaaggtgatctgcaagagctgcatcagtcaaacaccggggataaatctggatttgggttccggcgtcaaggtgaagataatacctaaagaggaacactgtaaaatgccagaagcaggtgaagagcaaccacaagtttaaatgaagacaagctgaaacaacgcaagctggttttatattagatatttgacttaaactatctcaataaagttttgcagctttcaccaaaaaaaaaaaaaaaaaaaaaaagagaaaaaaagaaaaaaagaaaaaaaaaaaaaaaaaaaaaaaacaaaagaaaaaaaaaagcgggggggcggacccaaaaaaaaagcccggagggagggaacaaggacatgagagcccacaccatgtgtggtacaagagaagcggcaccaaaaaggagaaccatactaaaacacacagcgcggcgcgcaagaaaaaaaaacaacgacaagagagaaggaaaaaagatcaagcaggagacaatctaggaagaaagaaccccccacaaacgaggggggggaaacacacagagggcgaaaaccacaacaagagaaaaaagcacgccgagagaaaaccataaccgcaccgcgcaacacacatacgtgcgtgacaaccacacaagcgacactgcccgcggcgggaaagaacaagcgtacgccacagacgcgcgcctgcttcatcaacaatacaaccgggaggagntacagacaaccaacacacaacaacacaaacaaagaccacacacagcaggcaaagcaagacacaaccactcacgccagaacagcagaaacaacaagagaaacgaaaagaacaacaaaaggaagagaaaacgaagaagaaaaagaaaaaaaaaaagaacgaagagaaaagaggagagagggagagacgaacaaggcagaaacagaaaacggaaacaaaagaggaacacaaagagcacagaccaaaccaacgagaccaacagaaacaaagaagaaagaagcgcacgaagaaagcannnnnn

SEQ ID NO: 12572 - DNA, 4044 bp, Homo sapiens
  misc_feature 1, 2, 3, 4, 5, 6, 7, 8, 9, 10, 4024, 4025, 4026, 4027, 4028,4029, 4030, 4031, 4032, 4033, 4034, 4035, 4036, 4037, 4038,4039, 4040, 4041, 4042, 4043, 4044: n = A,T,C or G
nnnnnnnnnnatggttcctatgctttttttctattttaggcacaatgctttaataaattacacaaagactacaaacctttattacatcaattgttacaaaaggctaagtggagaaagattacttatctgaagctgcacaaaatcagtgggcaatatggatttcatttaagcttgtcaattctcctggattaaattcttggcgctgtctcacatattcccaagtcctacatgtaggatgctaaaagttgcagttactaggttgggaaagccatgcccagacgcccctgtgaaaaacatatcaatatattaagttccttagcaaatcacatctagattaagttcataatgctttttttttttttaactttgcaaatctccaaacttttgctactttcttaataaaatacaacaaaatttttggcattccagccacggaaaaacagatctctacctctgaggtggcagtaatccaagcagttactaggatctacgaaacatgaggcataattagaatgttggggaaaaaatctacagaaatatctatatcttcgtcatgaacctgactgttgagtttatgaaaaagtggaaaaggaacctcactcgttccttccctggtaccttcacagcgtctcccgtcccagtctgcctagttgaatctagggacacttaaaggtaaatcctagcctcttggctgtccttccgtctcccaggattctgctaggccgcacagttggcaagcttaaaactccaaagattccgcactctccgtctttcaacagtcatgtcacagagacacgaaggttagcacaggaacattagtttccaaactcctacccaccgcagaacaggcgggaaggttcggtggccacccggcctctccgccgcgcacatggccgtccgcagctcccacccccgctgccgcgcaggcgccgggcgagccgggacttgcggtcgccgagagcggatcattccgccgctttctttgtgtggctgaagcgctagaaatggcatattttctttcccttcgttaaaaaatcagaccctctttcccctctctccccgcgggaacacagctagggagtgggtaggagcaggatctgccgacgagggcagaggcggaaaatcctcgggcgatgagctgaagagggccgggtccgggagggatgctgggagcttgactcactcgcacaccatgtgtccctccgcgcgcagcacgggggacttttcggtggggattttgggcgccgaccagacgcggcattttcggaaaatagcgccctgtgcagctgaagcgctttgtgtgtagcggggccgcgtcagcccggccgggtacgaggcgcctcgggtccccgcaccacctcctgctgccttcccgtcgccgctcccgaagcttttccagatgtccctggtagatttgggaaagaagcttttagaagcggcacgagcaggtcaagatgatgaagttcgtattttgatggcaaatggagctccctttactacagactggctgggaacttctccacttcatctagcagcacagtatggtcattattccaccacagaggtactgctgcgagctggtgtgagcagagatgccagaaccaaagtggaccgaacaccattacatatggcagcttctgagggccatgccagcatagtagaggttttacttaagcatggtgctgatgtcaatgcaaaggacatgttaaagatgacagctctccattgggccacagaacacaatcatcaagaggtggtggaacttttaatcaaatatggtgctgatgtacacacgcaaagtaaattttgtaaaactgcatttgatatttcaatagacaatggaaatgaagatttagcagagatattacagattgctatgcagaaccaaatcaacacaaacccagagagtcctgacactgtgacaatacatgctgcaacaccacagtttatcattggacctggaggggtggtgaacctaacaggtctggtatcttcagaaaattcatccaaggcaacagatgaaacgggtgtatctgctgttcagtttggaaactcttctacatcagtattagctacattagctgccttagctgaagcatctgctccattgtccaattcttcagaaactccagtagtggccacagaagaagtagttactgcagaatctgtggatggtgccattcagcaagtagttagttcagggggtcagcaagtcatcacaatagttacagatggaattcagcttggaaatttgcactctattccaaccagtggaattggtcagcccatcattgtgaccatgccagatggacaacaagtattaacagtaccagcaacagacattgctgaagaaactgttataagtgaagaaccaccagctaagagacaatgtatcgaaataattgaaaaccgggtggaatctgcagaaatagaagagagagaagctcttcagaaacagctggatgaagcaaatcgagaagcacaaaaatatcgacagcagctcctaaagaaagaacaggaagcagaggcctacagacagaagttggaagctatgactcgtcttcagactaataaagaagctgtttaattgaaatgaacatgtagtttgattttacttttggtcaagaaagaatacaatcttgaactgtacacaacaaaggtacagccatgggaatacagaatgatagaagagactacagatggataattggacttaagccatgagctctgagttcttgtaacataaaactttactttagaagttgtgaaatgtatttaaaactgaattctgtaaatagtttttttttttttacagttccaaatgagttgataaagattgttgaagagatccaaaaccagaataagccactgtttttgtgaattctttttgattttagtacaaaccttaatttctcagaaacggaacagttttaagggtgatcgttgttggttaggccaaatgttgtgtaataattatggtggactgatgctggaattactcctgtaggtataaacctctgtatgaagagaagatttctcccaggaaatctttgtacagctttaagttgtgtcagattctctgaaaacattttttagaaagcaaaatttttatatttgttcaatttcagctatacccaagtagatttacatgtatatgaagcaaatatttttaaaaatttctgtttgtacatattctgcatgttttataatttcaaaatgcatcacttacataggtatttctcccacagaaatgatgaaagtgaccagaaaaaaacaaaaacaaaacccctttactctgtaggtcattgaaacgaagtaagctggcagctggttttattggaatgacagtgttctcggaaggagcagcctacaagataacttgaatttgccaattctgcaaaatctgtgcttttttgaaaatttaagagtggggacgtgaaactgtattctgtgccttccatcatgatttccacatgaaagcactttaaggcactgattttaagataatgtttttggaaaacccaatgcatatgggtttctgaaatattttatggacttatttctccccaggaaatgattcttacggaaaaaaattgcttttgtatgtagaacaggaactttttgtattacagtgatgcaatagacatgtctaatgtaacttctacttttccttttgaaagctcagtgtctgtgctatgacttgctctcatcacaatattgttgaattccacaatgtatggacattaaacactggcagactgttcactttttcttttttttttttggtaaaatattacttcaaacccctttttcttgctttatttttcagtgttttattgctttatgaactgtttaaccctgaaatccctctaggttatctatactgtataaaaaagcaattacccttaaaactgtactctggcctacttttctattttgcaattaaatatctttttcacatatgttcattgtagacttatgtttttatcacatcttattaacacattaaaaatgttatcctacnnnnnnnnnnnnnnnnnnnnn

SEQ ID NO: 12573 - DNA, 770 bp, Homo sapiens
  misc_feature 770: n = A,T,C or G
acagttacattctgtggttttaaaatcttttttaatgggcttggcatttcttgccgttttttccttcaattatttttcttattatttgattttatgaccattttaaagctacctttatttagctttctgattacaataatgaaatgaccagtgttctctttttttaatgtatagtaagcaagaagagtgcaccacaacatcaacagccccagtccctacaacagaaattccgaccacaatgagcaccatggctgctgccgaagcagcagctgctgttgttgcagcagcagcagcggcagcagcagtagcagctgcagccaatgctaatgcttccacttctgcttctaatactgtcagtggaactgttccagttgttcctgagcctgaagttacttccattgttgctactgttgtagataatgagaatacagtaactatttcaactgaggaacaagcacaacttactagtacccctgctattcaggatcaaagtgtggaagtatccagtaatactggagaagaaacatctaagcaagaaactgtagctgagtaagttgagtaacttgtcttctgaaaatcagtaccagattgcattaaataaaagtaattgccagtttagttagtggccattaatagtttaaataaatttgtttgagaatcgtaatatcaccgttaagacagttgatcagttttcaggccgaattttggagggttatgccagcaaacttgaaaaatagttcagtgaaattttaacaagtagagccaaggcn

SEQ ID NO: 12574 - DNA, 558 bp, Homo sapiens
  misc_feature 557, 558: n = A,T,C or G
tttgagatggagtctcgctcttgcccaggctggaagcaaaagcagcagcaactgggtacttctgattggaaaaaaaggcaagaggcagatcatgggatccattaaaagctttcaagcaatatcagatacacatttaagtaaaatcactttgaagtgttaacagatggattagaaaaattaaaagccagggtaagctaggaggttactacacagttctatacacaaactcatgtatttagcaaatattcagagtgagtgactgaatacacttttccagacctgaattaaagtagtggcagtgggagtgaagacaacgaggggagataggccaagaactatagttagaacagacattagggacataaggaacatgggtattaaagaaaggaagatgattcctaggcttctgataatctgagaccatactgttttcagtttgtatcccattttttttttttttggacagagtattgctctgttgcccaggctagagtgcagtggcatgatctcagctcactccaatcctgggttcgagcatctcctgctcagcctccccnn

SEQ ID NO: 12575 - DNA, 903 bp, Homo sapiens
  misc_feature 806, 900, 901, 902, 903: n = A,T,C or G
acagtccactagcacggcagctatagtgtgggcatctaagagtgccctgtaagcagctgtggccagactgggtccctgggagaggccagcagaccaaggagtgctcagttggaccagcttcttctgatttgcaagaccatcctgcagaaattaggcccaacagttcccgtagggctaaagtctcttatgggagacagttgagcctagagaaatggccatcactggccacactttactacagatgctcttgcaccaaaccctctggccaccacatgagctggcttgctgcattatctctttgcttgtcttctgggggctgcatctcagagagatgtaggtcagcaattactcagtgcagccagcccaggatggaagatctttacttttggccaagttaggggtttgctgtctgctgaggagcagtgggtagtttgtgggacccatggaggatgggctggcttcctctccttgggtaaactgcagtttgaggtgtgaataaggcacttagggtttgggattttttattagtctgagggtagcaaggacagttgtactgcagaggcccctggaggctctgtccagggagttgctaagctgctactggctcaatagctctggcaatgattggctagtggcccgggcctggagaacctgcctcgtgagaatatatgagaacaggcactcacgtaacagtccgaccacttctgaaggtctgctgcagtatgctgggtgtccactacagtttctagtcacctcagattttccagtactggaagttatcaccacctgaattgcctgcaaaacangcaaacaaattgggccaagcattgcccctttttctcctgggggaagccgcccatcccccaggggaagggttattaagaaccttgtttggccaannnn

SEQ ID NO: 12576 - DNA, 556 bp, Homo sapiens
acgcgggttcgtgggtcattatcatttcagatgaagtgctggcaagggaccctgccattcagcagcacagtgctgggcacacctgggttgtcacatgtgccctgttaggaggcggtagatgcccctctccctctgtcagagctgagcatggcacttgtaaatagcgtcttcctggaagtgctgggtagggaacacctgtgggggctgttgctcaccccctcttcagggaacgctggtgctcatatttatgtatttggtggcctgaggggaggtactacttcacttgaattggatgtgtgctgctcatgtctttttggagtgtgttctgtgccttttgacagctttcagctttctcctcctcttcaggacctgttaaaggtttcagccctcctctcacaggctagggggcggtcaggatccccgtaccacaaggtgctggggggtatgtgggggctttttcttcatcgtgttcaggtgaatacaagtgtggcctctgtactgggatgctttctttcaccaagcaacctcattacattaaaaaaaaaaaaaaaaaaaa

SEQ ID NO: 12577 - DNA, 1136 bp, Homo sapiens
  misc_feature 1127, 1128, 1129, 1130, 1131, 1132, 1133, 1134, 1135, 1136: n = A,T,C or G
agggagtcgacccacgcgtccgcgacaggctgcgcccgcccgcgcccggggtgatgcagttgccccccgcgctgtgcgcccgcctcgctgcggggcccggggcggcggagccgctgcctgtagagcgggatcccgcggctggggccgcgccctttcgcttcgttgcgcgccccgtgcgcttcccgcgggagcaccagttcttcgaggatggggacgtgcagcgccacctctacctccaggacgtgatcatgcaggtggccgacgtgcctgagaagcccagggtgcccgcgtttgcctgccaggtggccggctgctgccaggtgttcgatgccctggacgactacgagcaccactaccacacgctgcacggaaatgtttgctccttttgcaagcgggccttcccttccggacacctgctggacgcccacatcctggagtggcacgattcgctcttccagatcctgtctgagaggcaggacatgtatcagtgcttggtagaaggctgcacagagaagttcaagaccagcagagaccggaaggatcacatggtgaggatgcacctgtaccccgcggacttccggtttgataagccaaagaaaagcagaagcccagcctcagcagaagccccaggggacagtggagagcggtcagaaggggaggccatggaaatctgctctgagcctgtggcagcctcccctgcaccggcaggtgagaggcggatctacagacatagaataccctctaccatctgctttggtcagggtgccgctcgaggatttaaaagcaacaagaagaaaaccaaacaatgctgatagactcagaaaaggagtggggggcagtcaccactgctgggcgtggcatccgccttgggcctttctccgaccttctggtgtggccgccctgggggccaggccctcgccatcctccccatccttgttcctcagcaaatggcattagcagctgtcatcagaagctgtgagggacccacagattttggaaacgacctggacacactattgggaaggagatgtggacggcctgtctcctcctgcagggcccaccctaagaatgtatttttaaacacatgaaataagtatttttcactgaccaaatgaaaaacccccccnnnnnnnnnn

SEQ ID NO: 12578 - DNA, 424 bp, Homo sapiens
acgcggggagagctggtgtaattgaaagacgtttaggtgcaatcattctgctgtttgctccttgccaggttcaacatgggattgtgtgagtatttgaagaaaacagcaattttttcatatctttgaaagatgtaaaaagcgtagattagtgcttaaatttaagaaatctggtaatttataatcatgtggctctaaaataaaaaggtattttatttgtctggtggattaaagctttagaaaagctacgccttggatacaagtgaaccgataattctggtctaatgttgccgtggtaacaactcatgctgatataattgagaacatcttatacatcctggttcgaacattttctccctgccattttgagttgttctagtggtatatgaaggaggctgggataactagcttgaaagaaattcagtct

SEQ ID NO: 12579 - DNA, 1072 bp, Homo sapiens
  misc_feature 1, 1068, 1069, 1070, 1071, 1072: n = A,T,C or G
ngcaatgcagtccgttactcttgttagaggtaggtcatgatttgcctcgaaatcgttgtagtcagtacagagagcttgccattaaagacagccagcgccgtggggtacgatcggctagtaactcagaagaatgatttttcttgatggtcagagctgaggatactttctccagtggctcatcctaaaaagcatggtagtgccgtggacagcatcatcagcagtacactcacaaggaaataggatgtcaagtccttgggtagtttgatagttttccatgacaccagcttatagcacaatgccaaaataaagttcaggagaagggtcaaataatgcagacttgtaagttcctgttaattcttgactatacaattgattccattttgaatgtttaacacacagttgctcagcagtctggatgttactgtattcccccacaaagacagctctgtaaatgaacataaatcaggctataagagaatatctccttacacttggtcttcagggcagaagtagcaacaaaaaagcacaagtcctctttgaaaccatatcttgatttagtgtcctcagcctaacaggtattgcagtgtggcccaacagagatgggtctgtgagatacttcaacacccggcagggctgctgggtctaacattggagtgttgggctgcagacactgactggggagaaatgttgtgaactttatttgcagttctgagagaaatgctgtgttgaaacaggagaggttttcagaagctgctctcagtagctggctccaggattggggtgatggtataatacttacaaaaggcagcacatcagatagagaatttgataggcagaaattaggtagctccggcaagttatttttcaatggaagactaaggggtagatccgagtacattagcagaaaaagttctgtgatttagattgggaaggttgagttagaaataattataaagcccagtcatgttgtgacttggaccagtgaaagaacgatgttctacaataattctggaaatggagttggtttagttaaaatcaaatcctttttttgatgatggggtaaagggnnnnn

SEQ ID NO: 12580 - DNA, 305 bp, Homo sapiens
acagtcctttgcccccccgacaaactcatcccctagttgcaggtgtgcattgccgggcttcagttaactgtccgtgaaggttcatttcatcacacacatttacattttacaacagtgctctctacttcattgctagtcgtttaaaatttggccacatggcaaaaatgtgtgtaatgcaggggtctttttttaagtgttcattgagcacgtaattcaaaagtctgaatattaaataaacatctctgccctttctttcttccagcaggcagctcagagaacggctctccgcgctctctctgacaggt

SEQ ID NO: 12581 - DNA, 285 bp, Homo sapiens
  misc_feature 203, 233, 234, 266, 272, 273, 283, 284, 285: n = A,T,C or G
tgttttcccggccaggaagcttcatcttccggatcatccgggaaagggacagaggcggccgaggtacatttcctctttgtggagctatttatttttctggagagccaagacaggtatttccacttcagtggtgtgaatttgagggggttaggggaaaatttccttggcctgtcaattttctttttccaacctagaatgtcacnaaatacatttaatagtagtccttaactttnntatttttgttttcaaagtcaccttgaaagacnatgacnnaatccatacnnn

SEQ ID NO: 12582 - DNA, 523 bp, Homo sapiens
  misc_feature 1, 2, 3, 4, 5, 6, 7, 8, 9, 10, 11, 12, 13, 14, 15, 16, 17,18, 19, 20, 21, 22, 23, 24, 25, 26, 27, 28, 29, 30, 31,32, 33, 34, 35, 36, 37, 38, 39, 40, 41, 42, 43, 44, 45,46, 47, 48, 49, 50, 51, 52, 53, 54, 55, 56, 57, 58, 59,60: n = A,T,C or G
  misc_feature 61, 62, 63, 64, 65, 66, 67, 68, 516, 517, 518, 519, 520,521, 522, 523: n = A,T,C or G
nnnnnnnnnnnnnnnnnnnnnnnnnnnnnnnnnnnnnnnnnnnnnnnnnnnnnnnnnnnnnnnnnnnngagcggtcgttttatattgtgcatgttctgacgattaatatggaagatggaccccgcgtgttggacatgcctggccctctgatctatacccagatcacgctgagggggccacgtgcactcactttgttcttcctttgctccaggcatgtgactttgcaggattgatttcttctgaaaaaatatattcctgaaattaaaactgagaaatcctgattgaaagagagtgggctttcttgtctactcaaaaataatgggaatattagccattcaataatgtctgtggtaaatcagagattttaaatgaagcctttctgtatgactaccaatcatttaaatcaaatcatggtttgctatgaagaaagccatctttctaccatcaaaatacatttatgaagatgaagtgagattggcaaagagaaaactgaatgtccctgaataaaacctctgnnnnnnnn

SEQ ID NO: 12583 - DNA, 353 bp, Homo sapiens
  misc_feature 151, 353: n = A,T,C or G
acgcgggacctattttaaggacaaatgattaccaactttaattccatctgcaaccttaattctccttttccatgtaatgtaacatattcacaggttctggcaatttaggatgtggttttctttccctgcattaattattctgcctatcacnaacttccaaagttgaactatattgtgcaaggtggacatccaagctaccaacaatgttgaaagcttagatttgttcaacacatttacagacgttacattcttctttatgcctgaaaggtagaccttatacataaagcatgaacaagtaaattggtatgcttttttgtaggattcttggctcaaggcccaaggagctttacagn

SEQ ID NO: 12584 - DNA, 423 bp, Homo sapiens
  misc_feature 1, 422, 423: n = A,T,C or G
nctttttttttttttttttttttttttgattttcctcctttattttaattatttatttaggctcttggcattcaaggaaatccctatcaaaatactagctgaacacaagctaatggaacagagacttgagaaaccacacatgacaaacatcaactttacaaaaataatttttgcaagtccaaacacaaacagccatagtccactgcaagcaacaaaaataaactctgaggaatgagaagaatctgatttccagagttaccaccacattaaaatatccaattgttaaccacaacaacaacaaaatcacaaaacctggctgggtgcggtggctcacagctctaatcccagcactttaagaggctgaggcagacggatcacctgaggtcagggattcaagaccagcctggccaacatggggaaann

SEQ ID NO: 12585 - DNA, 849 bp, Homo sapiens
agaacggcttgatgccttggcgtgggaggagagacccctccctctggatcctgcagctctagtctcccgtggtggggggtgagggatgagaacctataaacattctgtaggggccactgtcttctccacggggctcccttcatgcgtgacctggcagctgtaacttttgtgggacttccactgctcaagcgtcaggctcagatagctgctggccgcgtacttgttgttgctttgtttggagggtgtggtggtctccactcccgccttgacggggctgctatctgccttccaggccactgtcacggctcccgggtagaagtcacttatgagacacaccagtgtggccttgttggcttgaagctcctcagaggagggcgggaacagagtgaccgagggggcagccttgggctgacctaggacggtcagcttggtccctccgccgaacaccccatgggttgtaagtatcataagactgacagtaatagtcagcctcatcctcaacgtgggccccactgatggtcaaggtgactgtggtccgtgaactggagccggagaatcgctcagagatccctgagggccgctcgctgtctttatacatcactaacacaggggcctggcctggcttctgctggaaccaccgagcatctttttttgccagtacatctcctgagcaggtgatcctggctgtctctcccggagacactgacactgaggatggctgtgtcagctcataggaggccacagagactgtgcagagaatgaggagggggagcaggagagggatccgggccatggtgagacattcagagctctgcctcctgagcctacagcccccgcgtacctgcccgg

SEQ ID NO: 12586 - DNA, 893 bp, Homo sapiens
  misc_feature 1, 708, 709, 721, 725, 788, 790, 798, 819, 890, 891, 892,893: n = A,T,C or G
ncgacccacgcgtccggaaagaaggatctagcgaaatatggctacagagagccctgctacgcgtcgggtccaggtggcagaacatcctaggttactgaagctaaaggagatgtttacctccaagtttggatctattcccaagttttatgttcgagcaccaggaagagtcaacataataggagagcatatagattattgtggatattctgttcttcctatggctgtagaacaagatgtgctaatagctgtagaacctgtgaaaacgtacgctctccaactggccaatacaaatcccttgtatccgtcttccgggctgcagggctccctcaggcagaggctatgacctgcagataggccacaccattcttggactggtcctgtagagcagggttccccaatccctgttactgcttcatggcctgttcagaagtgggccacacagcaggagggacttcagtactagtgctaataacatccagattgatccaagcctttgtggcacaactatttcttatgtggacttaaaggaattcaggaacactttggtcttagtaacctgactggaatgaactgcctggtagatggaaatatcccaccaagttctggcctctccagctccagtgcttggtctgttgtgcggctggtgacgctcacatgctgggaagaatctatccaagtggaattgcagaaatctgtgccaagagtganngttacatggcangaangaggaggcagggaccagtctaatcattctgcagagaaggactgccagttgatagaattaatcncngaggcacnatgtaaactccaagtggagcntgttgtgatgccaacagttgtgtggagagaataaggcagccttccattctcaggtgaggagtacggctgcnnnn

SEQ ID NO: 12587 - DNA, 15316 bp, Homo sapiens
  misc_feature 1, 15187, 15291, 15311, 15312, 15313, 15314, 15315, 15316: n = A,T,C or G
ncagacctaaaggagcgttcgctagcagaggcgctgccggtgcggtgtgctacgcgcgcccacctcccggggaaggaacggcgaggccggggaccgtcgcggagatggatcgcgggccggcagcagtggcgtgcacgctgctcctggctctcgtcgcctgcctagcgccggccagtggccaagaatgtgacagtgcgcattttcgctgtggaagtgggcattgcatccctgcagactggaggtgtgatgggaccaaagactgttcagatgacgcggatgaaattggctgcgctgttgtgacctgccagcagggctatttcaagtgccagagtgagggacaatgcatccccagctcctgggtgtgtgaccaagatcaagactgtgatgatggctcagatgaacgtcaagattgctcacaaagtacatgctcaagtcatcagataacatgctccaatggtcagtgtatcccaagtgaatacaggtgcgaccacgtcagagactgccccgatggagctgatgagaatgactgccagtacccaacatgtgagcagcttacttgtgacaatggggcctgctataacaccagtcagaagtgtgattggaaagttgattgcagggactcctcagatgaaatcaactgcactgagatatgcttgcacaatgagttttcatgtggcaatggagagtgtatccctcgtgcttatgtctgtgaccatgacaatgattgccaagacggcagtgatgaacatgcttgcaactatccgacctgcggtggttaccagttcacttgccccagtggccgatgcatttatcaaaactgggtttgtgatggagaagatgactgtaaagataatggagatgaagatggatgtgaaagcggtcctcatgatgttcataaatgttccccaagagaatggtcttgcccagagtcgggacgatgcatctccatttataaagtttgtgatgggattttagattgcccaggaagagaagatgaaaacaacactagtaccggaaaatactgtagtatgactctgtgctctgccttgaactgccagtaccagtgccatgagacgccgtatggaggagcgtgtttttgtcccccaggttatatcatcaaccacaatgacagccgtacctgtgttgagtttgatgattgccagatatggggaatttgtgaccagaagtgtgaaagccgacctggccgtcacctgtgccactgtgaagaagggtatatcttggagcgtggacagtattgcaaagctaatgattcctttggcgaggcctccattatcttctccaatggtcgggatttgttaattggtgatattcatggaaggagcttccggatcctagtggagtctcagaatcgtggagtggccgtgggtgtggctttccactatcacctgcaaagagttttttggacagacaccgtgcaaaataaggttttttcagttgacattaatggtttaaatatccaagaggttctcaatgtttctgttgaaaccccagagaacctggctgtggactgggttaataataaaatctatctagtggaaaccaaggtcaaccgcatagatatggtaaatttggatggaagctatcgggttacccttataactgaaaacttggggcatcctagaggaattgccgtggacccaactgttggttatttatttttctcagattgggagagcctttctggggaacctaagctggaaagggcattcatggatggcagcaaccgtaaagacttggtgaaaacaaagctgggatggcctgctggggtaactctggatatgatatcgaagcgtgtttactgggttgactctcggtttgattacattgaaactgtaacttatgatggaattcaaaggaagactgtagttcatggaggctccctcattcctcatccctttggagtaagcttatttgaaggtcaggtgttctttacagattggacaaagatggccgtgctgaaggcaaacaagttcacagagaccaacccacaagtgtactaccaggcttccctgaggccctatggagtgactgtttaccattccctcagacagccctatgctaccaatccgtgtaaagataacaatgggggctgtgagcaggtctgtgttctcagccacagaacagataatgatggtttgggtttccgttgcaagtgcacattcggcttccaactggatacagatgagcgccactgcattgctgttcagaatttcctcattttttcatcccaagttgctattcgtgggatcccgttcaccttgtctacccaggaagatgtcatggttccagtttcggggaatccttctttctttgtcgggattgattttgacgcccaggacagcactatctttttttcagatatgtcaaaacacatgatttttaagcaaaagattgatggcacaggaagagaaattctcgcagctaacagggtggaaaatgttgaaagtttggcttttgattggatttcaaagaatctctattggacagactctcattacaagagtatcagtgtcatgaggctagctgataaaacgagacgcacagtagttcagtatttaaataacccacggtcggtggtagttcatccttttgccgggtatctattcttcactgattggttccgtcctgctaaaattatgagagcatggagtgacggatctcacctcttgcctgtaataaacactactcttggatggcccaatggcttggccatcgattgggctgcttcacgattgtactgggtagatgcctattttgataaaattgagcacagcacctttgatggtttagacagaagaagactgggccatatagagcagatgacacatccgtttggacttgccatctttggagagcatttattttttactgactggagactgggtgccattattcgagtcaggaaagcagatggtggagaaatgacagttatccgaagtggcattgcttacatactgcatttgaaatcgtatgatgtcaacatccagactggttctaacgcctgtaatcaacccacgcatcctaacggtgactgcagccacttctgcttcccggtgccaaatttccagcgagtgtgtgggtgcccttatggaatgaggctggcttccaatcacttgacatgcgagggggacccaaccaatgaaccacccacggagcagtgtggcttattttccttcccctgtaaaaatggcagatgtgtgcccaattactatctctgtgatggagtcgatgattgtcatgataacagtgatgagcaactatgtggcacacttaataatacctgttcatcttcggcgttcacctgtggccatggggagtgcattcctgcacactggcgctgtgacaaacgcaacgactgtgtggatggcagtgatgagcacaactgccccacccacgcacctgcttcctgccttgacacccaatacacctgtgataatcaccagtgtatctcaaagaactgggtctgtgacacagacaatgattgtggggatggatctgatgaaaagaactgcaattcgacagagacatgccaacctagtcagtttaattgccccaatcatcgatgtattgacctatcgtttgtctgtgatggtgacaaggattgtgttgatggatctgatgaggttggttgtgtattaaactgtactgcttctcaattcaagtgtgccagtggggataaatgtattggcgtcacaaatcgttgtgatggtgtttttgattgcagtgacaactcggatgaagcgggctgtccaaccaggcctcctggtatgtgccactcagatgaatttcagtgccaagaagatggtatctgcatcccgaacttctgggaatgtgatgggcatccagactgcctctatggatctgatgagcacaatgcctgtgtccccaagacttgcccttcatcatatttccactgtgacaacggaaactgcatccacagggcatggctctgtgatcgggacaatgactgcggggatatgagtgatgagaaggactgccctactcagccctttcgctgtcctagttggcaatggcagtgtcttggccataacatctgtgtgaatctgagtgtagtgtgtgatggcatctttgactgccccaatgggacagatgagtccccactttgcaatgggaacagctgctcagatttcaatggtggttgtactcacgagtgtgttcaagagccctttggggctaaatgcctatgtccattgggattcttacttgccaatgattctaagacctgtgaagacatagatgaatgtgatattctaggctcttgtagccagcactgttacaatatgagaggttctttccggtgctcgtgtgatacaggctacatgttagaaagtgatgggaggacttgcaaagttacagcatctgagagtctgctgttacttgtggcaagtcagaacaaaattattgccgacagtgtcacctcccaggtccacaatatctattcattggtcgagaatggttcttacattgtagctgttgattttgattcaattagtggtcgtatcttttggtctgatgcaactcagggtaaaacctggagtgcgtttcaaaatggaacggacagaagagtggtatttgacagtagcatcatcttgactgaaactattgcaatagattgggtaggtcgtaatctttactggacagactatgctctggaaacaattgaagtctccaaaattgatgggagccacaggactgtgctgattagtaaaaacctaacaaatccaagaggactagcattagatcccagaatgaatgagcatctactgttctggtctgactggggccaccaccctcgcatcgagcgagccagcatggacggcagcatgcgcactgtcattgtccaggacaagatcttctggccctgcggcttaactattgactaccccaacagactgctctacttcatggactcctatcttgattacatggacttttgcgattataatggacaccatcggagacaggtgatagccagtgatttgattatacggcacccctatgccctaactctctttgaagactctgtgtactggactgaccgtgctactcgtcgggttatgcgagccaacaagtggcatggagggaaccagtcagttgtaatgtataatattcaatggccccttgggattgttgcggttcatccttcgaaacaaccaaattccgtgaatccatgtgccttttcccgctgcagccatctctgcctgctttcctcacaggggcctcatttttactcctgtgtttgtccttcaggatggagtctgtctcctgatctcctgaattgcttgagagatgatcaacctttcttaataactgtaaggcaacatataatttttggaatctcccttaatcctgaggtgaagagcaatgatgctatggtccccatagcagggatacagaatggtttagatgttgaatttgatgatgctgagcaatacatctattgggttgaaaatccaggtgaaattcacagagtgaagacagatggcaccaacaggacagtatttgcttctatatctatggtggggccttctatgaacctggccttagattggatttcaagaaacctttattctaccaatcctagaactcagtcaatcgaggttttgacactccacggagatatcagatacagaaaaacattgattgccaatgatgggacagctcttggagttggctttccaattggcataactgttgatcctgctcgtgggaagctgtactggtcagaccaaggaactgacagtggggttcctgccaagatcgccagtgctaacatggatggcacatctgtgaaaactctctttactgggaacctcgaacacctggagtgtgtcactcttgacatcgaagagcagaaactctactgggcagtcactggaagaggagtgattgaaagaggaaacgtggatggaacagatcggatgatcctggtacaccagctttcccacccctggggaattgcagtccatgattctttcctttattatactgatgaacagtatgaggtcattgaaagagttgataaggccactggggccaacaaaatagtcttgagagataatgttccaaatctgaggggtcttcaagtttatcacagacgcaatgccgccgaatcctcaaatggctgtagcaacaacatgaatgcctgtcagcagatttgcctgcctgtaccaggaggattgttttcctgcgcctgtgccactggatttaaactcaatcctgataatcggtcctgctctccatataactctttcattgttgtttcaatgctgtctgcaatcagaggctttagcttggaattgtcagatcattcagaaaccatggtgccggtggcaggccaaggacgaaacgcactgcatgtggatgtggatgtgtcctctggctttatttattggtgtgattttagcagctcagtggcatctgataatgcgatccgtagaattaaaccagatggatcttctctgatgaacattgtgacacatggaataggagaaaatggagtccggggtattgcagtggattgggtagcaggaaatctttatttcaccaatgcctttgtttctgaaacactgatagaagttctgcggatcaatactacttaccgccgtgttcttcttaaagtcacagtggacatgcctaggcatattgttgtagatcccaagaacagatacctcttctgggctgactatgggcagagaccaaagattgagcgttctttccttgactgtaccaatcgaacagtgcttgtgtcagagggcattgtcacaccacggggcttggcagtggaccgaagtgatggctacgtttattgggttgatgattctttagatataattgcaaggattcgtatcaatggagagaactctgaagtgattcgttatggcagtcgttacccaactccttatggcatcactgtttttgaaaattctatcatatgggtagataggaatttgaaaaagatcttccaagccagcaaggaaccagagaacacagagccacccacagtgataagagacaatatcaactggctaagagatgtgaccatctttgacaagcaagtccagccccggtcaccagcagaggtcaacaacaacccttgcttggaaaacaatggtgggtgctctcatctctgctttgctctgcctggattgcacaccccaaaatgtgactgtgcctttgggaccctgcaaagtgatggcaagaattgtgccatttcaacagaaaatttcctcatctttgccttgtctaattccttgagaagcttacacttggaccctgaaaaccatagcccacctttccaaacaataaatgtggaaagaactgtcatgtctctagactatgacagtgtaagtgatagaatctacttcacacaaaatttagcctctggagttggacagatttcctatgccaccctgtcttcagggatccatactccaactgtcattgcttcaggtatagggactgctgatggcattgcctttgactggattactagaagaatttattacagtgactacctcaaccagatgattaattccatggctgaagatgggtctaaccgcactgtgatagcccgcgttccaaaaccaagagcaattgtgttagatccctgccaagggtacctgtactgggctgactgggatacacatgccaaaatcgagagagccacattgggaggaaacttccgggtacccattgtgaacagcagtctggtcatgcccagtgggctgactctggactatgaagaggaccttctctactgggtggatgctagtctgcagaggattgaacgcagcactctgacgggcgtggatcgtgaagtcattgtcaatgcagccgttcatgcttttggcttgactctctatggccagtatatttactggactgacttgtacacacaaagaatttaccgagctaacaaatatgacgggtcaggtcagattgcaatgaccacaaatttgctctcccagcccaggggaatcaacactgttgtgaagaaccagaaacaacagtgtaacaatccttgtgaacagtttaatgggggctgcagccatatctgtgcaccaggtccaaatggtgccgagtgccagtgtccacatgagggcaactggtatttggccaacaacaggaagcactgcattgtggacaatggtgaacgatgtggtgcatcttccttcacctgctccaatgggcgctgcatctcggaagagtggaagtgtgataatgacaacgactgtggggatggcagtgatgagatggaaagtgtctgtgcacttcacacctgctcaccgacagccttcacctgtgccaatgggcgatgtgtccaatactcttaccgctgtgattactacaatgactgtggtgatggcagtgatgaggcagggtgcctgttcagggactgcaatgccaccacggagtttatgtgcaataacagaaggtgcatacctcgtgagtttatctgcaatggtgtagacaactgccatgataataacacttcagatgagaaaaattgccctgatcgcacttgccagtctggatacacaaaatgtcataattcaaatatttgtattcctcgcgtttatttgtgtgacggagacaatgactgtggagataacagtgatgaaaaccctacttattgcaccactcacacatgcagcagcagtgagttccaatgcgcatctgggcgctgtattcctcaacattggtattgtgatcaagaaacagattgttttgatgcctctgatgaacctgcctcttgtggtcactctgagcgaacatgcctagctgatgagttcaagtgtgatggtgggaggtgcatcccaagcgaatggatctgtgacggtgataatgactgtggggatatgagtgacgaggataaaaggcaccagtgtcagaatcaaaactgctcggattccgagtttctctgtgtaaatgacagacctccggacaggaggtgcattccccagtcttgggtctgtgatggcgatgtggattgtactgacggctacgatgagaatcagaattgcaccaggagaacttgctctgaaaatgaattcacctgtggttacggactgtgtatcccaaagatattcaggtgtgaccggcacaatgactgtggtgactatagcgacgagaggggctgcttataccagacttgccaacagaatcagtttacctgtcagaacgggcgctgcattagtaaaaccttcgtctgtgatgaggataatgactgtggagacggatctgatgagctgatgcacctgtgccacaccccagaacccacgtgtccacctcacgagttcaagtgtgacaatgggcgctgcatcgagatgatgaaactctgcaaccacctagatgactgtttggacaacagcgatgagaaaggctgtggcattaatgaatgccatgacccttcaatcagtggctgcgatcacaactgcacagacaccttaaccagtttctattgttcctgtcgtcctggttacaagctcatgtctgacaagcggacttgtgttgatattgatgaatgcacagagatgccttttgtctgtagccagaagtgtgagaatgtaataggctcctacatctgtaagtgtgccccaggctacctccgagaaccagatggaaagacctgccggcaaaacagtaacatcgaaccctatctcatttttagcaaccgttactatttgagaaatttaactatagatggctatttttactccctcatcttggaaggactggacaatgttgtggcattagattttgaccgagtagagaagagattgtattggattgatacacagaggcaagtcattgagagaatgtttctgaataagacaaacaaggagacaatcataaaccacagactaccagctgcagaaagtctggctgtagactgggtttccagaaagctctactggttggatgcccgcctggatggcctctttgtctctgacctcaatggtggacaccgccgcatgctggcccagcactgtgtggatgccaacaacaccttctgctttgataatcccagaggacttgcccttcaccctcaatatgggtacctctactgggcagactggggtcaccgcgcatacattgggagagtaggcatggatggaaccaacaagtctgtgataatctccaccaagttagagtggcctaatggcatcaccattgattacaccaatgatctactctactgggcagatgcccacctgggttacatagagtactctgatttggagggccaccatcgacacacggtgtatgatggggcactgcctcaccctttcgctattaccatttttgaagacactatttattggacagattggaatacaaggacagtggaaaagggaaacaaatatgatggatcaaatagacagacactggtgaacacaacacacagaccatttgacatccatgtgtaccatccatataggcagcccattgtgagcaatccctgtggtaccaacaatggtggctgttctcatctctgcctcatcaagccaggaggaaaagggttcacttgcgagtgtccagatgacttccgcacccttcagctgagtggcagcacctactgcatgcccatgtgctccagcacccagttcctgtgcgctaacaatgaaaagtgcattcctatctggtggaaatgtgatggacagaaagactgctcagatggctctgatgaactggccctttgcccgcagcgcttctgccgactgggacagttccagtgcagtgacggcaactgcaccagcccgcagactttatgcaatgctcaccaaaattgccctgatgggtctgatgaagaccgtcttctttgtgagaatcaccactgtgactccaatgaatggcagtgcgccaacaaacgttgcatcccagaatcctggcagtgtgacacatttaacgactgtgaggataactcagatgaagacagttcccactgtgccagcaggacctgccggccgggccagtttcggtgtgctaatggccgctgcatcccgcaggcctggaagtgtgatgtggataatgattgtggagaccactcggatgagcccattgaagaatgcatgagctctgcccatctctgtgacaacttcacagaattcagctgcaaaacaaattaccgctgcatcccaaagtgggccgtgtgcaatggtgtagatgactgcagggacaacagtgatgagcaaggctgtgaggagaggacatgccatcctgtgggggatttccgctgtaaaaatcaccactgcatccctcttcgttggcagtgtgatgggcaaaatgactgtggagataactcagatgaggaaaactgtgctccccgggagtgcacagagagcgagtttcgatgtgtcaatcagcagtgcattccctcgcgatggatctgtgaccattacaacgactgtggggacaactcagatgaacgggactgtgagatgaggacctgccatcctgaatattttcagtgtacaagtggacattgtgtacacagtgaactgaaatgcgatggatccgctgactgtttggatgcgtctgatgaagctgattgtcccacacgctttcctgatggtgcatactgccaggctactatgttcgaatgcaaaaaccatgtttgtatcccgccatattggaaatgtgatggcgatgatgactgtggcgatggttcaaatgaagaacttcacctgtgcttggatgttccctgtaattcaccaaaccgtttccggtgtgacaacaatcgctgcatttatagtcatgaggtgtgcaatggtgtggatgactgtggagatggaactgatgagacagaggagcactgtagaaaaccgacccctaaaccttgtacagaatatgaatataagtgtggcaatgggcattgcattccacatgacaatgtgtgtgatgatgccgatgactgtggtgactggtccgatgaactgggttgcaataaaggaaaagaaagaacatgtgctgaaaatatatgcgagcaaaattgtacccaattaaatgaaggaggatttatctgctcctgtacagctgggttcgaaaccaatgtttttgacagaacctcctgtctagatatcaatgaatgtgaacaatttgggacttgtccccagcactgcagaaataccaaaggaagttatgagtgtgtctgtgctgatggcttcacgtctatgagtgaccgccctggaaaacgatgtgcagctgagggtagctctcctttgttgctactgcctgacaatgtccgaattcgaaaatataatctctcatctgagaggttctcagagtatcttcaagatgaggaatatatccaagctgttgattatgattgggatcccgaggacataggcctcagtgttgtgtattacactgtgcgaggggagggctctaggtttggtgctatcaaacgtgcctacatccccaactttgaatccggccgcaataatcttgtgcaggaagttgacctgaaactgaaatacgtaatgcagccagatggaatagcagtggactgggttggaaggcatatttactggtcagatgtcaagaataaacgcattgaggtggctaaacttgatggaaggtacagaaagtggctgatttccactgacctggaccaaccagctgctattgctgtgaatcccaaactagggcttatgttctggactgactggggaaaggaacctaaaatcgagtctgcctggatgaatggagaggaccgcaacatcctggttttcgaggaccttggttggccaactggcctttctatcgattatttgaacaatgaccgaatctactggagtgacttcaaggaggacgttattgaaaccataaaatatgatgggactgataggagagtcattgcaaaggaagcaatgaacccttacagcctggacatctttgaagaccagttatactggatatctaaggaaaagggagaagtatggaaacaaaataaatttgggcaaggaaagaaagagaaaacgctggtagtgaacccttggctcactcaagttcgaatctttcatcaactcagatacaataagtcagtgcccaacctttgcaaacagatctgcagccacctctgccttctgagacctggaggatacagctgtgcctgtccccaaggctccagctttatagaggggagcaccactgagtgtgatgcagccatcgaactgcctatcaacctgccccccccatgcaggtgcatgcacggaggaaattgctattttgatgagactgacctccccaaatgcaagtgtcctagcggctacaccggaaaatattgtgaaatggcgttttcaaaaggcatctctccaggaacaaccgcagtagctgtgctgttgacaatcctcttgatcgtcgtaattggagctctggcaattgcaggattcttccactatagaaggaccggctcccttttgcctgctctgcccaagctgccaagcttaagcagtctcgtcaagccctctgaaaatgggaatggggtgaccttcagatcaggggcagatcttaacatggatattggagtgtctggttttggacctgagactgctattgacaggtcaatggcaatgagtgaagactttgtcatggaaatggggaagcagcccataatatttgaaaacccaatgtactcagccagagacagtgctgtcaaagtggttcagccaatccaggtgactgtatctgaaaatgtggataataagaattatggaagtcccataaacccttctgagatagttccagagacaaacccaacttcaccagctgctgatggaactcaggtgacaaaatggaatctcttcaaacgaaaatctaaacaaactaccaactttgaaaatccaatctatgcacagatggagaacgagcaaaaggaaagtgttgctgcgacaccacctccatcaccttcgctccctgctaagcctaagcctccttcgagaagagacccaactccaacctattctgcaacagaagacacttttaaagacaccgcaaatcttgttaaagaagactctgaagtatagctataccagctatttagggaataattagaaacacacttttgcacatatattttttacaaacagatgaaaaaagttaacattcagtactttatgaaaaaaatatatttttccctgtttgcctatagttggaggtatcctgtgtgtctttttttacttatgccgtctcatatttttacaaataattatcacaatgtactatatgtatatctttgcactgaagttgtctgaaggtaatactataaatatattgtatatttgtaaattttggaaagattatcctgttactgaatttgctaataaagatgtctgctgatttggttggtgatcattatagtaaatgagtccaacaaggaaaagggaacttgacctggggacctttagccgtgtctaaagaagaggcaccactcatatttcctataaaattatctaggaaaggaatccaggccccgctcttgggtccatttttacacattagcacttaattaatgttcaatattacatgtcaatttgattaatggctatgttgataggggccactatgtgttgtataggacatctggacttgactgtagactcctcagataatacagaaggtaggaaaagcaattcagtttgggcccttctgtgtgttggcattgtctaaccagaactctctgtttcatgtgtgttctctcactagctgccaagacaacatttttatttgtgatgtctatgaggaaatcccatatcattaagtgccagtgtcctgcattgagtttgtggttaattaaatgagctcttctgctgatggaccctggagcaatttctcccctcacctgacattcaaggtggtcacctgccctagtagttggagctcagtagctgaatttctgaaaccaaatctgtgtcttcataaaataaggtgcaaaaaaaaaaataccagttaagtaaagcctcaactgggtttttgtttctatgaaaatatcattataatcactatttatttcctaagttgaacctgaatagaaagggaaaccattcttattaagctttttattaggccctgtggctaaatgtgtacatttatattaggaatgtactgtacagtccagatcttttctttaattcttattggnttttttttttttttttttttttaggagatgggagtcttgctatattgccaaggctgatcttgaagtcccgggggttcaagtgatccctcccacctcagcctccngagtgggttggggggttacnnnnnn

SEQ ID NO: 12588 - DNA, 1165 bp, Homo sapiens
  misc_feature 1, 1081, 1157, 1158, 1159, 1160, 1161, 1162, 1163, 1164,1165: n = A,T,C or G
ncgactctaacatcctactatatgtaacatgtctccttttgagtcttaaaattaatggagacccaaagagcttttgcttatatgggttatagttatctgtagttaccatattattacataaattaaacctgggtatttacaaaatatttatgaatttagcaagtaaaatagccaactctatattaatgcaaacatattttaaaatatattttcccaaaccaaaaataatttgtgagaagagtagcattgttacacatttttgaaagtctcttaaaatctggcttaatggaagatggctggacgctcatctctgtttctgcattcaatctgttgcaagatcacatcatatgccttctagaacattccacctaagaaagaatgagagcgaaaaaggcaaataattaatattgttatgacaagatgttttacttcataggcaccctacaaaggtctcgggaaccctgatgggtcccaagatcacattttgagaaccactgttctaacttatcaaagatttctcacaacagcaaaataaaataaaactatagacttacagtcaggctcccagagagccaacctgagccaacctctcagcccctgctctgtacccccctcctgcccacttggttcctactcagagttcaagtaccaccccaccaggaagctctaatgtcagtgagtagaataaaaaggcagaagaccttttatccttactttgccctcttattgccagaggccagcctgatggtttcccagaggctgagtgaattgctcttcctggaagaagtttcagggaacatttcattatttggcagctctggaaggtcaagctcagctctggaacattctttcttcagaaggacgctgggctgcaatcagatcagctctgaatctgaggaccctccaaccacactgacacgtgtcatagttctgagcccctgtgggtgctgtgggcaccctggaacagcccctggaactgggcaaggaagggcaggtctctaagacctaccatcccttaaacacataaaagatctttttctcattttgcctctaaataaaaagttaatctgacagcacaccncaagtacggttttggtgtacaaactgctccctggactcctcttggaggctgcttctgggcttcgagagcccccagnnnnnnnnn

SEQ ID NO: 12589 - DNA, 2026 bp, Homo sapiens
  misc_feature 1, 2026: n = A,T,C or G
ncgacccacaattccctggctgcttgaatctgttctgccccctccccacccatttcaccaccaccatgacaccgggcacccagtctcctttcttcctgctgctgctcctcacagtgcttacagttgttacaggttctggtcatgcaagctctaccccaggtggagaaaaggagacttcggctacccagagaagttcagtgcccagctctactgagaagaatgctgtgagtatgaccagcagcgtactctccagccacagccccggttcaggctcctccaccactcagggacaggatgtcactctggccccggccacggaaccagcttcaggttcagctgccacctggggacaggatgtcacctcggtcccagtcaccaggccagccctgggctccaccaccccgccagcccacgatgtcacctcagccccggacaacaagccagccccgggctccaccgcccccccagcccacggtgtcacctcggccccggacaccaggccgcccccgggctccaccgcccccccagcccacggtgtcacctcggccccggacaccaggccgcccccgggctccaccgcgcccgcagcccacggtgtcacctcggccccggacaccaggccggccccgggctccaccgcccccccagcccatggtgtcacctcggccccggacaacaggcccgccttgggctccaccgcccctccagtccacaatgtcacctcggcctcaggctctgcatcaggctcagcttctactctggtgcacaacggcacctctgccagggctaccacaaccccagccagcaagagcactccattctcaattcccagccaccactctgatactcctaccacccttgccagccatagcaccaagactgatgccagtagcactcaccatagcacggtacctcctctcacctcctccaatcacagcacttctccccagttgtctactggggtctctttctttttcctgtcttttcacatttcaaacctccagtttaattcctctctggaagatcccagcaccgactactaccaagagctgcagagagacatttctgaaatgtttttgcagatttataaacaagggggttttctgggcctctccaatattaagttcaggccaggatctgtggtggtacaattgactctggccttccgagaaggtaccatcaatgtccacgacgtggagacacagttcaatcagtataaaacggaagcagcctctcgatataacctgacgatctcagacgtcagcgtgagtgatgtgccatttcctttctctgcccagtctggggctggggtgccaggctggggcatcgcgctgctggtgctggtctgtgttctggttgcgctggccattgtctatctcattgccttggctgtctgtcagtgccgccgaaagaactacgggcagctggacatctttccagcccgggatacctaccatcctatgagcgagtaccccacctaccacacccatgggcgctatgtgccccctagcagtaccgatcgtagcccctatgagaaggtttctgcaggtaatggtggcagcagcctctcttacacaaacccagcagtggcagccacttctgccaacttgtaggggcacgtcgcccgctgagctgagtggccagccagtgccattccactccactcaggttcttcagggccagagcccctgcaccctgtttgggctggtgagctgggagttcaggtgggctgctcacagcctccttcagaggccccaccaatttctcggacacttctcagtgtgtggaagctcatgtgggcccctgagggctcatgcctgggaagtgttgtggtgggggctcccaggaggactggcccagagagccctgagatagcggggatcctgaactggactgaataaaacgtggtctcccactgcgccaaaaaaaaaaaaaaaaaacagggcggggccccggtacccaaattccccctatagggagagtgtatttacaatattaactgggccgggcgttttaaaaacgttcn

SEQ ID NO: 12590 - DNA, 542 bp, Homo sapiens
  misc_feature 541, 542: n = A,T,C or G
accattattatccccacttcagaaatgaagaaactgagcctcagagaggggaattcattggcctgaagtcagcacagctggcaagtctgtaaccaaaacctaagcctgcaacttctgctgttcactgctgcctcccacagcaaagggacttcagctacaccactcaacatcttgtgtgaccagccatagggcaaatatggccatcccgatatacacacactgtcctcagtgcacttccaggatgccttccaatttaaggagctctgcagggcctgggggatctagctgccatttccaaggctggcagggcagagcagaggtggagcctggaaggagcccacttggttgtagcctccttgcaagtgcactggccacctgaggcacttaggggcctcctaggatgtcaggcaccttcacctctgaaactaaggctgggaccagggctggaggactcttgcccacctcttttttttgagatggagtcttgctctttcgcccaggctggagtgacatgatagatagatgatagatagatagatann

SEQ ID NO: 12591 - DNA, 472 bp, Homo sapiens
  misc_feature 469, 470, 471, 472: n = A,T,C or G
actttttttttttttttttttttttggatttttagtagaggcggggtttcaccatgttggccaggctggtctcaaactcctgacctcagggatcctccagcctcggcctcccaaagtgctgagattataggccggagccaccgcgcccgggctcatgacaattttctaaggcagcacagatgaaacaaggaaagcaggaaccagggtccaaaaccatgtctctctactctaaattcgatgctccttccactacactgatggctttcacagtttacagtgcttgcaaatcacctaaaggtcctgttcacagatcacagataccgaccaagtaggtcggggtggggcccgagaatctgtatttctagcgagcgcccagaagtagcggaggctgctggtcgtcgggctaccctttgcctggcaagggcccgggcaaagactacaaagagagagactcccggagacgctgaannnn

SEQ ID NO: 12592 - DNA, 1761 bp, Homo sapiens
gctactatgagtgagctctcgtctgcagtacgccagtagtacgagatagaaggaagaaagacggaagaggcggcaacgcaggacgaacgacagcaatctctttccgccgtctgttcctccgagttagtctgtaccactctcttcatggcgggtgggtctggccatcacaattaacagaacgagtctccttcgtgttggttagcatcacttctcgccggagaagagttttcctctcgcccctgtggttgcacccgcggggcctcttctgtaggacagggtgccccctggtgtcccacacgccgggtcgctgcttctatttttttcccggctgcccgtgtctctcccactccacggcgatgtcgctggggtagaagcctttgaccaggcacgtcaggctgacctggttcttggtcatctcctcccgggatgggggcagggtgtacacctgtggttctcggggctgccctttggctttggagatggttttctcgatgggggctgggagggctttgttggagaccttgcacttgtactccttgccattcagccagtcctggtgcaggacggtgaggacgctgaccacacggtacgtgctgttgtactgctcctcccgcggctttgtcttggcattatgcacctccacgccgtccacgtaccagttgaacttgacctcagggtcttcgtggctcacgtccaccaccacgcatgtgacctcaggggtccgggagatcatgagggtgtccttgggttttggggggaagaggaagactgacggtccccccaggagttcaggtgctgggcacggtgggcatgtgtgagttttgtcacaagatttgggctcaactttcttgtccaccttggtgttgctgggcttgtgattcacgttgcagatgtaggtctgggtgcccaagctgctggagggcacggtcaccacgctgctgagggagtagagtcctgaggactgtaggacagccgggaaggtgtgcacgccgctggtcagggcgcctgagttccacgacaccgtcaccggttcggggaagtagtccttgaccaggcagcccagggccgctgtgcccccagaggtgctcttggaggagggtgccagggggaagaccgatgggcccttggtggaggccgaggagacggtgaccagggttccctggccccagtcccccaaggactgccctgtcgtatagcagtcaccaccacaagggtcccataggcccgctccttcgcacaataatacacagccgtgtcctcaagtctcaggctcctcagctccatgtaggctgtgctcgtggattcgtccgcgagaatggtgactctgccctggaacttctgtgcatagtttattgtatcaaagagaggggatgatccctcccatccactcaagcccttgtccaggggcctgtcgcacccagtgcatatagctagtcggtgaagggggctccagatgccttgcacaggagaccttcaccgaggacccaggctgaaccaagcctcagccccagactgcaccagctgcacctcacactggacaccttttaaaatagcaacaaggaaaacccagctcagcccaaactccatggcgagtcctctgtgttcagtgctgatcaccgaatggaaacacttgggaatcccagtgctggggctcctctcccagagctcctgaggtcacatgcgtggtggtggacgtgagccacgaagaccctgaggtcaagttcaactggtacgtggacggcgtggaggtgcacaatgcca

SEQ ID NO: 12593 - DNA, 597 bp, Homo sapiens
  misc_feature 596, 597: n = A,T,C or G
acgcgggatttgagaacccttgccctacagacagtttctgagagcaccccaggaggattaagttttagttactcaccattgtgatgtgttcaatgaagtggcctttagtttctatcttctggtttctgtctccctaactcccttcccagtatttcctggaatcatcagccaaataaattacttgcacttggatcattgttttggggtctgctctcaggaaacctaaactatgacactctatatctacagttctggtattcatatttgtttcagtcagctaatgttggactctgttagcacagctgtttggaatttaaacttttcaagaattctttcatccttattattcattcctgttttattcttggatatcctaagtgcatacccagactaatgataatatcaacacttgttcagtatggttggtcatttttaaaaataaacaggcaatttatgggtgacccacacaaagaacagctgctgccatcactcacgccctctccattgttgatggcctctgcaactgacattgtcccaagcagctgctgacagagctgccagtacctgtttccacgtccaacctttattctattcgnn

SEQ ID NO: 12594 - DNA, 1218 bp, Homo sapiens
actgccacactcaaccctcttcctttgtttttattctcattattcaatcactttcagttctctggcctgttattctacggctattataattaccttaataaatacctttgtattctgctcctctcaatcctcttctcaatgttaacagcgttaggtgtttttgaagcatgggagacccaagtgaataacatgtacgcgggggcatctgcctggggccagtgaggagaatgcatctagacagagcttttcgtgctgctgagatctgttacctaaagcaataaaaaatgaccagaggatcagtgtccgatgaggaaatgatggagctcagagaagcttttgccaaagttgatactgatggcaatggatacatcagcttcaatgagttgaatgacttgttcaaggctgcttgcttgcctttgcctgggtatagagtacgagaaattacagaaaacctgatggctacaggtgatctggaccaagatggaaggatcagctttgatgagtttatcaagattttccatggcctaaaaagcacagatgttgccaagacctttagaaaagcaatcaataagaaggaagggatttgtgcaatcggtggtacttcagagcagtctagcgttggcacccaacactcctattcagaggaagaaaagtatgcctttgtcaactggataaacaaagccctggaaaatgatcctgattgtcggcatgtcatcccaatgaacccaaacacgaatgatctctttaatgctgttggagatggcattgtcctttgtaaaatgatcaacctgtcagtgccagacacaattgatgaaagaacaatcaacaaaaagaagctaacccctttcaccattcaggaaaatctgaacttggctctgaactctgcctcagccatcgggtgccatgtggtcaacataggggctgaggacctgaaggaggggaagccttatctggtcctgggacttctgtggcaagtcatcaagattgggttgtttgctgacattgaactcagcagaaatgaagctctgattgctcttttgagagaaggtgagagcctggaggatttgatgaaactctcccctgaagagctcttgctgaggtgggctaattaccacctggaaaatgcaggctgcaacaaaattggcaacttcagtactgacatcaaggactcaaagcttattaccacctgcttgagcaagtggctccaaaaggagatga

SEQ ID NO: 12595 - DNA, 373 bp, Homo sapiens
  misc_feature 1, 2, 3, 4, 5, 6, 371, 372, 373: n = A,T,C or G
nnnnnnacgaggactgatgtgctcatgggacataccagtgaagacagcatctctcccacgactggggttcagcagggagggctcagacgagttcaggatgtcaaatcatcgaggtgtatctggtggtgatgggaaccagccagtgagcaggaataatcagagaagagcagagggtcaaggtcagagtcctagagagctggtctgggaaggggaaactgaggaatgggcccccaggcgggaggtataggaggagccacctagagtgagaggcagattatgaaaagcatcactaggacagatcatggaattcaataagagtggttttggtggaggaatggtggagtagctggggcagattgtggtagggtagnnn

SEQ ID NO: 12596 - DNA, 984 bp, Homo sapiens
ctgtaaaaagctgacagatacaccccagagtaccttgatggtataagtttcctcaaagtcagttaacctggtacagaaaccagttctatgaccatccagcccaatgttcaattcacttcaattattctatgccccggaaaatataactgaaaagcttgatttatatgctagagaagaagcacaagtttttaatcaccacttagaaaaaaaaaaaaaaggaatcccaaatgctaaattatgctgtcaaatcatctaaagatgaacagctatttgcactggaggtcagagaacattacagacttggggaatatggtgttaacagtcagatccccttttttcataccaatctaaactcagagctgttggctattttgtctgacccatacaattggccagattagtctatgattgggacagaaacattacgggcactcagggattgctcatgaataccaattaatattaatttggatttcttctctttgacccagtacgcggggatccctgactcggggtcgcctttggagcagagaggaggcaatggccaccatggagaacaaggtgatctgcgccctggtcctggtgtccatgctggccctcggcaccctggccgaggcccagacagagacgtgtacagtggccccccgtgaaagacagaattgtggttttcctggtgtcacgccctcccagtgtgcaaataagggctgctgtttcgacgacaccgttcgtggggtcccctggtgcttctatcctaataccattgacgtccctccagaagaggagtgtgaattttagacacttctgcagggatctgcctgcatcctgacgcggtgccgtccccagcacggtgattagtcccagagctcggctgccaccttcaccggacaccttagacacgcttctgcagctgtgcctcggctcacaacacagattgactgctctgactttgactacttaaaattggcctaaaaattaaaagagatc

SEQ ID NO: 12597 - DNA, 1709 bp, Homo sapiens
ccacgcgtccggctggacccgtctgggaggtcggtttgtgagcgtgagagatcgatctgtaccgcggggatccgaagtatgcttatccaggtgggctgcctcaagcctcgatcccacccccgcgctggtagatggtgtcaaggtccttgcgtgggagaaggacttgggtgagatgcatgcggagattgcccccaattccggcctggagccaagggaaagggatgcctggatttgtgtctctattggtggtccacgctgcggatgcctgggtagcccagaggttatctacgccatacttctcactgtttttgagcatacctagatgttcctttcctaggcggagtatagatcgcacgtgttctagcctcttagactcagagggttcgagctctataagcccctccactcccttcattttacaaatgagactcaaacctagagcgcggtaatgaccttactaagaccaaatggctggtgaattgggcttcactagaatccaggcttgctggctaacaccaatgctccctccatcatttcatgttatgttttcatttcccctctgtctgagagattgctctgatgtctttccttccataagtcctacggagatcgagcttacctcatttttctcccaggcctaggagctcaattaccaggatcactttcttccccagggtgtacctacagacctccacatgttggacagtaggattcagcagagaatgagtcccccatcctctttttcatccaataaggcactcttcccaaataatctttccgcttccattgtccctatgttctactttactgctcatctgggagctcttcttctgagagcgggttgggtggctattgatctttggaagggcacctctggaactcccccagcaaatctactttagcagcaacagaatcagccttttttgaaggggcaggggtcaaccaagacactgcagctttcttgtccaggggctgtcctgacccattgctggaagcagctgtcttcttttttgggaaggaaggggtcttccaagtgccatcgaccgtaggagtttcccctttctttgaaggttcagagtgcaacttaggcgccttgctagggggttggttctttttactcagaaagcctctccgttctaagagcctccgcttcttgacaaaatttcggtgcttggcatttccttctaatgcctttttgggaggaggttccccaaaatccagattgagcagtaaagtagacatagggacaatggaaggcggaagagtagttgggaagagtggcttatggatgaaaagaggatgtgggactcattctctgctgaatcctactgtccaacatgtggaggtctgtagtacaccctcccagacgggtccagctaagaccggaagcgtccggagccggatgcggaaatcggtgcgcgccgacgaagcccgggaaggcaggcgcgcgggttagaacgcgccagaggtcggcgcgcgcacacccgcaccgccccgaacccaggtagtgaggccagtgattccgagtgtgtgaggagcggcagtggcggcggaggagggggcggcgtgggtgggggcgggggcgggatgcgctccccggcccctctagccccgtggtggtacaacgcgaaggtgtgggaaggccgcgataaaccggaactgcagcccgccggacacctccggcttcacttccgcggacgcgtgggtcg

SEQ ID NO: 12598 - DNA, 566 bp, Homo sapiens
acttttataaatgggttgttcattttttgttttattgtttgatattttggcctccatagtaatatgtctggagcttgatctttataagtttctcctggttctgtgaaatctattatcaccaaattttcacgaaccaggcaatgacattactatttattttgtaggttgaaacattttttagcatgcaaggaacttattcagcgtgcatgcatacacatgcacaaaaacacattaaattgccggtgttcacagtgcatgtgaaggtaattgcaagaaaatatgttttaaaagcaacaatagaaagataagaaaagtacaggacactattaaaaaagggtgatgaactctgtcttgggatgtcccagaaggtccccagaggatatttcactgcagttgaatgcttaaagattggaaaggtttccaggtagacatcgagaggagttggaaataagaaacgtaaaattcagtctgggtttccttcttttttagctttgtacctctacccctaggaaatgtctcattttaccacttatcacttccccgccttaattaattctagaagtact

SEQ ID NO: 12599 - DNA, 18529 bp, Homo sapiens
ggatggaagaataggagaggacagctcagtcccgggaaccacggagattctagcaaaaaagagtaagggacaatacgtggattacaggtaacaggatctttctggctgcagccgactgtgagaggaccaagggtgaaagccaaaagatccactgggagaatcctgagtgccacctttggcaaggtggaaatcaggaaatacaaaatatttgttactgcaagcaattttaatacaaaagtgtgtcttgtttctaaacagttcattggtagagcttcagtttctgcctcaattaaaaccaattgagataatcacacagcaacatggtcggagctgaagaacagcagctaaaaaacaggagccccagacagccccttttcatggtcacttggtcagttgactttattacgcacaaaaaaagacgaaagcaaacaggactggttaacaagtgtgctggtgaactccattaaaggacgagcacgtgtttgtcttacgtccacattttcagaacaggctcgtggaattcattcctcagtttgtgggaagttgatcgaccatttaaataaatagcaaaaaaagtggataaaacaaatctgaaattcacaatgtcaccaacgagcctatcccttgccaagggtctgggtcctggtgaacacaagagttactggtgtctaggctggatagggagcaacaaatcagtttaaaaccccaaatgttctgacgttttctgaacacttacatttacccctgaattctagcagctatttgtcctttaaacacccagtactgaaacaatatccaaagacagtattgcaatgaactccttttgctgtatcatgtgcaaatgttacttagatgaggttccctctctttagctaaaaatcacaaaacattaaacaatggaaaaagccctcccctcagttcttgctaattgaggtgtccgtgatttacaaaaaaagagttccttaaacactgcaggattcttatttttttaatataatttatcttgctgagatagcaagtcaagtttataaagaagatgcatttaggaataatcctaaaagataaagcaggtttacaaccctgcaccgcgcagaaaccctattaataggcttttttttttttaatacacatttgtatcttgaccttttcacttgtttttctcaaatatttcatttctgggccccatccattacagggttaccaggaggcaaattttatctacataaatattcacatgaaaatagtaacttacaaaaagaaaaaaaataaggcagcttcataacacaattattcttttacacttttaacaatataacttctcccgttcagaataaatatacacccaatgtatggagcaggattcaaagtggatagtggcttgggggtgcttagacagtgttatcgcttgggacctggagtcctgggggaggcagtggtggtcttcttagacatggttgggattttggaaggtttgtttagccctctcctggagttgccttggccccctgcagcgctgctttctgaagtgtcggaacaagcagactgcgtctctaagaggtcaaagtcagaagcgtcacttcctcgccggctgctggctcgactcccggctcgactcccagcccgactcccagggcgactggcagactttttagggtctgcccgattagttttggcacctgtggaggccggggaagaactattgctggtatcaccagcaagggatgtccgactagaatgaaaagttggtgttggtcgtttcaacttgctacctgatgatgggataaccttggttccactggctggggtggctggagaagatggcatggatgtacagctgtggttactctgactagcactggagctggaacgagtaggggaagctgcccgggaagatggtttggaccttcgaccccgtgagcggaagggggtcattccctgggatgctccctctggtaggatgaatttctctctaagttcaatgttagttctacctcgtgctcggcagggatcatttttcactaaaaattcatccaaggccatccatcctccaccaacgcgaaccatcacggtgctgcgcagaatacggaccagccgcaactgctgagaatccccaaactgattgccgaggaagaaccggtatttattctctccgatctgctccacctgaaacctttttgcacatttgcactgagccacttgtcttgtaacctcatcttcgattttatctgcatcggttgttggtcgatacgcatccttgttgggatgaagagcagccacaaattcataataatcaatgtaaccatccccatctcggtcgaaaatgtcagccacagcagtcatctctaacttggtggtggggaacttggatgctaaaatgccatcgataaactcctgacgtgttatcttcccatcctggtccttatcaatgcgccggaagaaatccatcactcgagactttttgtgattcatccaacgcatatactttttcctccagacatcaaagtcaaagttggcaaattctttcaactcctccagccgatccaaggcatcattcagtttcctttgccgctccagtgctaacagccacacctgctgccagcgggcagaaagctggttgatccgtgggttttttgcttcagactgtgaaaggattggcatgggaggaggggttggctgacttagggatttcctgcctccgctgcgggatttctctatgaaaggcgcgtgagtaggctctatgtttttccttttgtatgtcttggtgacccggtccacgtcaggctgtttgcgagtcatctcctccataaatgtctgatgctcagcgataagggctttaactcggtcaatgttctgcgggattggctcctgatcccgctgaatgagggtggtctcagcccactggatccatgccagaagttcttccaggagctcagcattagccaccagttctgacaaggccgtttcaagacgctgctggtgctgcttagcccatgtcaggacctcctcgaagcgagctcggatgatggtgatccagtgtttgatggttgtgatgcaatcggggtggcagacagccaggatgacttctcccatggctactgctgagttaacgtccactcgcttttcttctactttcttcatgaattccttatgggtgtcaatgagagactgcagggcctctgtgtcatcaggaagtgctccccgaaagcgaagcgtttgctctgcttcagaaagccactccaacagcatgtggactgtgtctcgaaacacttccgcttgttttaaggcctgctcaagccggctttgtttggaaacagagagtttacagacagtgtcccagcgagtgctcagttcctggagctgtccttttacccaagtggtgtcatctcgactattctcaatcagctctcggcctgaccgcttcaggacctgaacggttcctgttcgctttcccagttccttctggaaaaccttgtgtgcatccatgaggttcatgacgaggtcaaggtccccgtgcacgggctggtcctcagccagctgtggctccaccttgtataaccagtcaaccaatgcctgcaaagcatccatgaactgacccgaaaagagcagggcttcctccaacttgtgctgccgctccacagacttgccacaaacagtatcccatttgtctctgacttctcctaggaaattgtcaagtttctgagtatcttcgggaagcaaagtcttttctttcagtgctctgccagttctaattgtggtatcatacacaggctgcttgccaccaagagtcttctgaaactccttatgcttagaaagctgaagtttaattttgtctgggtcattggatatctctagttctgagtccaggtgactctctgcatcttctagccagtcaatcagttttttccaagcttcatggaattgttttgcccgcttcctggcatcatctagtgatcgccctctttcaatagatcgctggacaaccttctcccatcgagactgcacgctcaccaacaaattcttgatcagaacaacatcctgcttttggctaaggaactttaattgattcccagtttgatccagctcaatgatctggtctcgatgagcatttacttcattagcaaaaaccttgtgctcttctatctgggaaaggacagtatttagaatcaggcttggtggagaagcgatgtttaaactctgctctgctagagtgagccagttgataaattcttgtagggaattctggaattctgttgccaagttgagggcctcttccagctttgactttctttcttccatcttactgctgaccacatgccacttctgctccaaaagtgctacactctgttctgtcttggagccagacccagagtcgtcacggcttagaagcatgagtctgcccttgtcaagtagttgattataagtctcttccttggctttcagctgggaatagagttccatatgtgtatcaagctgttccctagcagtttcaggaagtcctcctgtgggcttagatgcagaaagctggctctccattctagtaagttccaagaggaaatcttcaatttcactgtggaagccctgggcctgctgcagagttgactgaagctgctgctccctctcctctgttttctgtaacactgactcccagcattggttcatggtttccaaacggctccttaagctgctggcatcatctccagcactggattcaagaagctcattgccagctttgttgactgtttccactgtggcttgatgagccaaaacatcattttttaggacatggtgctttgcgagctcaacttcaatgacttttgggtctccacttattggtctctgagcatctaacaactcttcggtatgagtcagccaactcattagttcctctaaggcatgctggaactgaccaagggccaacagagccccttctagtttgtgctgtcggtgggcaattttctcacccaggttctcccagaggtgtttgagttctgtcagtggttctcgtataatgtctctgtccgtctcatcagtagctttctttaacatcagttcaccctggtgattaagcttctccatctcaatttgctgttggtaaacttctactttgaactccttcatttcatttaactgatctttaacagtattgaggtcagtgccaacagggggcatggtgcagagtttaatcacagtgttatctagccagtcaaacatagcctgaagagtgtcctgatactgcacagcagcttgcatagcatcctcaagtttttctagcctctctttccatgttttgtttaagttctcccaagcattattcatctcatcaatgctcttcctcacttcaggcttctcagtttctccacaggcaaaaatcaaatctgctccaaggatccgaataaactccagctcttcatgcagaccatctgtctcttccttaatagtctcagcagcttcaacctgttgtttgatgatggaaggatcaatgcctgggctttccaagtcatggacaatatcctgggtgtctttgatggtggtcaggagagctgccatgtcataccagaacttctctgctaattcaaggacatcaagaaatttgatttctcgttcttcagcccgagctttgatgtcctcccagaagaataccatttgatccaatttatcctggatttcttttgcagccagatccttgtctgctccctgagatcgtccaataagctcctctccacggcgcttcaaggcctcaaaggatggctgcagtttttctagctccacggtggcactcttattgtcactgatgcactctctgatcttgtctacttcagcagggatcagtggtggcatacgcaggcgagaggaaagattctccagtgtctccaacataggctcaattttatcatgaaactctgtaatctgtgtggactgggacacggcttcatccagagccagggctcgctggcgcacctcctcctttatttgggcatacatgttttctgctttctggtatttttcttccaccatttccccttcctcagggtttaattcctttagttgtgggcctatctttagtagtttgtcaatataaggtttgtgttcagcaatagattcccttaattgcctcatttcctcttgttgctgcctgagctgctcatgatcaatggctggagagggtaactgtgctattagtgcccgagtttcctcaatccaggggctgagctcttcataagtttcccaaaactggtttactaagacctgggcccgctctaggcgggcataacgctctgaattgagtaggctaatggcttcatattgctgtattagagactctgtcttttcctgtaatacagttttttgctcctccccacatgtgccaaagatttcactacggtgactgaagagttcatccattgaatctttgtgtcgaataatgtcaatggagaaagccttctgtacctgaagctgagctgtggtctggtcctgttccaggcgaattggacccagagccatcagtttccgttttgtttcagcaacccaagctagttctgcatcggcagcttgctcatactgttgtgatctctgaatagcagcatcaatttcatccaccctttgtccaatagtgtcactgactagtttgtactgctcgttagcatcggacacaagtttatccagcccttctctggctctccagggcaccagctctaagagagcacggctcacctcattcactgtgtccaacaccagcctgtgctccatgacctccttctttaattccttctgtctctgctgaaactggggtatctgttcccctgtgggagactgtcctccactggttgccagctcctcctccacctccctcagccacccggtcagttcctcataagtagactggaacttggtggccagctgccgggcttgctctaaagttctgagggccttggagctagtaactgtgatgtctgcgtaacgagtctttataccatctagtttttcctggataagtaacacctcctcacctgtggtttgttttagaagagcctgaccatttttaatagcttgatctacattcttctttctattaacaatttcttcatttaaagccaggtggtcagcatgctgcctgtgcaggacatcctgtttgaaatcctttacgaacactgaactgagcttgtcctcaacctcagccagccagttgagacacctccacggtcatcctccccaaacagcctagcattagacagagcttggtcaagtagggctgccttccgacaacagcggtcttgaatttcactgtatcgggcctgcaatgagtctatcttttctgacagcacaccctgttctgcaggagatgtcagggaggagagggactgcccaattttgactgcctggtgcacatctgttgcatggttttctatgtcttcttccagagccttgtgccgaatgatctgctgctgtattttggcagtctgagtgccaacaggttctgagttagcaagctttttctctgtgacagataagaagtcagaaataggctcagctgtctcatggaactgtttggccagaaccaggatgtcttccagctgtttttgcctggctgctgccttactgagtagttcagtccatctactttcaagactctccagctgtccagtgattttctctctatcagccagctctgctgactgggctattctgcctccttctgcttgaagcatgtctactgtggcctttcgatcatctaggagccgctggagcaacttctgttcttggatctgtgctttcaccactttatactcagcagatggaggtttctgattggctatgagctcctcggtatctgccaaccagctgagcaatggctccaaggcatcttgaaacttccccactaatgctaacaaagcttgcctgtagctgtgcaattctttgtgcgacctttttattcaatgtattccatcgtagcattgatctcttccatgtcatgttctaaaccctgtacagtcacaggtcgttttcctgcagcgtctgaattaagtccctggccaagtccattcacctgctgctatttcatctgaagaggatccacttgttctttctgaaacattttaaaatctgctaattgttggttgatgatttccacttcggtccccactacccactggagggcctctgcctcctctgctgctgtggtcgcgtcattgagtcctttcaatttcctgtagaagtcctctacacggcctagtgtcagttccagctgttcctgacgagctttcgcccctctctgtcagtttgccacactgtttgttcagggcttctagctcccttttgagacctaacaaatccagagtcccctcttcttctagcatatgtcgacactctgcttcagaggcctctatgtctaatttgaggacgtgaattttgttaaggaatagccggacatcctcgatttgggactggaggctatcagtgtctctgccaatagcacccatgccatctagctcatcatccaggtctgccaattgagagaacatctctcggacccggcagtgaaactggccaatcccctccagcttgttttccatcatcacacaaccactgttcactctttgcttaacttcgaggaactcttgctgggcgacctcagcttggtggagaagttgagaagcatcagatccatctggggcatcttctaccagaccctgagtaaagttcctcagatagtctacctgaggctctagggcctgcagcacttcctgttgagctcttagcttctccaggttcttgttgctacaggcttgagaacccagagcatcaaagatctcaagttggtgtttggctccttcaaccttcttttcaatattcttaaagctttcctggaactccctgagcctctgagtcatttcttcgagtgaccctgttttggcctgcagctcttctgtaacagcatccatgttctggttgatcccagccttctcatcccggattccatcctcatctgcttctgaagaattgatcagaatgtcagcagcactattcaatatttccagcagggagcggcgcttctccacctcattcagcatagcctttgatcttaggagactggactctagctgcactggatccagagtgactcgcaactcagacatcttagctttacaatcttctatccatggcacaaggtcttccacatgccactgatatttctgagctttctgcatacaatccttgagcctggattgtctgtctgcagtttttttactaagctcttcccaatggtttttgagctcaaccaactggttttgtagagtccttttctcttctccaggaggtacagaaagaagtagagattccccttcagccacaatcacctcataggagccactgtgttgattaagacttttctgaaactcttcattctcctgtagctgagactgtagccgctccaattttgcagaaattgggcagttttttgcttgctggctttgtttatcatccaaccaggtcctcaactcatcaaacatttgctggaactgctgggtgctggcaagagctgcctggagtctgttaatgcgatcggctgcaaggtcttctaaaccttggagaggcagggcaactgtctccaaacgcttcttcagttcatccttgaggtactgctcaccaatgagcactgagagttcatcgcacagtgtctgagcctccttaacctcgtggtctaactgctccaagtcagatcgaatttcactggtctcttccaattgctgctttacagcctctggttgggtgctgatagctgactggacactcagccgttgtccaactgccctcaccttctctgataagtcctggagcagttcctggtactgggtgctcttaacaatagcttggtcaatttggctggaacgggagttgagtttgtcagtcagctcaacccatttctgattgatgctctggagttctttctgtacttggctggtggacagagagacatctccagggcctgttaggatgccctgagctgcctcatccagttgctcatgctgttgcctgcgtgcttcaaattcctttagcataaactggacctgttgcttttgtgcactcaacatgttggggtcaatagacaggggccccagcactcccatcatcagttctttctccatcagccacggccggagctgggattctgcagcctggaagcaggccagatgacttgcagattcctctagctgcctttgccgagccacagtaacctcagtggccctttcccatcgggaattgagttcttcctgaattttcttccaattttctgcttcctgtgagttgggatatgtcaccagtaatccagccagggcttcctttactttttgaatttttggagaattctgttccaactcagccaggaaggccttgttagattcagcttgggctttcactgtttctgtcttggttggagatgacatggcatccatggatttcaggacttcctcttttgattccagccactgcagcacagagtttgcctccttgtgaacctcctccattctgttgaggatagcctgaaggctttcctggcgttcatgaagtactccccctagtttctcatacttcaagtttacatctgacatgtcacactggatctccgtcagatctgtcttgccttgggaatcaggtgctgtgatttccatgatgggattttctaaagaagtacctttgcaattgatttcttccaccagagttcccttacttgcccagtcatctagtagactcttcaggtgttcaatctgcttttctaactctttagcactcacagaagtttccgtaggtggaatactcccttcagtttctttcaaccatttctggaaggtcctgaccagcttccggaattcatccaactgttcctggcaagatgatgcatctttctctctctctttaactgtcttctgtagctctgtgaagtcttttcttagattctgtaccctgtcctgatgctggcacaagtccagcgcaaagccacaagagctcagttcagtgaccaggtgctcaagagtatctaggttctcctgttggtcttccatttccaaattgagctcctggatctgttggaagaaatgtgtaatatcttgatctggctgatttccagaggccagcatccgacttttgttttccatgaactgctgcagcttaccagagaggtgttcaaacatctctgcctggggtagaagcttctttagggagctctccttttcttgctgctgtagacagagctgttcgaaccgctggctcacctctgccagtttgccctgcagcactgctgctgtagtactgtctgctgtctccatgaatcgggtcaccatctcacgggtggcctccaagctgctcttttgccgagcaatgtcctgcttcaatttcatatttgtggctaaggcttcctggatgactcctgatgagagtgatgacacctgcttcccttccaggttttgttcaacttccccaatagactgcaacaggctctccaggctttcctggacactctgagattgggcaattgctttctgcagcagagaagatcgctcagccaggctataggagaggctttggaagtggctgagtatggaatctgtagtttcttgaacatgcctgtggtctggggctggctccccttcaatttccattatgtcacgagctactttttggagtttttccacaggtacttggtgctcagccaattcctcctgcaactgctttgttgttgcaagctgctcctggagaactccagggtcagaggcaacagtatctgagaggagcttctccacgttggcctcacaagcctgcatccaggcctgcaggctgtcagcactgttttggaattgatgatactggcctaacagcatattcaggtgagatcctaatcgtgtacactttgagtggagagcagtgtatctttctgttgcatccttcaacttgtcctttactaagtttccaatttctgatggttctttgccttccttaaaactgttttccatgtccaagactttctgtcctgagatagtcacaaatctcaagtctcctttgtgggaaatgacatcctctgagaagcttccttgccgctttagcagggagggaagggtctcggggctgctgcctcccttatgcatgttctccagctctttctcggatcgttccaaccagctttcaaactctttatgatcctgcagaaatttctgcaactcatcctgaagtgtctgcacctgcttcagttctgcctctgattgggccagggaagtagagtattgttcctttagctctgcccagcttctgttgcagcatcccgttgctcctcaggttgtgagaatggtgcccatggtggatcccgagaggccctgagctgacttggtgggcccagaatgaaatttttgcctggctggacaagcaattcttggtgacgggccttcatcatcgtcacattggcttgtccagtttctctggggctttgattcacccgccatgtaaccatcagtggtgtccaaggctcctgtgctccaagctagctcccgagagctgctccattcctggaaggttgggtcagcagctgtccaccagatgatcctactgaagttacccgatccaggagagcatcgatcttcttcttgttctctgccagttcctttgctgctttactcttttcagtctcctgctgtaagcaggaggtcactgcttcctccagttccttctgggccacacgtgtctcttcctggagcgcctcatattgctccttagcctgatgaagcttttcccgaagagctgtcaactcacgtgggctcagcttggtctgattctcttccatgaacccctcaatgtccttgacaacagtggcaaatgaggtggcacgattctgaatgtcatcctgtaaatccttcaagtcactttggttcttctgcaaagcagagagatcctgctgggtggttctgccttggtggcctgccagtgctctttctgcctgtcctacccaactgcaaagatcctccagttgctggtgacaggtattttgttgtttctgcagggtcttttgttctgtctggtgagccaactggctctgaagctgctgaagctgatttgcagaaccatcacaaaggtcatggtaagccttgtttagggcattcaattgctcagatatttgtttcttctctttttctgagagcttatgaccatgcttggccaagaagatctgtgatgttttaatagcttcagagacttgttctttctttgttgtcagctcttctgacagaacctgctgttccaaaatagctttttcaatgtctgttgattctttggtctcggatgaggtagcttttccttgtgtattcctcgctagggtagacacccagcccaaaagttctttaaccttctccacatgttcttgtttctcctcttctaccactttctcctcctcctccagacgccggagtgcatcactgatgtatttcacgtgctgagttgttaaagtcaccaatgccgtgtagcgagtccttaagtccatgaactcttgagtgatggcatctgaagaggaaagcatgcgacggcgcttgccaggggatttctgctgcgattccacaaaggccttgtatgtcatcagttgcaattcatagtcctttacaatagtagagtactgctgggaaaatttttgacattgatccagttttgtctgatttctctcaatttctgcaaatagggccgtctgctggctgagctgctccgaaagcactctgctatcctctgcctggcctggcttcatcatttcctgctgggcagtggtttcctcaatccacttgatgagagttccatggcaggctcggtaatctcccagaacttcctggatactttctagctcagattggcgaatctcgagctgggcaatgactcggtgccaacgctcctgcagctgggagcctttttcctgatagcgctccaaatccagatttcgctctggtgtcagacgactcatctgctctgccactaccttggccttggcaatttcctcatccaggactgaaaacactgaattcttgtccttcacatcactaagccagtgccgtaatgtcgaccaatgggcctccagagctgagagatctgccagtactacttcttcttgactcagcttaatctcataacctttgaccaagagttcagcatcctgtatgctacgtactataacatcaactgtctttaacttattcagatatacagtagagagaccatagacatggtccatcttctccaccagcagattcagttctgagcgcagagttgggacacttgaactagatggagactgatggagaaagctgtcacatttcatagaaactgcatccaagtctgacctcaattgctgtaaatcctcctgggtgtgctcttgctctgcaatccttaatgcattgtcctgccaggcatctctgtcagtcctagagctggctagagactgaattcgtttgaccaccctctgttcatactcctccaggcgtagccggatgttcttcaactctgaaatgtacatcttggccacagtctcctctttgtcctcattctccatggacttcatcaggtgctggaagcgggctttacaagcttccacctcctcttccaagcgcaagcgatcagccactgagaacagcacagagtcacgactatcctgcagaaagtcttcatagtgggcctgaaggttcttcataatctgatggcactcccctggtgctgaggatcgaagcttttctaggttccaggtctgtacaaggtcaaggtctttacgcagatagttccaagagataaggcttttggtgttaacatgcagctgatgccaaagggccataaccttctgataagattgttcgaccctgctggccatctcaatggcatccttattgggtggggggatgaggaagcagactgacggcaccattgcctcgttccctgtggggctgatcactttccatttggtccgctgagaattatcttctagcacacattcatcatttttgcaaatagtaatctcgatctgcctgtagtcacagacagccttgacagaaatggtgttctttaacacatggtctggactgcgtggttttagctgaacgatggtttttgatctcccaacgagactggcaacggaactcttggactgtataagctgctccttttcatccatggagtcctggagcaggtcttcaaggcgggataagctggtgttgtggtcacaggaatattttcgtttaatggaatcttggaggttcctcaagaatgactccagctctcgtgcatcactgaagaactgaaaataagcagtattctctttcacatgctgctcaacacacaggcacagctgcttcatccactgcaactgggactggacagcagcactgtaagcctccactgtctgcttggctgggtggttctcaagtgaaagcagttctgctgtatcttgtagagaacgaaacacatcctgtttctcctccagttccattgtcaactcagagaagtaatttctcttggctgagatattggaattgttgtcactccagtcatatgctagttcctcctcctccttctcattcaaccagatcaactcagctgtagctctggaaacaaatttatgcaggctctgaaggtgcctcatccggaagctagaagtttccttcaatttacaatactgtgtctccagctttccaagagtttcagcatagctggtatggaaattctgggacatctttccctcatacaacctggcctccttgacacttgagcccagctcttctacactcgtatggatgtgctgctgtgtttctagctgcaactccacactaggcaggtcattgccccactctgctcgctccagtttcatctgcatctcttctacccaagacagtagttcatacacaaatcggagattgccttcatcttcagaggagctgatggccacaagttcagcccgagtcataggctttcggaactaggaggtagaagaagaatgggttgccttggttaagggttctgctttcagatgagtggtggttaaagtagagggtggaaccaattcaagtgaagtgaaatgacccttccggtacaggtttgtacactctagacgcaaggtgaccagctcatcctgaagacgcatgaccctaaaagccagctcttctagctggtagtaattctcatcccgcaggatctggagatccacctgcagctgcctgatgagaccttcacactcctgaatgtacataatgacatctgactcacattgtaccggttgtcctgattccaggtgagcagcatcagcctgcagtgtattcttagctagtgtcagtttttcttcacagtccaaagcaccattctggatttagtttgcaatctgtagcagcaattccagcctctccacagccggccgaagtgatttctctcgttccagcatctctatgatgagctttccccactcttcttccacatcattagggtgataaccttgaggcagtttaattcggccaaattcaatccacacctctagtaatttatataattcctcaattcttcctttttctctctccttggccagaatttctgtttctttgaagtgtatatattggttataaagtgcctttagttcaacagggttttggggaaaagttttatctgacatcagtattgtatgctgtttgatccagggaatgagggagtccactcggctttggtattcttgccacctagagtccacttccgtagcactgatcccttctccaccctcaggaactttagggaaggcatcataaatcgaagacacataagtgattacagacttttcatctggagatggcacatccacatcttctgcatccagcaggcgaatgacccccagtctttctgccacttcaaaagcctgttccagattctctcggttactttggatttgcaccctctccatgtctactagatcgggtcggtatcggtgaatgagtgcattgaacatcttcccatcactccagcaggaggaaaagttggtgcatttgattcctgtgtaaccagctgtcaccttctgggtccacaggagtagtttctccttggctgacatatcccctgattctccactaatgtagatgtcagagatctggaaatgcaaaataatggtccagatcagacccagggtcaacttggggttgccatctgtgatgtcatcattggaatattcactagtttcacctgtcgctgctttaggaagtccagggcaatctgcacattctgcagcctatgaaaacgcatcctgcccttctcccggggcagtttgatgcctgagaggacctccaacagagagatcaggttatggccatcccgcagatcttcataaagatcattgatgtgcttgcggaccttcattaagtgcttgttgacccacttggtgaacgttttcttctgaacccggtcccgttcatctgcaatcacagccactcgggaggctgaggtacagaattgcttgaatccaggaggcagaggttgtagtgagccgacatcgcgccccggaattccggcccaaagaacaggaaacatgcaggaataaaggactcctcatgaagagcaggtgggagggagggcagtgtgaaggaattggctttgatgctcttgttttggtaagtgttacagaaataaatacatttattgtgggaatacaaattggttgtagaagcaagtgcttttaaactatattttaattggttctcaatatatttgccaaaccattcactgatgatatttgagaggatgtttataatttgtctggggagctctataaagtgcagatagtgactctccaccagcctcactcaccttgggcagaagaaacaaatcattgacacatccttcctttccaggtatggcttttccaccaaaagcctgaatctgtcaatcctctgatcaaatatctgagtgccaccactggctttggaagaaattacattatgacccagaaggtaaatgtgcttacattgttgcactgatgtttgctgttgggttgatgaattaagcccgtgttcctgaccagcccctcagcccccagcttcgcttctctgggtactcactgttcaccacgcatcacacgggcctgattttatttcatcctgctctctcctgcttctcgcacatcttattcccccgacttgagctgctctcagcctctcgatgattgatttgtgctcatccttcagatcagtttatcccatagcctttagtgaccccgtagactgggcctgggtgcctctgtaataggctttcttgacatctcatacctgttgcagatcatgcttgttcacttcgggttcccctgtcagaatgtaagctctgtgaggaggagggtcgtaccccatttcctagcaggctgccttacacacggtagacgctcagtaaatacgttgcaagttgaatgaaatatgaagtgtttttctgtgtgaagttaacttccctttgagtattcaattctgcttgtgacaattgtcagctttaatagatggtg

SEQ ID NO: 12600 - DNA, 2939 bp, Homo sapiens
  misc_feature 2939: n = A,T,C or G
actatagggagtcgacccacgcgtccggacggaagtgagcgggtcccgccccttccccttctcgtctccgtggagtcgtctctgccgcggttcctcggctgccagctctccggcgagccggagtcctagtgccgtaccgtcagtccccggccgcgcggagccgggatgcactgttcctgctgtgggtcctcatcatggagaccaaacgggtggagattcccggcagcgtcctggacgatctctgcagccgatttattttgcatattcccagcgaggaaagagacaatgcaatccgagtgtgttttcagattgaacttgcccattggttttacttggatttctacatgcagaacacaccaggattacctcagtgtgggataagagactttgctaaagctgtcttcagtcattgtccgtttttgctgcctcaaggtgaagatgtggaaaaagttttggatgaatggaaggaatataaaatgggagtaccaacatatggtgcaattattcttgatgagacacttgaaaatgtactactggttcaggggtacctagcaaaatcaggctggggatttccaaaaggaaaagtacataaagaagaagctcctcatgattgtgctgctagagaggtctttgaagaaactggttttgatatcaaagactatatttgtaaggatgattacattgaacttcgaatcaatgaccagcttgctcgtttgtacatcattccaggaattccaaaagacacaaaatttaacccaaaaactagaagagaaattcggaacattgagtggttctctattgagaaattgccttgtcatagaaatgatatgacccccaaatccaaacttggtttggcacctaacaaattttttatggccattccctttatcagaccattaagggactggctttctcgaagatttggcgattcctcagacagtgacaatggattttcctcaactggtagcacgccggctaaacccactgtggaaaaattgagtcgaaccaaattccgccacagtcagcagttatttcctgacggttctcctggtgaccagtgggtaaagcacaggcaaccactgcagcaaaagccatataataatcattctgaaatgtctgaccttttaaaaggaaagaatcaaagtatgaggggaaatggcagaaaacagtatcaagattcacctaatcaaaagaaaagaacaaatgggcttcagccagcaaagcagcagaattctttgatgaagtgtgaaaagaaacttcatccacggaaacttcaggataattttgaaacagatgctgtatatgacttgcctagctccagtgaagaccagttgctagaacatgccgagggacagcccgtggcatgtaatggacattgcaagttccccttttcatccagagcctttttgagtttcaagtttgaccataatgctataatgaaaatcttggacctttgatagcagcacatgtattgtaaatgtcccaggatcagagacctgttgaatttgagtgggtgtctcctcaagccttacctttctcaggtgttttaaagaaatgcagggaggcaatgtttctgaagacattttctgtttataagagagtagaaagaaacacgagtttgcactgtaaatgcagttataaccttttatacagatttaccttttcagtgttcagtacaagtttaagttgctttctttgagggcatttattctgtgtgactgtgggttttattttgtattctggttaagaaaataatgtattgagttactgtcaagtagccaagttaatgggaatgctccatctacctgttacagtgattgcaataatagtatattggagtttttcaaagaaacttaaagtaatgcccaattattaaatgaacacaagagctgagatgtcacattcgtcagcattacaggtgatctattttggtggcattttgtacttctctctgcttctaaccactgaggctctctaatcttcctctggagttttagtgaaaggatttattgagcagcttctggaatataatgtgcatgtccaaaatgaactcagcgcttcaaaaggacaaagtctgtagcctggaggggcttgagtggatgggagctgatgctgtgattttgagctgtggttacatgcagtcagtaaacctgtgagactgctggaggaaatgtagcagacagcatggaggctgggacccagcagctactttgggtcatgtctttactgtcctgcctccaaccctttagtctcgtagacttttgttcttgtggaaatttcttctgtattccagttgtgtaaatatgtatggaaaactgatattactaggttttacgttgcatctccagtattgatctttggaaactgatgttacattaggttccaattcgcaatagtagcagagactgacatgcttttattgagctgctaagccccgtggatgatggagcgagaagggaaggggtatgcaggtttaccaaagtccaaataaagcatttcactaggttacacgttatgtatatgtgttacattagagttaaatacattattaacactaaggaagtattaggctcagaaatttaagattcaaataggatagcaggcaaattaaggaagattaggaaaaatgagaacaatacaaggacgatcaggaggcactaaaagttaggatgacattagacacattgaagggaattttttgagtgaatctaggagagtataggcgaaatgtggaggataggataactaagagggggataaagaggtattaaggggataagagaagtagtggggtacagagtggaaaaatatatgagtgagaacaagaggagagaaacagagataacagtgatgactagcaaataattaagaggtgagataaatatactgtagtaaaaagagatgtaattatttgttgttcttctgtttgcttcatagan

SEQ ID NO: 12601 - DNA, 930 bp, Homo sapiens
  misc_feature 1, 2, 3, 4, 930: n = A,T,C or G
nnnngccaaatctgagatgcaactgaatttattcttacctcatcatctcctaaacttcatcaacctggtgtttaaggccatcattcaaattaagctgtcctcctcaagcttaccatttgcctaattcaaagtttttctctcagcttttcaaaactttttgacttttccatcacactactgacccatgctaaccaaatccaccatatttcccgtggtttctgcaactacactgtctcaatccttttcataactatccttcactgttccttatgacttggtttaaagatttgtattccctcctcctgttccatatcctttaacattacctaaagctttgagttaaatgaaggttgccagggaaaaaaaatgttttaaatgtaaacaacaacaaagacaacaaaaattacctgaagtactatatccttttcctcaggtttctcttttccctgtctctatcaactctaacaaattcaattttaccctttaagtcaatgcctcaaaagttcgattctaaaatttatctatgattaaaagcaacacacctcagtctgtatgttttgtggtgtgtccacctcaaatttagcatgtcctgtaatcaaattaattcatcttaaaaaaaacttaaaaaaatttccatcttcaaataatattactattagaaattctggactccctggaatctactcacatccaagtagtcatcaagtatcactgagacactttagagcagtagtccccaacctttttggcccagggactggttctgtggaagacagtttttcaatggacagggtcaagtgggggggatggtttcagatgaaattgttccacctcagatcatcaggcattagattctcataaggagggcacgacctagatccctcgcatgtgcagttcacaataaggttcatgttcctatgagaatctaan

SEQ ID NO: 12602 - DNA, 174 bp, Homo sapiens
  misc_feature 1, 2, 3, 4, 5: n = A,T,C or G
nnnnncaggtactcggtggctgcggtcactgcgccgggaagaggaaaaccagggaatgactctgtggccgagggatacgatgagaatggggcgtatcggtgcatgggcgtagatgggatatggccaactcgggctgcaaggacgtcacgggtccagatgaggagagttttctgt

SEQ ID NO: 12603 - DNA, 432 bp, Homo sapiens
  misc_feature 432: n = A,T,C or G
acactctgtgatgttcatacggcaaaatctcctgacacatttctcagaacgtatcctcgttgataagtgatgcgtaactgtattcctgaacggaatggtaaggaggccaggttaatctttcagaagtggagaagtggagaggagatgaaatccctggacttaatatggacaagagctgtgggatagatagctgagtagtgaggaggtgacttggctcgagggcccccaaacagaccagggtggaggtggccgaaaactgtgacagggcaggtgcagagcctaaagtggggcgctcacccttattgtggaatatttgctggtacctgcccgggcggccgcccgggcaggtactttttttttttttttcttttggagatgtgccctctctcctcccaccatgatccctatcactcgatttgggcaaatcttgan

SEQ ID NO: 12604 - DNA, 3981 bp, Homo sapiens
  misc_feature 1, 3975, 3976, 3977, 3978, 3979, 3980, 3981: n = A,T,C or G
nagagaatttgcaacacgtggtagtgaactgtgaggagtttgaggggtctgaagactgaaagagtcgaatggtttgttggcagggtgtcctggtggattggtttctgtaagttcagattctcataaatcgtgtgagcgtcgccgacacctctgagataaaagggcccctttcgactagcctctgctgaaaggacctagaagaatcccttaggatgaagctgagtcttaccaaggtagttaatggctgtcgcctaggaaaaataaaaaacctgggcaaaacaggggaccacaccatggatattccaggctgccttctgtataccaagactggctccgccccacacctcacccatcacacgctgcataatatccacggggttcctgccatggctcagcttacgctgtcatccctagcagaacatcatgaagtcttgacagaatataaagaaggagttggaaagtttataggcatgccagaatcactcttgtactgctccctgcacgatccagtcagcccctgcccggctggttatgtaacaaacaagtctgtgtctgtgtggagtgttgcaggacgagtggaaatgactgtttccaagttcatggcaattcagaaggcccttcagccagactggttccagtgcctctccgatggagaagtatcttgtaaggaagcaacttccataaaaagggtcagaaagtctgttgaccgatcacttcttttcttggataactgtctgcggctgcaggaagagtcagaggttcttcagaagagtgtgatcattggagtgattgaaggtggagatgtgatggaagagaggctgaggtcagcacgagagacagccaagcggcctgtgggtggcttccttctggatggttttcaaggaaatccaacaaccctggaggctagactacgcttgctgtcatcagtcactgcagagctgccggaggacaagccaaggctcatatctggtgttagtcggccagatgaggtgctcgagtgtattgaaagaggagtggacttatttgagagttttttcccttatcaagtaacagagcggggatgtgccctgactttcagttttgattaccagccgaatcctgaagagacactactacaacaaaatggaacacaagaagaaataaaatgtatggatcaaataaagaaaattgaaacaactggttgcaaccaagaaataacatcatttgaaattaatctgaaggaaaaaaagtaccaggaggactttaacccgctggtgagaggatgttcctgttactgctgtaagaatcacactcgggcatacatccaccatctgctggtgaccaatgagctgctggccggagtcctgcttatgatgcacaactttgaacactactttgggtttttccattacatccgggaagcactaaaaagtgacaaactggcacagttgaaagagctcatccacaggcaagcatcttgagatcttgcaaatacaagtctcactcttcacactgagcctgtaccactgttgtaacatgggaagacgtgaagaagaaataatctgagctttaattatttatatttggatataaggtctgcttaaataaagaatctttgtaccaaactgcccacatgagggtgaagagatttcctcaaaagacttaaatgacctggattgatcagagagaattgaactgtgacctttaaaacttctagactaattcttttagttgatagagattcatttagtcaaagacaaaagctttaactgtgagggcacagccttgaagtgggagtgatgagattctgagggacccatgaattggattgaggcttgaggggaaatggtgtgagacgaatgggctctggacatatgcctgttgatttgagaagaaatctggctggtttgagggtttcctttagttcaccctcatactctcaggagactcttctggatacttttgtcttccaccctgccctggcagtgcagccaatcagaaatggctcttgtgacttaactgggcttggatatccctggaatgtggggcttgaacattgctcctgtgatgatcatctgtcccaggtcacactccttcatttgaccacatggcctatttgcaacttctttttagagccaatgtaattgcctgttaggagccagaagtttgcccagctgctttcttctggttgtacagatccattgtggtctgccttccaggctcattaatagtctaactacgtaataactgaagacctatctcttgtgaagattcattctcaatgtgttcacttggacagagccctgcctggcctaacgattagagggttagtctccatcctgctcagatatgactcctgggcaattcacttaacttctccatggctgcttcctgctgaataaatagggacaggcataatggataggaatgaatgaacttttaagatactgtctagctctaaaattggaagaacaaaaagttttagattagagtcatagccttaatagccctagttgtcatcctgggagacaggcaacagtagagatatttgagagcctaaagagaggtttggcctgtgggtttttaagtggttattgaattggtatcaggagatcctgaggctggtaggggaaggtaattctttctaagttacctctgtatttttcaagttttctataaggaatacacatacacccacatgcacacaccatagtttttatacaaacagcaataacaaaaccaaaaagatgcccctttttttgtagggataagaaatacatttgttttatacttctatgctatattttgctattcaaaatttagtgggcattacttaacattgtttctaattattttgtggctgctgtatgttttatgtgttgggagcccattgtattaggccgttcttggattgctataaagaaatacctgagactgggtaatttggttttttggttttttggggttttttttgagacggagccttgctctgtcgcccaggctggagtgcagtggcgcgatctcggctctatgcaacctccacctcctgggttcatgccattctcctgcctcagcctcccgagtagctgggactacaggcgcccgccaccatgcctggctaattttttatatttttagtagagatggggtttcaccgtatgagccaggatggtctcgatctcctgacctcatgatccacaagactgggtaatctgtaaagaaaagaggtttaattggctcatggctctgcaggctttacaggaagcatggtactggcatctgcttggtttctggggaggcctccggaagcttatagtcatgacagaaggtgaagggggagcaggcacatcacatgacaaaagcaggaacaagactcagagcaagaagtcacttatcaccaaggggatggcccaggccattcatgagggatccacctttgtgctccaaacacctcccaccaggccccacctccagtattggggattacatttcaacttgaggtttgggcgggaacaaatagtcaaattatattacccatctacatggttttctttttcttagtatgggagtgtccatgaataaattcatgggcatcctcataactcttccatgaatggcaaggggtacttatggaaaacagttttccaaagatctgattgttttgaaatgtgttagattggacttgttcaaatgttcatatttttgttctatgctaaatgcatcgttaggggagtagtggtaaatattccagaatccatatgaaattcatgagtttatttatgtctaaaacactgaaaactgtgtccaatatcgttcagtttcctgggtctttttcttattagcacatttgagaaaaatattcctttcctttattgtagtaaatctattaaaggcaatagccaataaaacatttttaattttaaaaatttactgtgtttggctttctgtaaatgtagtaggtctgttaaacaaaatattaaatttccatagtaccannnnnnn

SEQ ID NO: 12605 - DNA, 582 bp, Homo sapiens
  misc_feature 580, 581, 582: n = A,T,C or G
accagcaaatccaaaacaatggaatttaataaaaagttcttcaaactattaaagtaacttaaaacctcttttaaaattgaaattttagttttatttaaatctacttcttagagcaccttttagctgcattttccccctacctcagtgcgtgaatgcaatatatcattcttggtatgtttttccgatcatagacatctgttgtttctggataaaatatctggaaaacaaaagaaacaatatttattatatgttttgcttctcacaagtattttaacttcccaaaatgaccctattttgattgtccttgctatcctataattatttaaatatagaggaacctctctgccattgcttcatcttgctgtagagatagaccaatcaccatatctggacccctgcctgacagcatgcctcttagtggtccacaggaggatggtggggtccccagccagctactccaaggaggctgtgtccacagtgctagtggcagtgtttcatttcatagggcatatgagcacatgtgggctctgcctcctgtagccttcacactcctgtgacttcccagaggtcccatgggccnnn

SEQ ID NO: 12606 - DNA, 485 bp, Homo sapiens
accaaaaagactctcaaaaaccaatactcccacgggcaagggaatagccaagtttgttgcggtttccaatgaatgacatcagccctgtgtaggtctcaatcaaaatgggttcagttaacaccatcagtttctttcctcttccagatccagttgaattcttgtgggcattctggatagctggaacaagcttagacatgaacccagacaattgtccagggacatcccagggaaggtgaacttgcccaggcagatgcgatagacagcgctcagaggaatccgctgcagctgcacacaactcagcatgatgaagtcgtatttgcagatcaagagagtcttgtctgtgaccagtagaattctctccttctcattgttccagtggtctatctttgtcaagagccagaagccttgaatggtctctccagaagtctcagctacgtgacctttcaagtcttccatggcagtctcaatggcccccggccgtgtag

SEQ ID NO: 12607 - DNA, 460 bp, Homo sapiens
  misc_feature 460: n = A,T,C or G
acagcccacggaactgtgagccaattcaatcccttttctttttcaattacccactctcatgtatatctttatagcagtgtgagaacagattaatacactcctcctcagaaagcattcaatttagctgtgtctaaagtatgccaggtgtcctagggtgttatcttagccaataattcttcctcttcagcaagatctatttgcctatgacagcttgacctacagttcctaccatacttgtcagtaacaagtagcccataacatctgaagggacttcattgaaatcacagaggttctttagttctttacctcattagtaggcattagggaagcacatcaactttctaatttaataaggtgcctgttgctttgaaaaactgctcaaaaaaagataggagaggcttacttaaagatatcactataggcgtggcatgctgcttcacgcctgtaatcctagtacctn

SEQ ID NO: 12608 - DNA, 1251 bp, Homo sapiens
ctccgccagcctcgaggccgggcgtcttcggtcatctccggcgcttctagggctggttcccgtcatcttcgggagccgtggaggtacgaacttaagacatgcctattttattaatttacttccaaacgcaacgaaaggtccatggacaatttgtgggccatttaattcagggcccccaattcgtacgtggagaagtgggaatgcaaaagtactttgacctttaaccttcggtccggcgcggtggagggaaacgcctccgtctctatataaggaattttccggtctcttcgggtcctttttcctctcttcagcgtggggcgcccacaatttgcgcgctctctttctgctgctccccagctctcggatacagccgacaccatgggtttcggagacctgaaaagccctgccggcctccaggtgctcaacgattacctggcggacaagagctacatcgaggggtatgtgccatcacaagcagatgtggcagtatttgaagccgtgtccagcccaccgcctgccgacttgtgtcatgccctacgttggtataatcacatcaagtcttacgaaaaggaaaaggccagcctgccaggagtgaagaaagctttgggcaaatatggtcctgccgatgtggaagacactacaggaagtggagctacagatagtaaagatgatgatgacattgacctctttggatctgatgatgaggaggaaagtgaagaagcaaagaggctaagggaagaacgtcttgcacaatatgaatcaaagaaagccaaaaaaacctgcacttgttgccaagtcttccatcttactagatgtgaaaccttgggatgatgagacagatatggcgaaattagaggagtgcgtcagaagcattcaagcagacggcttagtctggggctcatctaaactagttccagtgggatacggaattaagaaacttcaaatacagtgtgtagttgaagatgataaagttggaacagatatgctggaggagcagatcactgcttttgaggactatgtgcagtccatggatgtggctgctttcaacaagatctaaaatccatcctggatcatggcatttaaataaaagattgaaagattaaaaaaaaaaaaaaaaaaaagtacctgcccgggcggccgaggtacgcggggggcgccattttgtctcggcagcggtggccgtagctccatcgcattttatgtttctggcgagaagggaacggagttttcatcaggtagattggtttttgt

SEQ ID NO: 12609 - DNA, 526 bp, Homo sapiens
  misc_feature 526: n = A,T,C or G
acaagaacctgaggacatatggaagggatcccttctacacctccactataagatcacatataccctttctctcagattctcagatgtcatcttagagaagaacgggagacggagaagggaaatacaagatggggacagttacttaaaagaggatgtaactgcatttttggatttagctcccacatctaaagaactgggaagtcatgattactgtcctacaacaacaacagcaacaaagctgaacaaacgaaaaatcaatgaattttcttggatccatgagaggactgacatcacaggaaaacatagtcaaggtctacttatgtgaagcacaagttactggagccagaagctgacgggaatacttaaatggtaatttttaaatgctgctggaaactgaggtgggttagcttgcaagtgagaaactcctggggtcgagagtcttcggggcaccgagagtttcatgaattttacaaagagggaccagattatgactgaaaacagccaaaaaaaaaaaaaaaaaaaaagn

SEQ ID NO: 12610 - DNA, 1402 bp, Homo sapiens
  misc_feature 1, 2, 3, 4, 1399, 1400, 1401, 1402: n = A,T,C or G
nnnnacatagcgcctcgttagtattaccccatgagccgctttccctcgtcaaaagggttcgagaatgtttgctgtcttttatcatcttgtcgcccaccagatagtgcgcgcattttttttttttctgttggatgactgtttgctgtcggatggcccatgggaataattatgagaggcttattgaactgcagggaagaaggctgatgctttggttggaggaagacgcctcccctggatctgcagctctagtctcccgtgtggggtttaggttgagaacctatgacattcgtagggccactgtcctctccacggtgctcccgtcatgcgtgacctggcagctgtagctttctgtgggacttccactgctcaggcgtcaggctcagatagctgctggccgcgtacttgttgttgctttgtttgaagggtgtggtggtctccactcccgccttgacggggctgctatctgccttccaggccactgtcacggctcccgggtagaagtcacttatgagacacaccagtgtggccttgttggcttgaagctcctcagaggagggcgggaacagagtgaccgagggggcagccttgggctgacctaggacggtcagcttggtccctccgccgaagaccacatgatcactagtactatcccacacctgacagtaatagtcggcctcatccccggcttcgaccctgctgatggtcagggtggccgtgttcccagagttggagccagagaatcgctcagggatccctgagggccggtcgctatcatcatagacgaccagcacaggggcctggcctggcttctgctggtaccagtgcacacttttacttccaatgttgtttcccccacaggtaatcctggccgtctgtcctggggccactgacaccgagggtggctgagtcagcacataggaggtcacagagcctgtgcagtgagagaggaggccgaggaggagaacggtccaggccatggctgaggcaccaccagtgctgcttccttaggcccagactccccgcgtacctgaaggttcacagcacacttgtggatcatattataataatcccagattgccagggaatctaaggtcaagataggctgagtaactcactcaggtaatacaacttgtaaatggtcattctagaatgagaatacaaatctgtgtgactcaaaacttctctcttttcactgtgtcttgctcacctcattaaagaaattgctagttaaattatgaggatgaggaggtcattttacataagggaaagatacaagtaaaagtaaagtgtgggaaagtgaaaggcaccatggaggagataggcaaagtgcctattgataatgggcaatgcttactacataccaggctctgctgtgagcactaagcctgtgtgaactcannnn

SEQ ID NO: 12611 - DNA, 410 bp, Homo sapiens
actttttttttttttttttttttttgggttacaaactcaaggctggggaaaaaagcagtccagtattaaattggttaaaaagaaaaccactatggcaccaaaaaattcaaataacacaccacgagaaggtctgaaatgtgcctatacctaactctgtcgctcttcagctaaaatgaacacataactacttaacacaaggttaattctctccacaaatgagggcactgtccatgaaattcttataaggtttcttgagttaaaaggtagtctccttaaattcaaatacttctatgacacattaagcagacactggaagttttactcaaagccaccaagcgatgtttaacaatggcttggttgtttttcattgatcctgtaggtgtatgtctgggatcctctattactacatt

SEQ ID NO: 12612 - DNA, 496 bp, Homo sapiens
accggtgcccatcaccaacgccaccctggaccagatcactggcaagtggttttatatcgcatcggcctttcgaaacgaggagtacgcgggggcagtataggagctgaaacaaagcagagcatcaccttgcttgacctcagctggggacatgtgcatcagatgattcaaatttatttatttattttatttttttgagaaggagtctcactctgctgccaggctggagtgcagtggcgcgatctcggctcgctgcaacctctgcctcctgggttcaagcgattctcctgcctcaggctcctgagtagctgggactacagtttgaacagctggaaatagctccaatggattgctatgttgattttctaaaactggaagaaatctatgacctacattaaatgaaattgagataccaaagatttcttggtgtaagaagaaaaaaaaccctgaattatacgaccaatttgcattctactagtgattttgatgagagatgaga

SEQ ID NO: 12613 - DNA, 930 bp, Homo sapiens
  misc_feature 1, 2, 3: n = A,T,C or G
nnnacaaagattgaggtggaatgacttggactcttcttttgtcctcctccctttagtacagtggaacatgtagtgagttccctgacccatcgttagtggttactaaagacactaacatccactgcaccactgcatttctgcttcgtgtatttggagacaagaagggaaaacattcttctctcatgtcctttcaaaatcatgtataccttcagctttctagccatgttttctttatatcttggtatatttctgctggagctccttcttaaaaatctcattaaaaattagcagaatttgacttgtgtggcattttctctctagagtaagatgtgttaacttaaaggggccatataattaagatctgtttgtgtattaatcttttactctccttatctgaagcatagtactgttttgaattattcatatcggtttttccctgttggccagtttgctgggggaagcgcgccaggaaccagccctggcagaagtgttccaccagttgcacgatcctcaccgcaacattccttatccaatcccttaccggtaagcattcacctggagaaatttgacacctgttgtaggagacaagatgcccagaaacactcaagcaaagtttctctttcattaattacccacagggaatgaagcattagggagaaaagttcatagttttacctatgaatcccttactttgattcaaatctgttgtcagtaaattagctttttacagaagagccaatcctaatatctctatataataaattacctctaatcctacagctcagtagtctatcaaagaattgattccaatcgaaacattaggttttttcccttgccaaatttgtatgttcctttagggtttatttttattttaaaatttgaccagcttctggcataattgagttatctccagagcttattcagtaatgt

SEQ ID NO: 12614 - DNA, 596 bp, Homo sapiens
  misc_feature 591, 592, 593, 594, 595, 596: n = A,T,C or G
acaatttatcaaactgccccgagacctgataaccaaatccagcctccagggaaacatgtattcatatcttgctcacacatcagacatagttaacaactgcatgctaagcatagcaattaaattcagctgtgtttcaacaggtcccattggatttctttccagagaggacaattagtaaaccacaaaaactcacggggtgtgaccaacagcgagatgcctttgccgaagttgagtgcatacccggaatttgagttccacagtgcgttctccctaaacaaaaaaccccttgcagtagccaccatgtcccttctcctatgattcctattaaagctaatgtctgaaaaccaatcacacagcagtcacacagactgtgggtcatccatgggcccttgatggtgtaaataaagcttccctcttccatgagaccattgctgacaaagtcaccactccccacagtgatgtgggtgatcaatattgagatctgccatctgagggagggggccctgtgacatgttatgaagtctggagttttcctatgtccagcagaacgacgtgctggtctggactgggaacagccaggggcatggacannnnnn

SEQ ID NO: 12615 - DNA, 634 bp, Homo sapiens
gggagtcgacccacgcgtccgagggcatctgacccgtgctatttgctgtcgtgtgacaagagatgggagtgcatttgaggatggactacgacatccctttattgtcaaccaccccaaggtgctataacccccttctattttccctgacattttcctccttttcaagcagtcatgtaaacagaggaaaaatgtacactgtgggcaaggggaacattgcccacagtggtagcccacaagggaacattgcccacagtggcccaccaccaacattggttggtctcccaagaacttaaactttcttccttttggatgccaagggcttttcttctcttagtctggaattaatctgaatcgaggtggagttagtatgtctagagggtgctcagtcttagccaaacagaaccctaaatacaggggaaagatcatgaccccacacttcctctctcctatgagtcttgagtccctgcttcagaatcttattcctgaaaggtttccatctttctcccgttgcttctgggattcctaggttggcagagtcagcatatatgattccaaaaggcaatccgggaagactaaggagacaagcgtcaactggtgtctggctgatggctatgacctggagatcctggacggt

SEQ ID NO: 12616 - DNA, 584 bp, Homo sapiens
  misc_feature 566, 567, 568, 569, 570, 571, 572, 573, 574, 575, 576, 577,578, 579, 580, 581, 582, 583, 584: n = A,T,C or G
acggatgaggccacatgtgcttagcatggaagtgaggcgaattgatgcagcaggcaggctttctgtggcctctgaagggccgtggtgtgaagggagggattagttatactccttgggctttagaaaccagaagtggggtccatgggtgggcttgttgtagaagaggaattcagctcaggataaaataggcttttctagcagttggtagcagctcaacaagcaatgcgctgcctccagagctgggaacatatgaggattattttagaaggatttgtgcctcagatttaggctcgcccactattatttttgatggtaagtctgagtctacaatcatgttgagatagccatgtgttctttccctgtaacttcttaatatatgatttaagctgtttctgaaagctgttggcattgaactccatgtttatcgagtcgacttcaaatatttgaaggtgttggtaatgtttgttatttgccccgagaagccctgaatccatactgctgggtacagtttggctttctttcataatttcaacatatataaaaataagataatacaataaagtgannnnnnnnnnnnnnnnnnn

SEQ ID NO: 12617 - DNA, 906 bp, Homo sapiens
  misc_feature 1, 892, 893, 894, 895, 896, 897, 898, 899, 900, 901, 902,903, 904, 905, 906: n = A,T,C or G
ngaccaggttggaaagtggtatgtgtctaattgcaggggcgggggtaggggggaggccagaggattaacactctttaaatagacatcagaaaactaagaatagccttgctgcctggtaattgatgggcattcctgactacgggccacacactcagtaggtgctcgataaacatgggtgaaatacaggaataaacaaatactgaaaatgggtcattgggtgagcacttagccagtaaaaatctgtgctttgtataaaaagaactttggactgaggttatatgagtcttcctgcaggctggagacctctgttacctttacttctctacttttgttgtcttgagaccagcttttttatttttggtgaggagaacagcaggcagttcaaatgtcagggaaagacaagttcagcttgctttttccttatttctgtcttgttacctgctatcctgccaggttagaaagatggaatcactcccttttgccctatcatcaagacttcagtgttccctggagcactctaaatttgccatcagacttggatcatcctctaataccaagctcctgggtccttcctgaaggctgcctccttgtcttgctgagaagaattaaggttgcttccctgggaggaattcagcagcacctcttgtaagtcatcaggtgtgctgtaaggatggggcaggcaacatttctttgtactgtgggaaggcctaaatcagtgtttctcaaggtgtgatccttgcaccaccaatcttaagaaatgttctttggagccgggcacagcggctcacgcatataaccccaccttgggaggctgaggcgagaggatcgcttgagcccaggaattgaagaccagtctgggtcacatagtaagattccctgtctctactaatannnnnnnnnnnnnnn

SEQ ID NO: 12618 - DNA, 3031 bp, Homo sapiens
  misc_feature 1, 3027, 3028, 3029, 3030, 3031: n = A,T,C or G
nctgcgccgggtggcggtcgccgggcaggttcacggggacacaactttttttccttagtctgtatactttctgctgtcactagcataacagaaaagacgaatggcttttgttttaaactgagggcacttttacaaaagtcatctttccatttatttttctttcagaaaaagaatttgggttttgagctttttttaaaaaaaaaaagacaaacactttccttgactttgagaaataatttaagtcaaagaatctgctctatgctaaccaagagatagagcacagcaaagatctgccagccccaggcctctacctagtggcctggaaattcaagtattcttattggtggaggccatttgtttctgattagaagctgtctaaacctcctactcctcaactcaaaggaaaacacagagcataccatggccaagaaagttgcagtgattggagctggtgtgagtggcctctcctccatcaaatgctgtgtggatgaggacctggagcccacctgctttgagagaagtgatgacattgggggattatggaagtttactgaatcttccaaagatgggatgaccagggtctataagtcattagtgacaaatgtctgtaaggaaatgtcatgttacagtgacttccctttccacgaagattatcctaatttcatgaaccatgaaaaattttgggactatctccaagaatttgctgagcactttgacctcctgaaatacattcagtttaagaccactgtgtgcagcataacgaagcgtccagacttctccgaaactggtcagtgggatgttgtcacagagacagagggcaagcaaaatagagctgtctttgatgctgttatggtttgcactggacatttcctgaatccccatttacctttggaagcctttcctggaattcataagtttaaaggtcagatcctgcatagtcaagagtacaagatcccagaaggctttcagggcaaacgcgtcttggtgattggtcttgggaacactggaggagacattgctgtggaactcagtcgaacggcagctcaggtacttctcagtactagaactggtacctgggttcttgggcgctcttcagattggggctatccttataatatgatggttacaagaagatgctgtagttttattgcacaagttctgccttcacgttttctaaactggattcaagaaaggaagttgaataagagatttaatcatgaggattatggattaagtattaccaaagggaaaaaagcaaaattcattgtgaatgatgagctgccaaactgtatcctctgtggggcaatcactatgaaaaccagcgtgattgaatttacagaaacctctgctgtctttgaagatgggacagtggaagaaaacattgatgttgtgatcttcactacaggatatacattttcttttccattttttgaagaacctcttaaaagcctctgtacaaagaagatatttctatacaagcaagtctttcccttaaacctagagagagcgacattagccatcatcggccttatcggccttaaaggatccatcttatcaggcacagagctccaagcacgatgggtcacaagagtattcaaaggactctgtaagatacctccatcccaaaaattgatgatggaggctactgaaaaggaacagctcattaaaaggggagtgtttaaagacaccagcaaagacaaatttgactacattgcctacatggatgatatcgctgcctgcataggcacaaagcccagcatcccacttctgttcctcaaggatcccagactagcttgggaagttttctttggaccatgtactccttatcagtaccgcctcatgggccctggaaaatgggatggagccagaaatgccatcctgacccagtgggacagaacattgaaacctttaaaaactcgaattgtccctgattcctccaagcctgcctccatgtcacattatttaaaagcctggggggcacctgtcctacttgcctctcttctacttatctgtaaatcttcacttttcttgaaattggtgagagataaactacaggacagaatgtccccttacctagtaagtctttggcgaggatgaacctgattgttacaagggttacaccaagtcatgctaattctatctccaagtatcttgtgcatccctcctctgctctccatcataactgctattagccaaattcaggcccagtcatctcctatctgaattattgtattatcttcttctttgttttcagtaccctctttcttgccaccctttccaatgcatcttctaccctgctacctcagtgattattctaaaataaatatatatgatatggtttagctgtgtccccacccaaatctcatcttgaattgtagctcccataattcccacatgccgtgggaggtaggtaattgaatcatgggggcaggtcttctcccatactgttctcatggtagtgaataagtctcacgatatctgatggttttataaatgacagttcccctgcacaagctctctcgtgtctaccaccatgtaagacgtgtctttgctccttcttcaccttccaccatgattgtgaggcctccccagccatgtggaactgtgagtctgttaaacctcccttcctttataaattacccagtcttgggtatgtctttattagcagcaatagaacagactaatacaatatggtttattactcttaaagtaatatatgggtttatacaatatatcagggaacccttctgaattccccagggaaggtcccagttagggaaccaaaatggcttccaaattacgttgagcaaaattctttgctgtccttagaaacagagtctcactctcatcacccaatggagcacgtgttgcaaccttatcccggggcctgatcctgggtcaagtttccccctcaacttggtagggccgattcgcgttaaagttccaacgagggaatcgcttctctaaaaagcggcccgccgggtccctgcccattcctgggggcgaccggacgcgctccaaagcgcnnnnn

SEQ ID NO: 12619 - DNA, 967 bp, Homo sapiens
  misc_feature 966, 967: n = A,T,C or G
ggagagaactaggcgctaggacagctccaggtgcgactccagaagtactgactcaactgcactgaccatgttgtcataattagaataaagaagaagtggtcggaaatgcacattcctggataggaatcacagctcaccccaggatctcacaggtagtctcctgagtagttgacggctagcggggagctagttccgccgcatagttatagtgttgatgtgtgaacgctgacctgtcctgtgtgctaagagctatgcagcttagctgaggcgcctagattactagatgtgctgtatcacggggaatgaggtgggggtgcttattttttaatgaactaatcagagcctcttgagaaattgttactcattgaactggagcatcaagacatctcatggaagtggatacggagtgatttggtgtccatgcttttcactctgaggacatttaatcggagaacctcctggggaattttgtgggagacacttgggaacaaaacagacaccctgggaatgcagttgcaagcacagatgctgccaccagtgtctctgaccaccctggtgtgactgctgactgccagcgtggtacctcccatgctgcaggcctccatctaaatgagacaacaaagcacaatgttcactgtttacaaccaagacaactgcgtgggtccaaacactcctcttcctccaggtcatttgtttgcatctttaagtgtcctttattttgtgtatgaaaaagccactaagcttgcccgtgggaatcgggtgccgctgaataggccccaaaagtccgggactaatttccgtggccttgtcggagcccatctgtttgcagaccgcgatggtagggccacaatttggttccctgttggtgccacattggtcctcgaccggtaatttgctggacgacgcataggcccggatcggccgtccggggggggggcccggaaccggacccgcggtaaaaaagcnn

SEQ ID NO: 12620 - DNA, 449 bp, Homo sapiens
  misc_feature 1, 2, 3, 4, 5, 6, 7, 8, 9, 10, 11, 12, 13, 14, 15, 16, 17,449: n = A,T,C or G
nnnnnnnnnnnnnnnnnatttttttttccttcagccctgcaaggcgggaatgcactgcactgctgcttatcactgcaaggcggtaatgcactgcactgctgcttatcactggacatctcaccatcctgtgcttgtcctgttaatcctaaccagcccctgcaagaagtcctttatttaagtctctacatttgactcatctggggaaattctgctcccttctgggaccctgaccacttaaccgctaaattctaaaatgggggtgttgtctcatgaaaaagcagatttgacaataccaggtccatatttgcacatcaaaacaatgacctagagcaggaaaacaattgcatccttaaagccactgctttctcagagggggtaattgacagggaatcttgttaaaatgaatattcaaattaattacctctggggctgggcctgagattctgccn

SEQ ID NO: 12621 - DNA, 2473 bp, Homo sapiens
  misc_feature 2469, 2470, 2471, 2472, 2473: n = A,T,C or G
gatggtattaggcaaatcttactatactatgaaaagcattaccttgcctatttttaatattattaaagcctttctccttcagtagtctattttcttagaataacaactctaaagtcatgtgccaccacacccagcttactctgaacttttatgacagatgattgttttttgtttttaatgtacaaatgagacaagggtacaaattggaactagaaattgacattgtcattgacaaacatggctaaaaacaaaacatcaaatcctgcccccgtgaagagttccctgtcacctcaagtttgaggatagtcctctaagagtgacctaagcataagtgaaagacacctcccctcacccttctagccccctacaaggtgccaggttggggtaaagagttggagatgatggccaggagtggcctccaacacgctggtgagaggcctgattaggttttggggaagatctgagagctctggcctcttcgtgagtggaacataaagccgcctcttgttgggagatcctaccccagtgacagaggaatcccccaaactaggctgtgccctggctccgtggcggctccagacccgggtagtgcctttgtcccctgaatactcactcccccggtccagagggccttcccactgcccagcctggagaaggcctcccctgacctgctctctcagtatcctggagagctggccagaggccatcacaggcatcatcctcagagctcctcagacctgggactttgtttttgctggttcagtgcattttgtgtatttaagagcaaacactagccaggcgtggcggcgtgtgcctgtagtcccagctacttgggaggctgaggcaggaggattgctcgaacctgggaggcggaggttgcagtgagcctagatcacgccattgcactccagcctgggtgacagagtgagactccatctccaaaaaaaaaagcacaaacactgcactgcctgtgctgaaattagtgaccacccagtgggctccaggctccgctaggtaacttcgttttcccagcagtggagtgggcaccaccttggtggggcagtgcccctgtgcccagggcacacctcattcccagttctatagcaattcaccaagaacaaagtctgcagttagagccaaagctggtggtggccagagggtgctgaagatacaggccagtggggatgggagccatgagccccgaatgtcttctgctctgatgctccccggactaagcctccctggcacactgggagtgaggggcagcctgagcaagtaggggaactcagaccacaggccagcagatttcccagcagtccatcactggccaccgtgtagccagattctgttccgtccacactggggtgaagagtacttggaatgtctgccatcctgtatgatcaccccaccccctgtccatccatcagtagataataagggttggttacaattcataagagaatagttaaaacacttctcctctcatgcctaccatggtgctgtatcaaggggatttgttcacatatgggctcagcaacgcacaagtgaggtcagccatggcactaggtcattcccattttagccaaggtgcctctataggggtcagacatcatgtgcccagacctaaggtcaggaatgtcatatttttctgttaaaatcattttatttctgtgtatcttacctttaaatcattgtggtttactctgagattctgtagtcctaatattgtatcattgtgctgtctgcaaaacaacttgaatctattttgtttgcatcttttgttacatgtaacgcagctgtactttatgttctttgcaactgtttccattatgagaacgctgtgctatttacaaggttacatttttcttggccaggcgaggtggtcatgcctgtaatcccagcactttgggaggccaaggtgggcggatcacttgaggtaaagagttgagaccagcctggctagcatggcgaaacccagtctctactaaaaatacaaaaattagccgggtgaaattagccgggcgtggtggtgtgtgcttgtaatcccagctactcgggaggctgaggcaggagaatcgcttgaatccgggaggcagaggttgcagtgagccaagatcaggccactgcactccagcctcggggtcaagagcgaaactctgtctcaaacaaaaagaaagaaaggaaggaaggaaggagggaaggaaggaaggaaagagagaaagaaaagaaagaaagaaagaaagaaagaaagaaagaaagagaaagaaatatctttgctatttgtataaaaatggaaattttaacagcttagcctctagagagttactgaacgtggttactgggaatgtaatagactgcattaaatgactggcatcaactgggtaggaaccgtggataagttcggaattatttttctcttgaagttgtttccaaacgttcgctttttgcaaagtgttatcattcttaacnnnnn

SEQ ID NO: 12622 - DNA, 543 bp, Homo sapiens
  misc_feature 302, 541, 542, 543: n = A,T,C or G
actcacttcagcctggcaaaagagtaagaccctgtctcaaaaaaagaaaaaaaaattggtcatgtctcagaccaattaaatcacaatgttcaatggtgggatctagacatcagagtcttttttttaagctccccaggtgatgctgatgttcagcccagtttgagaagcactgatcagcactttccaaactttaatgtgcacacagatcacctggggatattgttaacctggagatccctatacagtggatctgtggagaggcctagaggtctgcatttcttataagctctaaggcgatgcanaagctgcttgtgggtggaccactttgagtccaagagctacatcagccctcccctctgttctctgattcattctcttgggctctcaaggctgcgggtgggccacaaagctgcagctgtgtcgagaggagcttcaagccgcagtcattgctgcttcatgtcacagggaattttattgtgaacactaaataacacttttctcatctgtaaaaacaggatagtagtcagatgtgtccttggcnnn

SEQ ID NO: 12623 - DNA, 232 bp, Homo sapiens
ccgggcaggtacaacaaacgctccaggaaatggaaagccagttggcagcccacatgtggttacctcacaccagtcaaaagtgacagtggagaggtgagttttcactgacattcattaaagtaaaacattactgtttttacccaccagctccaccagaatttcaaagtcttaacattaggatttattatttggggggggcctcattgatttttggttgagctagtaattctgt

SEQ ID NO: 12624 - DNA, 942 bp, Homo sapiens
  misc_feature 1, 2, 3, 941, 942: n = A,T,C or G
nnncacaaaccagaatagccctgatagtgctcaaggatctatttaagaatctaccacaacacactggagaaaaaaaagaagaatatccacagaaaggattgctgttgaaattggcatacttgaggcaccaggagatggttaggaacgaagaaatgcagaggatatggtatcagctgtacaggtgaactgctgtggttcccaggagcctgctttgcagaggacagtggcatctttgcaacagaggtaaccaacagccattcctgtccaggaaccccatagagggagatgtggctgcacactcccataacccctaagaatcagttgctcttgtgctattctgggactggagctgccacatttcccatccctgtgcatgcccccaacctctgagctgtggctgttccacaagtgcccacattcctgaccccttctctgagggtttattctgtgtacccatgtctcatacaccagaaccatagcaagctagatcatgtgtgggtcccagagccaaggtctctccgtgcatgcctgtgctctgggtacaaacttagctgccatagagagctagctggcatcctaacctgcagccactgtagctcctatgcatgcccatagtccttgtctccaggttccgctggcttacccattacttcataagcaccaaacatgcaagtggggggtgccttcatcccagcacacaacatgccattaatgccctcgggatcccaagagccatagtccctctgctcatgctcatacttcaagacttggctctatggctgcgtacatgccacccatccgacccctgtaccacgccactggaccacgccacaggcagactggccaaaagagacctgccaccatcacgggggcaacccacaacgcaaccacgctgccacgaacacaacgcccacgcgggacaacacgccggcgacacacann

SEQ ID NO: 12625 - DNA, 678 bp, Homo sapiens
  misc_feature 674, 675, 676, 677, 678: n = A,T,C or G
acaaacttttagccaccacgacgactgcctgtttcctaattatatttaagcaggtgaggtcggcctttatgttaaggaaaatcacacgggctgagagtcgctggcagcacagcttgaaatgcttctcagatattaaagcctgcttgcttttccaggtgggatacactcgctttccttttgacagtaatgcatgtttccccattagacaaacctgttttactacattcatcaagaaacccaatgatgctgcctcttctgctttgcaaattatcttttcacacgcgtgactccccttcttaggcagatggtttaccaagtgctacttatttggtttgcgttttgactattttttgaggatgacgtcattaatctattgctggaatctgggagagctgctgttttaaagacttactggagctgccacgtctcgagcagataaatgtggagagccctccgaggaggaacggaaagaaatctatttgcgtgagccgttatggattccgggggagagttggccgtgctcctggatgggaaccgtgaaggagaagtcgtcgaggggtggtcgcttctcatgggttaacatcagctctaaaaggaacgtgggtttccctgcatctacaaaggccatgtttgcaactccttttattccatggagagtggtactggaaaataannnnn

SEQ ID NO: 12626 - DNA, 362 bp, Homo sapiens
  misc_feature 362: n = A,T,C or G
acgcgggatatttattaaatgcgaattgagagcttgtgttgctatccccaaagacatcatagtcaagtgaaggaactgacttgcaattcaagaattaggatattggaataagggcaaaagtagggggaagcagagggtgaaaagaagggcctggagggagccctaaaccctccttgcagaagaggtgaaatggaacattccctcagctgcctttggaaggatcaatagacactgagagcagcttggtgagagtttgagaatgcatagcgagtttggggaattttaaagagcttagtatggctgaagtttaaaggacaagtgggagattgtgaaaaaaaaaaaaaaaaaaaaaaaaaaagtgn

SEQ ID NO: 12627 - DNA, 447 bp, Homo sapiens
ctccactgatggtcaatgtgactgttgtcccttagctggagccagagaatcgctcagggatccttgagggcctctcactgtctttatatattaccaatataggggcctggcctggcttctgctggtacgcgggtattctctgaagttattgcatattttgaaagtagctatcagccctttcctccctcccattctctacttggtgcacctccatgtttttttctgctttgttgtaactgctgcttcctttttcttttgttcttttattcatttttttctattcttcctacattgggttttatcttctggcttccaaatctggaaaacttggatttgttattcttcggtcagtttgacaaagcaacatacttaattgcctcttttatgttaccattaaattaattctgtgaactctgacttcccttagaattgaaaaagaccacgtgt

SEQ ID NO: 12628 - DNA, 391 bp, Homo sapiens
acttaagtgtccccaaagtgtggtccctgggccactagcatcagcatcacctggaaacttgtgagaaatgcaaattcttggagcttacccctgatatattgtagcagaagctctaggtccaccaatctgcattttaagaagcctctcccagccaggcatggtggctcacgcctataatcccagcactctgggaggccgaggcaggcagatcacctgaggtgcagagtgggcattgctttccagatggataaaaaagcaaaggctaaaatgtaacataaatgaggaggatcttatttgcacagccactttctgttcgtcattggccacgatttcagcagcaatcacagccgcctggttatttcgctgtggagtgggagtggagattgctagt

SEQ ID NO: 12629 - DNA, 533 bp, Homo sapiens
  misc_feature 1, 2, 3, 4, 5, 6, 7, 8, 9, 10, 11, 23, 28: n = A,T,C or G
nnnnnnnnnnncggaaatacttnctagnattaattaacgcgggggggacagcccgcgcccctagaacgctttgcgtcccgacgcccgcaggtcctcgcggtgcgcaccgtttgcgacttggtacttggaaaaatggacaaggattgtgaaatgaaacgcaccacactggacagccctttggggaagctggagctgtctggttgtgagcagggtctgcacgaaataaagctcctgggcaaggggacgtctgcagctgagtaagtatgagcccacgtgatcctgtataccgcacatgctgaagcaaccgaggagtatatgtgataacggcatgttttccattgatggcagggtaacgcatagccttacccccacaaccgcaaccacgagtccgtctctcaaaacagcgtgctgcgacggctcctgcatttgcagcttccctgtgtgttgcccaggagctctccacctccgatgaacccagggccgttcccttcataccctttcattagtagctctaagatgtttgattaaggtgt

SEQ ID NO: 12630 - DNA, 849 bp, Homo sapiens
  misc_feature 770, 771, 772, 773, 774, 775, 776, 777, 778, 779, 780, 781,782, 783, 784, 785, 786, 787, 788, 789, 790, 791, 792, 793,794, 795, 796, 797, 798, 838, 839, 840, 841, 842, 843, 844,845, 846, 847, 848, 849: n = A,T,C or G
acctcagtctagtattgtctgtttgtctaaaattggttctaaggaatctaggctagtctgtctatccctttcaacttttgtgaggctgcacaaatgtaaaatgttgaataaaaagcattgatggaagtgtgtagaaattcttctgtttgttctgttgtaattttagttgcagtgcagcctggagagcagcttcttagtccagaaagaaggacaaataccccaaaagccatcagcgaggaggaggaggaagtagatccaaacacacagagtaagtctcaggacccatttttttcttacatgttgttcctccaggacttaaaaatcattcacagagacgtgcaccgcggtgagtgtggactcctggaagcgcaccgtagctccgctgtgtcctgctgctcctccctagctgtcagggaggctgtagtccattgctttgccagctcttttgtttccgagtgaacaccttatccgtacacatgcggctgtctctgaccctacagaccagctgggatgccactgggggagcgctcccttccccccgcacttcccacactctgcagttattctgagatccttgagggcagggaacaggtttgtcttctttgtgttctcagaaattaatgctcggcctctggtcagcaagcaacaaccttttgttgagtgataatgaataaataaatgtttcccacatgagtattcagtaacctcagtgtcaggttcagccatctgttttggtggatatttaaaagaaaattccgcttttcctacannnnnnnnnnnnnnnnnnnnnnnnnnnnncttggggggggggcgcgctattttttttaaaaaaaaaaannnnnnnnnnnn

SEQ ID NO: 12631 - DNA, 599 bp, Homo sapiens
  misc_feature 596, 597, 598, 599: n = A,T,C or G
tagggagtcgacccacgcgtccgccgtgttggccgtgctgtagtaaaggaactagatccaggagggtcaccaaagtcacgtagaggccttggtagtccaaagaagggtagtctgacaactgagcatcacgactttgcgggccgcgttctgagggagcatctcgcaggacgctgtaaaggagggagcgagtaacagtagggttgatggaactgacctgcggtcttagagatggggtgagtgggaatggcacaggaaaaagacacatggtcatgggcactgtcaaattggaggcatcttggttttccttcttccctgtgcgggacaaaatgctgttggggggacaaagaaaaaaaagagacaacaaagacacaaagaacagcacattacattgaaatgacactctaaaacaaataataaaacaccagatacattccacataagatgcaattgccacgccagcagggtctaccagtctagtactggtcacatagcttcgtgctcagaggtaccaataatacaaggtttactttgtggaagtctcattgcatctcatgtgttatctggttagtaaggagcaaaaatattaaaatgcctgnnnn

SEQ ID NO: 12632 - DNA, 584 bp, Homo sapiens
  misc_feature 583, 584: n = A,T,C or G
tatagggagtcgacccacgcgtccgccacctcacatgttgatttccaggtcactacaggagcggaagagagcaggcttctcttccccgtggaagaattccccgtggccccacccacttcccccagtgcgtacgtcaggctccagttcactgtgggatgcccagacaagccctgggcaggttccctcatcgacccaaaagcatctaatgtaaacattcttgggacgcttggagattctccagggaccccattttatctgcctaagcatttggctgtctcatgttaaggtatcatccagccctcgtggcttgtgatggccatttctggttgcgtgagcattagtcatcctgtctctgcattgtggcatgccatggtctcttgcaagggctttgttacaaggtatctgcatttaagatagcccagtcatcgagcgttgcgaacagccccacccaatcgggcctggccaggagatttcatcactgtgatcttaagttctttaccagagcccttattagaacagttagatgcaaccgggcccggtggctcatgcctgtaatcccagcactttgggagggtgaggcaann

SEQ ID NO: 12633 - DNA, 599 bp, Homo sapiens
  misc_feature 1, 598, 599: n = A,T,C or G
nagggagtcgacccacgcgtccggagatccaagattcaaggtaaaaaaatgaatcattaatttctaaactaagtactctgtctatgcctgccttttacatctacgaatattagctcccagaagctacatacacttacaaaaatggtgaaatcttactaaatataatttagaattatcatggccatttaacaacactacactttaagatgtacatttaaaaatggaggctcctggctgggcatggtagttcacacctctaatttcaatgcttttggaggccaaagcaagaggatcacttgaggccaggactgggcaacatagcaagaccccttctctacaaaaaattatctctacttgggaggctgaggcagaaggatcacttgagcccaggagttcaagattacagtgagctatgatcatgccactgcactccagcctgggtaacagagtaagaccctctctctaaaaaaaaaaacctaaaataaaatgagggctcctggattaggcccacccagagatgcccattattgtgcagaagcttctaaaatatttcaaaaatgtttttattgtctctttcaaaagactacaaaacacaaann

SEQ ID NO: 12634 - DNA, 3281 bp, Homo sapiens
  misc_feature 54, 55, 56, 57, 58, 59, 60, 61, 62, 63, 64, 65, 66, 67, 68,69, 70, 71, 72, 73, 74, 75, 76, 77, 78, 79, 80, 81, 82,83, 84, 85, 86, 87, 88, 89, 90, 91, 92, 93, 94, 95, 96,97, 98, 99, 100, 101, 102, 3280, 3281: n = A,T,C or G
aattaaccctcccttaggggcccggcccgccgggtttaaccgattccccccttnnnnnnnnnnnnnnnnnnnnnnnnnnnnnnnnnnnnnnnnnnnnnnnnnacgcgtccgcccacgcgtccgcggacgcgtgggcggacgcgtgggtgcgcgcagctcacaggccctgggagtgagctggtgcccggcgacctggcacccgcgcctggatatggggcgtctacatcgtcccaggagcagcaccagctacaggaacctgccgcatctgtttctgtttttcctcttcgtgggacccttcagctgcctcgggagttacagccgggccaccgagcttctgtacagcctaaacgagggactacccgcgggggtgctcatcggcagcctggccgaggacctgcggctgctgcccaggtctgcagggaggccggacccgcagtcgcagctgccagagcgcaccggtgctgagtggaacccccctctctccttcagcctggcctcccggggactgagtggccagtacgtgaccctagacaaccgctctggggagctgcacacttcagctcaggagatcgacagggaggccctgtgtgttgaagggggtggagggactgcgtggagcggcagcgtttccatctcctcctctccttctgactcttgtcttttgctgctggatgtgcttgtcctgcctcaggaatacttcaggtttgtgaaggtgaagatcgccatcagagacatcaatgacaacgccccgcagttccctgtttcccagatctcggtgtgggtcccggaaaatgcacctgtaaacacccgactggccatagagcatcctgctgtggacccagatgtaggcattaatggggtacagacctatcgcttactggactaccatggtatgttcaccctggacgtggaggagaatgagaatggggagcgcaccccctacctaattgtcatgggtgctttggacagggaaacccaggaccagtatgtgagcatcatcatagctgaggatggtgggtctccaccacttttgggcagtgccactctcaccattggcatcagtgacattaatgacaattgccctctcttcacagactcacaaatcaatgtcactgtgtatgggaatgctacagtgggcaccccaattgcagctgtccaggctgtggataaagacttggggaccaatgctcaaattacttattcttacagtcagaaagttccacaagcatctaaggatttatttcacctggatgaaaacactggagtcattaaacttttcagtaagattggaggaagtgttctggagtcccacaagctcaccatccttgctaatggaccaggctgcatccctgctgtaatcactgctcttgtgtccattattaaagttattttcagaccccctgaaattgtccctcgttacatagcaaacgagatagatggtgttgtttatctgaaagaactggaacccgttaacactcccattgcgtttttcaccataagagatccagaaggtaaatacaaggttaactgctacctggatggtgaagggccgtttaggttatcaccttacaaaccatacaataatgaatatttactagagaccacaaaacctatggactatgagctacagcagttctatgaagtagctgtggtggcttggaactctgagggatttcatgtcaaaagggtcattaaagtgcaacttttagatgacaatgataatgctccaattttccttcaacccttaatagaactaaccatcgaagagaacaactcacccaatgcctttttgactaagctgtatgctacagatgccgacagcgaggagagaggccaagtttcatattttctgggacctgatgctccatcatatttttccttagacagtgtcacaggaattctgacagtttctactcagctggaccgagaagagaaagaaaagtacagatacactgtcagagctgttgactgtgggaagccacccagagaatcagtagccactgtggccctcacagtgttggataaaaatgacaacagtcctcggtttatcaacaaggacttcagcttttttgtgcctgaaaactttccaggctatggtgagattggagtaattagtgtaacagatgctgacgctggacgaaatggatgggtcgccctctctgtggtgaaccagagtgatatttttgtcatagatacaggaaagggtatgctgagggctaaagtctctttggacagagagcagcaaagctcctatactttgtgggttgaagctgttgatgggggtgagcctgcccaggccaagaattcggcacgagcaattctccttctagatatcaatgacaaccctcctcttgttttgtttcctcagtctaatatgtcttatctgttagtactgccttctactctgccaggctccccggttacagaagtctatgctgtcgacaaagacacaggcatgaatgctgtcatagcttacagcatcatagggagaagaggtcctaggcctgagtccttcaggattgaccctaaaactggcaacattactttggaagaggcattgctgcagacagattatgggctccatcgcttactggtgaaagtgagtgatcatggttatcccgagcctctccactccacagtcatggtgaacctatttgtcaatgacactgtcagtaatgagagttacattgagagtcttttaagaaaagaaccagagattaatatagaggagaaagaaccacaaatctcaatagaaccgactcataggaaggtagaatctgtgtcttgtatgcccaccttagtagctctgtctgtaataagcttgggttccatcacactggtcacagggatgggcatatacatctgtttaaggaaaggggaaaagcatcccagggaagatgaaaatttggaagtacagattccactgaaaggaaaaattgacttgcatatgcgagagagaaagccaatggatatttctaatatttgatatttcatggtggaataacacagagaaatgttttaactgactttggatcttcatcacctaaaaaagagtgtgttgatggcagttccaatgaaggacaactaatttataacttgttctatattgtaaatagctgtttacaggtttttaaatttaaattcagaggttataaaatgtgtacagcatttttaagtgaaaattagtactaacagctataggacttgtatttaaaaaaaaaaaaaaaaaaagatctttaattaagcggccgcaagcttaaaccctttagtgagggttaann

SEQ ID NO: 12635 - DNA, 429 bp, Homo sapiens
  misc_feature 428, 429: n = A,T,C or G
acgcgggggaataacagcggtgggagtgaaatcaaggagaaggtggaacaagtgaggcttaaaaagagcccaaggaggatgggaagaagaaatgccagatggaggaaatagaatatcacagcacagtcaaaagaggagaggtggcaagaatggcagggcatgtgtctgccagggaagggttggttgaggcctgcactcaagaccttggcaaagcaaccagagccagaaagaaccatgagagaagctttcaatgactttcagacactttgtcctccttttttacccttctcctctcctgcttttttccccatctccaagtatattttgggatgtggatgccattcgccacacaaaaacacttgggattcattcctgataccccaattcatcccactttccccccttctcaagtcagatctcacccaccnn

SEQ ID NO: 12636 - DNA, 706 bp, Homo sapiens
  misc_feature 1, 2, 3, 4, 5, 706: n = A,T,C or G
nnnnncaggtacaaaacaaattcaaagggttaagaatttcaagttggtagcttcagagcattaagccccaaatgtggggtcccttctgagcccaggattatgtgtgactgcactggtcacattgccatgaagccagccctggtggttggtagaggggtgggcactggacctaagcagggccaatcagagccattcctggaaatggatatataaatattaggaatgcaaagttatttattttgttagagtttgaacaacgtgatctgtagaaaaccagtcacatttccttaaggatgcatcaataaatatgagctaaatgtaataattagaactttggtttccaagcagattccatgctctaattccctggatagtgaatataataagatgatatatccatgaataagttactttacattgccaaagggacagatgtaaataaggctactaatcagttgaccttaaaataaaggttatcctggattatccatgtaggtccagtgcaatcacatgagcccttagaaacagaggcagaagtagtagttagggaagtgcagcatatgaagtgagagatccaaaggacaagaaggatgcaacacattgttacagcctttgaagattcaggggccatgggcagaggaaagcaggctgcctctagaaggtaagaataaccttcaatcaaagatcagcaaggaaacaagtaccn

SEQ ID NO: 12637 - DNA, 956 bp, Homo sapiens
  misc_feature 1, 2, 3, 4, 5, 6, 7, 8, 9, 10, 11, 12, 956: n = A,T,C or G
nnnnnnnnnnnnagttgaacctgtgaatacattttagacctcatcaatctatacagattgtcgaccaggctacaatttccactggtctgccaggaagaggacgtcacagcaggcctgcttaatattaactttggttccagcaattccttaaggttctcttcattctctttatcgcctgaattttcacaggcagacaccgaaagtggatgacatgttagcgcatttcctaagggtccagcttggcttcgctttactctgatacagttgcagatctggctgatttgcgagacaacaaaaacaaaatgttttttaaaaacgttccaaatctgcatctggaactcatggagtcaatattccgaaatcacacgaattatgtacatacatttgcatgcataccccttccccaaataatcctcagaaaaccggtaagcgtccaaactactctccggaggcttaggtaatcaacaatttaataaatacaattgctaatgtatggtgtacagatcctgtattgcccacccttctctattgctttgtccccgcgcgccctctgttttgcctaaatgggttccaggccatagccaccgactctcgctttgccttctggcctctcggcagtgcgcttcagcaccattgcgccaggtgacgctgctgagaacagctgagtggccggcactagtgcagctggaagccaaggcccagaattctcaggaatctgcactttacccaggcgaaaagcccaagggctctccccacagcttcccaacatccctctacagagtttttaaatattagacttattaacctgtagagatggagagaatcaaagaaatcacaaggtatctctgagggaaaaagaagagcaccagcagtaaatcacttaagagtattgaaccagcaagccagggataggagaatggaatggaaactgacaggatgactgcagaggatggggn

SEQ ID NO: 12638 - DNA, 465 bp, Homo sapiens
  misc_feature 465: n = A,T,C or G
acgcgggggtgtccaaagcactgaatacataaaacccgtgtgaatctcaactttcatttactttttactttcccctgctggtgcccaagaccaccgtggaaggaatggctaaaggataaggtggaggagacaagtgagttataatggggcttgttacccccagaagaattttcccaagtgaatggaatcattcttcaaaagaaaatgtgcgatttctgggataagatctggaacttccaagccaagcctgatgacctgctcattgcttcttaccccaaagcaggaaccacttggacacaggaaattgtagatctgatacaaaatgatggcgatattgagaaaagcaagcgcgcttccattcaacttcaacaccctttcctggagtggataagaatgacacactgtgggattgaccaggctaacacaatgccttttcccaaggacccagaaaactcatcttcctgn

SEQ ID NO: 12639 - DNA, 3997 bp, Homo sapiens
atagggagtcgacccacgcgtccgccgcttgcccgtcggtcgctagctcgctcggtgcgcgtcgtcccgctccatggcgctcttcgtgcggctgctggctctcgccctggctctggccctgggccccgccgcgaccctggcgggtcccgccaagtcgccctaccagctggtgctgcagcacagcaggctccggggccgccagcacggccccaacgtgtgtgctgtgcagaaggttattggcactaataggaagtacttcaccaactgcaagcagtggtaccaaaggaaaatctgtggcaaatcaacagtcatcagctacgagtgctgtcctggatatgaaaaggtccctggggagaagggctgtccagcagccctaccactctcaaacctttacgagaccctgggagtcgttggatccaccaccactcagctgtacacggaccgcacggagaagctgaggcctgagatggaggggcccggcagcttcaccatcttcgcccctagcaacgaggcctgggcctccttgccagctgtgagatgacctccgtctgcccgggggactcttatggggaactgccttacttccccgaggggtgggcatgatgaatgggagtctgcagtcatttcctactgtttcaggaagctttctccttaaccccttagaaaaggctgtggaacttgagctaaaatatgtcttaccaggttgcgtctaatgccccccgttccctactgggcagaaagacttgggtgcttcctgaggagggatccttggcagaagagaggcctgggctcacgagggctgagaacatgtttcccagagttgcaaggacccatctcttaaacacagagtctgcagcccctaactgacaccctgtccttcctcctaggaagtgctggactccctggtcagcaatgtcaacattgagctgctcaatgccctccgctaccatatggtgggcaggcgagtcctgactgatgagctgaaacacggcatgaccctcacctctatgtaccagaattccaacatccagatccaccactatcctaatgggattgtaactgtgaactgtgcccggctgctgaaagccgaccaccatgcaaccaacggggtggtgcacctcatcgataaggtcatctccaccatcaccaacaacatccagcagatcattgagatcgaggacacctttgagacccttcgggctgctgtggctgcatcagggctcaacacgatgcttgaaggtaacggccagtacacgcttttggccccgaccaatgaggccttcgagaagatccctagtgagactttgaaccgtatcctgggcgacccagaagccctgagagacctgctgaacaaccacatcttgaagtcagctatgtgtgctgaagccatcgttgcggggctgtctgtagagaccctggagggcacgacactggaggtgggctgcagcggggacatgctcactatcaacgggaaggcgatcatctccaataaagacatcctagccaccaacggggtgatccactacattgatgagctactcatcccagactcagccaagacactatttgaattggctgcagagtctgatgtgtccacagccattgaccttttcagacaagccggcctcggcaatcatctctctggaagtgagcggttgaccctcctggctcccctgaattctgtattcaaagatggaacccctccaattgatgcccatacaaggaatttgcttcggaaccacataattaaagaccagctggcctctaagtatctgtaccatggacagaccctggaaactctgggcggcaaaaaactgagagtttttgtttatcgtaatagcctctgcattgagaacagctgcatcgcggcccacgacaagagggggaggtacgggaccctgttcacgatggaccgggtgctgacccccccaatggggactgtcatggatgtcctgaagggagacaatcgctttagcatgctggtagctgccatccagtctgcaggactgacggagaccctcaaccgggaaggagtctacacagtctttgctcccacaaatgaagccttccgagccctgccaccaagagaacggagcagactcttgggagatgccaaggaacttgccaacatcctgaaataccacattggtgatgaaatcctggttagcggaggcatcggggccctggtgcggctaaagtctctccaaggtgacaagctggaagtcagcttaaaaaacaatgtggtgagtgtcaacaaggagcctgttgccgagcctgacatcatggccacaaatggcgtggtccatgtcatcaccaatgttctgcagcctccaggtaagtgtcgcatccccactgactctgcagccagtccttttcttcatgtggcagttggtggagagaagaaaaactgttctaaacaatgatgagaataacatgtaattgtgatagttaaactgtgcctatgtgactgattgcagagtgaattgggagctgttggttttgaatgcaccacactaaggaatgtgaggacacattgtctctttgcggaggtgccgcaggttatattagctcccctcggacacagaccagttgactgtattcgcgtggatactgtccgcgcgattcccagcactcgctctttacagcatctcacgcatcagtgtatgttcgctgcctccagagcagttgaacctcagtcctgcctctcctcatggtgtgcattcacctttcttggcgctctctccccatgggccaagttctaccatgagttatgaaacattatggagaaaacatgtctttggaaatgtgagccagaaagcccaccagtgcccctcagtcacggttgttatgaatgacatgctaatggtttcactctggtcaaacctgccttttctttcctcttcagccaacagacctcaggaaagaggggatgaacttgcagactctgcgcttgagatcttcaaacaagcatcagcgttttccagggcttcccagaggtctgtgcgactagcccctgtctatcaaaagttattagagaggatgaagcattagcttgaagcactacaggaggaatgcaccacggcagctctccgccaatttctctcagatttccacagagactgtttgaatgttttcaaaaccaagtatcacactttaatgtacatgggccgcaccataatgagatgtgagccttgtgcatgtgggggaggagggagagagatgtactttttaaatcatgttccccctaaacatggctgttaacccactgcatgcagaaacttggatgtcactgcctgacattcacttccagagaggacctatcccaaatgtggaattgactgcctatgccaagtccctggaaaaggagcttcagtattgtggggctcataaaacatgaatcaagcaatccagcctcatgggaagtcctggcacagtttttgtaaagcccttgcacagctggagaaatggcatcattataagctatgagttgaaatgttctgtcaaatgtgtctcacatctacacgtggcttggaggcttttatggggccctgtccaggtagaaaagaaatggtatgtagagcttagatgtccctattgtgacagagccatggtgtgtttgtaataataaaaccaaagaaacataaaaaaaaaaaaaaaaaaaaaaaaaaaagaaaaagaaaaaaaacaagacaacaacaaacaaaaaaaaaacaaaaaaagacgaggggggcggcggcgccccgccgacccccccgcgcgaggcccccaacgctcacgcagcccaccggcatgctgcttgccgacctcacgaacaggtgcgccccgcccaactcaggcggcgcgcgccgcatctatattacacgcacgccgtacgtgcgcggtcctcgcgtcctctccctcacgcccctgcgtcgtggtgggctcacctccgccgtccttcttcgcgccgcgcttccgttgcgccccccccccccctccctcccgcgggagcacgctc

SEQ ID NO: 12640 - DNA, 541 bp, Homo sapiens
  misc_feature 1, 2, 3, 4: n = A,T,C or G
nnnngtctgttgagtccgcgctgtatgtgggcgccatcttggaccaaggggacacctccgggtttaacctggtgttgaggaactgctatgccacccccactgaagacaaggctgaccttgtgaagtatttcatcatcagaaacagctgctcaaatcaacgtgattccaccatccacgtggaggagaatgggcagtcctcggaaagccggttctcagttcagatgttcatgtttgctggacattatgacctagttttcctgcattgtgagattcatctctgtgattctcttaatgaacagtgccagccttcttgctcaagaagtcaagtccgcagtgaagtacctgcccgggcggccgaggtacatttcctgagtaggtgatcctggctgtctctcccggagacactgacactgaggatggctgtgtcagctcataggaggccacagagactgtgcagagaatgaggagggggagcaggagagggatccaggccatggtgagacattcagagctctgcctcctgagcctacagcccccgcgt

SEQ ID NO: 12641 - DNA, 139 bp, Homo sapiens
aggtacaatgtttgctgctagggacactgagccaaggaagatgtagcctctacccttgaagaactaacataaatggtaaacaggtaagttgtcatgccttgtaggacatgctgtaactcagtctggggtacctgcccgg

SEQ ID NO: 12642 - DNA, 643 bp, Homo sapiens
  misc_feature 642, 643: n = A,T,C or G
ccggtttcacagaagagagaatgaaagtaatcatggatggaggtaccccaaacaagttttcctattttatttttatgcttacagatactcaaatattaacaatttaattaatcaccagctattaaaatcatgaaaacatcatgaacacacactaccggtgtggatctccacagtgctgagtttttagatgacattccctacaccccttcctctatgaagagtttcacaaaagacgtctttagaaggtaaatctagcctatgaaatattttaagcaaaagacagaaagaagtctcaaatgtatgtggtgtatgtggggtgtgtgtgtgtgtgagagagagagagaaagagagagggaaagaaagacacagagacagagacagacagacactacagtcatgtcatttttacccgagcataacccaggcatcctggtgggtacagttggatttacacactcctcaaagacatgctgaacatgcaaataatgggtattcaagagtttcaaaatgagctaacattgcaacccaaactcagcctccaaaataagccattttttaaaaaatcactaaaaacttatgaaagatatttccatgtacaaactctcattggctgttgtttcaacagtgtaaccttaattacann

SEQ ID NO: 12643 - DNA, 1530 bp, Homo sapiens
  misc_feature 1, 10, 1525, 1526, 1527, 1528, 1529, 1530: n = A,T,C or G
nctggggcgnagagactcagcccctgcccctcagcggataacctgggactgaccgttccctggggatccgacgggccccagaggacccacgcctgagccccgtgcgactcgtggcctttgggctagaagccatggacgccttcacccgcttcaccaaccagacccagggccgggaccgactcttcagagccactcagtacacatgcatgttgcttagatatttgttagagcccaaagctggcaaagagaaggtggtaatgaagctcaagaaactggagtccagtgtgagcactggtcgtaaatggttcagactaggcaatgtggtacatgctatacaggcaactgagcagagcattcatgccactgacctggtacctcgcttatgcttaacattagccaacctgaaccgtgtgatttatttcatctgtgacaccatcctctgggtgaggagcgtaggtctcacctctggcatcaacaaagagaaatggcgaacgagggctgctcaccactactactattctcttctgctgagccttgtcagggatctgtatgaaatctccctgcagatgaaacgagttacatgtgacagggcaaagaaagagaaatcagcatcccaggatcctctttggttcagcgtggctgaggaggaaacagaatggctccaatcctttctacttcttttattccgatctctgaagcagcatcctcccttgctcctggacacagtgaagaacctttgtgatatcctgaaccctttggaccagctggggatctataaatccaatcctggcatcattggacttggaggtcttgtgtcctctatagcaggcatgatcactgtggcatatcctcagatgaagctgaagacccgttagggtgtttttaggcttggaactagtacctactttaaaagatggcctcttggtgggacagacatttgtataagtcacaggccatgtcatactgtgcttaagttcttgttcatgtgagcatttaacaacctgtgatgtgggcagagatgaggccaagaacggagaagggaggagcatgaagagttgtatgtttttggagtgctggagtgacttgtgaatttctgaatattttcccttcatctaacattgattgaacatctcttatgtgcatagtgggagcttagtatttgctgaatgaataaaaattgaaaggaaaaaatttaaaaagacccaatcgcactgatcattgaacaccagtatacaataactttagggtcatatggatcattggtttcacgattacagtaggtctggtgcatggcactctcagatctagtagaggctctgatgtcagtagcaggatggaggagagctgggcttacagcctctcaacttgttggcccttataccatcactgcactcatgtccttgctctgtgcagaagtagaatcagaaaagcatcaggcaccttcatggtataaattgtgtctatgggtgcagtgaataagcaaaaatcagaagcagaccggagggacttataaaaataggagccnnnnnn

SEQ ID NO: 12644 - DNA, 580 bp, Homo sapiens
acgcggggagacacacaccagcccagccagaagcaagtcccagcccccagccctcccctggcctaccttttggggcccttctctgaaccaggctcccctgtcctgcaactctgtcattcacagggatgatccaggctctggctggattctttacctactttgtaatcctggctgagaatggttttaggcctgttgatctgctgggcatccgcctccactgggaagataaatacttgaatgacctggaggacagctacggacagcagtggacctatgagcaacgaaaagttgtggagttcacatgccaaacggccttttttgtcaccatcgtggttgtgcagtgggcggatctcatcatctccaagactcgccgcaactcacttttccagcagggcatgaggtgaacatctcacaaaacagccccagcactctcccaagccccacacaccaggacatgccatttccccctgccttttcttctccctccccgccacacccatgaatgtttcttcccagaaacaaagtcttaatatttgggatcctggaggagacactcttggctgcatttctgtcctacact

SEQ ID NO: 12645 - DNA, 468 bp, Homo sapiens
  misc_feature 1: n = A,T,C or G
nagcgatactaaaatgtctgatgatgctggtgacacccttagccactggagacaaagcagaagttactgagatgcctaatagtgattctttacctgaggatgcagaagtgcattgtgattcagctgcagtttcacatgagccaacaccagctgaccccagaggggaggggcatgaaaatgcagctgtgcagggtgcaggggctgccgccattgggccccctgtgcagcctcaggatgccaacgccctggagccccctctcaatggagacgtgactgaggatacacttgctgaatgtattgattccgtcagccttgaggcagaacccagatccgaaatacccctgcaagaacagaattatctggtaagaatgggtcattcaattcacttcggcctaagttcttgcttatatctaccgtgtgcagagctagcaccaagctctgtgggtgggaattgggagttcaaaatgt

SEQ ID NO: 12646 - DNA, 579 bp, Homo sapiens
  misc_feature 1, 2: n = A,T,C or G
nnccgcccacgcgtccgggctggggactctggtggtgacttatgtagatgccatcaacagtggagcagtaccttgtctggagaatgcagtgacagcactggcccagcttgagaacccagcggctgtgcagagggcagccgaccactatagccagcagatggcccagcaactgaggctccccacagacacgctccaggagctgctggacgtgcatgcagcctgtgagagggaagccattgcagtcttcatggagcactccttcaaggatgaaaaccatgaattccagaagaagcttgtggtacttttagcatttatccttcctgatttctgcccttccgaaatgatgcataaagtgtagctttttgaccccatggttcatctccttaccactgtggaaagaccatggtttcttgtgaataacagggctctatgggctataggtcacccttcttctagaggattgtcactctttttttctattgctgcaaaagaaattatcatgagtttagcagcttaaaacaacacacgttattagctcatagttatgtaggtcagaagtccttatcagggtgtctgggt

SEQ ID NO: 12647 - DNA, 510 bp, Homo sapiens
  misc_feature 510: n = A,T,C or G
cctctcacccttggggatctcaaccatttccatggttttacttactatctatatattaatagttatatattaaacttgtatctcttacccagatctcatttctgtctgttcaattacctactcagcctcttggtttgactacctaatggcaaacaatctccccttcaccccagtcttctttattcagtaaatggagccaatgtttttggctcaggctaaccccagaagtaggacacatcttgcattcttgcctttccctcacacacaatatccaatccaatggtagattctttcaggatcgagcggccgcccgggcaggtacctggctggggaggccaggctgacggtggtgccagtgtctgaggaggaggtgagggaggccctggtgcgtagtggctacaaggtccgggacctccgcacctatatcatgcctgcccaccttcaaacaggcgtagatgatgtcaagggcgtcttcttcgcctgggctcaaaaagttgggctgtgagggcn

SEQ ID NO: 12648 - DNA, 771 bp, Homo sapiens
atagagaagatagggaaattagaagataaaaacatacttttagaagaaaaaagataaatttaaacctgaaaagtaggaagcagaagaaaaaagacaagctaggaaacaaaaagctaagggcaaaatgtacaaactcgcattcatggcttggtttcccagaagatctccatttaacttttttaaagaaagtttattgctttctttaacctgcattttttctaagttttttttcacataaaggtgctgtctttgtggcaaggcctaggcatgacaatcggaggactcgagggggatggaggactagtgatcggctggctgcttccagtcgattagagaggtgaaaaagctgaacgtgtgccagtaatcttcaaaaggcagaacatatcacctctgccccgtaaactgttctctccgagggaaaaaatggaagttatcctcacagttcactgccgtggtatttcttctgtcccatgctttgcatgactgccatggtgctttttttataaagtaagtttcagcagactggtgcaactttatggaaatacatcataatttctggaaatacatcataatttcataatacatcataagtcagactggtcctcgtcaacgcagtgtatttcaagggtctgtggaaatcacggttccaacccgagaacacaaagaaacgcactttcgtggcagccgacgggaaatcctatcaagtgccaatgctggcccagctctccgtgttccggtgtgggtcgacaagtgcccccaatgatttatggt

SEQ ID NO: 12649 - DNA, 2112 bp, Homo sapiens
  misc_feature 1, 2: n = A,T,C or G
nnctacaatcaaccaacaagtcattattaccctcactgtcaacccaacacaggcatgctcataaggaaaggttaaaaaaagtaaaaggaactcggcaaatcttaccccgcctgtttaccaaaaacatcacctctagcatcaccagtattagaggcaccgcctgcccagctcacacgcggtggcggccgaggtaccgctttgtaggggaaggaggagtaaggatgtcggagacctgtgtccaggtgcaccgatgccagacagacgctcccatgtggctgaatgggacccaccctgcccttggggatggcatcaccaaccacactgcctgtgcccattggagtggcaactgctgtttctggaaaacagaggtgctggtgaaggcctgcccaggcgggtacctgcccgggcggccggctgttatgctcatcatggcacttaagagatgcttaacaaacctttcctacaatgttcctcagattttcagagcttatttgatctagcatctggttcctaaattctgagtcacatcagaagccaaacttgaatgcttttggaagaagctagcctcataccacttcagttggaaaggggagtactgaggtgtaccttggcagaacagtggaatgattgctccggtttcttctagtttgctctatcaccaagaactgctataacatgtttctaaaccagggctatgcaaagcactagagttcctgaccagcaatgcaaaccagtggcatacaaattcaaaatactgtatccaggccctgactccagcccaaaccaaggctggagggcatccagggggatgtggttccccacggggtagcatcttggttatgtgagatcaccaagacaccaagcctgttttatgagctgaatcctcagcttgttgctggatttgtggctgataaaaaatacaggcagggcccagtggctcacgcctgcaatcccaacaccctgggatcacaggctcgagccactgcgcccggccctttttttttttttttttttttttaaattattgagacggagccttgcgctgtcaccgaggctggagtgcactggcactgtcttggctcactgcaacctccgcctcccgggttcaagcgattctcctgcctcagcctcccaagtagctgggattacaggcatgtgccaccatgcccagctaatttttgtatttttagtagaggtgaggtttcagcatgttggccaggctggtcctgaactcctgaccttgtcatcctcccaccttggcctcccaaagtgctgggattacaggcgtgagccaccacggccggctgttatgctcatcatggcacttaagagatgcttaacaaacctttcctacaatgttcctcagattttcagagcttatttgatctagcatctggttcctaaattctgagtcacatcagaagccaaacttgaatgcttttggaaagagctagcctcataccacttcagttgggaaggggagtactgaggtgtaccttggcaggacagtggaatgattgctggttcttctagtttgctctataccaagaactgctataacatgtttctaaaccagggctatgcaaagcactagagttcctgaccagcaatgcaaaccagtggcatacaaattcaaaatactgtatccaggccctgactccagcccaaaccaaggctggagggcatccagggggatgtggttccccacggggtagcatcttggttatgtgagatcaccaagacaccaaacctgttttatgagctgaatcctcagcttgttgctggatttgtggctgataaaaaatacaggcagggcccagtggctcacgcctgcaatcccaacaccttgggaggctgaggcaggcagaccacccgaggccgggagtttgaaaccagcctggccaacatggtgaaatcctgtatgtacttaaaaatacaaaaattacccaggcatattggtgagtgcctgtcatcccagccactcggaaggctgaagcaggagaaccgcctgaatctaggaggccgcaggctgcagcgagccgagacagtgccagtgcactgcagcctcggtgacagcgcaaggctccgtctcaataattaaaaaaaaaaacg

SEQ ID NO: 12650 - DNA, 647 bp, Homo sapiens
  misc_feature 1, 647: n = A,T,C or G
nctttttttttttttttttcttactgcttgcttggcaatgcagctctagcttctaatgccctttttttaaccctttaggtatctgatcgctttgccaattttgcgttactgggcaggctaagagatcttcttttaattcagcctgcttaagacgggaactgataactgtagtgtatcctctgccttttttcttatctattggaggaagctcagatggtgtcacaagaaggatctgaagtggagcttctagtatccccaggagcgcgaagtgaacacggaaggtacctgcaggatccaattgtgtccattgatctctcagagtggctgaggataatagagtttcttcttcaaggtctcaaggtgtatggctctgtgtatcacatcaatcacgggaaccccttcaacatggaggtgctggtggattcctggcctgaatatcagatggttattatccggcctcaaaagcaggagatgactgatgacatggattcatacacaaacgtatatcgtatgttctccaaagagcctcaaaaatcagaagaagttttgaaaaattgtgagatcgtaaactggaaacagagactccaaatccaaggtcttcaagaaagtttaggtgaggggataagagtggctacattttcaaagtn

SEQ ID NO: 12651 - DNA, 614 bp, Homo sapiens
acagcaaaggaccagcaatatgtcctatgaagaggatttctatttccactaggcggcgctgttggcttagaaataccttgggctcgccagaggattactagccggtaatctcactgttggaggtggaaaaggggagaactctgttcctagaaggttgcaatggcattttcctgagctatatcccaggtctacagcatttcctgatcttgcctaacaggattacttctctaggctgtaaaaattcccacacattcaacacacagaaagtaagagatcgcagacagagaaaccaggaaagaaggaaggttttgcaacaggatagccggcagacagccttgagattaaaggacagatctgagattcatttggagtttaattgcttcgctccgatgaatgaattcctggccaatgcaccaaaatgatacggctccgatgactggaggaacaccagggtccttggtctcgcaccagtttagataaaatgacacagacacacatgtaatggttttaaggagtggagagtttattaggcaagaaggaaggaagaagaaaacagctcccccatacagagacagagggaggggggattagaacaaacagaaacttccccgcgt

SEQ ID NO: 12652 - DNA, 2765 bp, Homo sapiens
  misc_feature 1, 2, 3, 4, 5, 6, 7, 8, 2760, 2761, 2762, 2763, 2764, 2765: n = A,T,C or G
nnnnnnnncgtccttccatatcacgcccctgcactccagcctgggtgacagagccagactccgtctcaaaggaaaaaaaaaaaaaaaaaaaaagaatgccatgccaggagaagacagctggtttcaaatccctgcccccaggcaagtaaaaccctgacttgctcaagacagaagatcttttctcctgtttttcaaaataaacatatatagggatggaccctgtgcattgtggcctgccttggtgtcctagaattggagccagtctttagcttaatgtctgaagtatttatacggccaatatgtgttttcttatgtcagaccaaactgtctttttgaatatcagttcatttcctctcaccgagtgcttttcggtgagaggcaaagagaaagaatgaacaatcaagtattgacagactggcattagcaggacagagccatactagtgacaagggcatcccaaggcacttgcccagagctgcagagttgtgtgtgccatacctgcggctcaaagggaaggccttctatcccctgagtttctatcagctgaaaatggcaactgctgtctcagtaaaagctctgtcttgactgcagaggctccaaaagcattcacagttgagggggagaaagacagaaagaagaagccaaagataacctgatccctgcctgtctgttggcacctgtcatcctctggcttctgctcccaaaagcaagtctggatgactgagttttgtggacatgggcactcccggagacagcagtggccaccatggcacccagagttttgcccaagtactgaatgttttgtgagcaaccatgttccccaagtaggtagccagcgctgcagaaaccaaacagcctcttagctacctgactttaaaaggaatgacctaggtgttctgccaaaggagttatctatcatctctggcaaacttgacaatcatcacttacctcgacaaccctgccccacatcactttataaagtcagcaggatgtcctctcacccaccctgtgctggtgtctaacaaatttatcttgtcatgctcaaatgtgtttggcagccacaccgatcggctgggtgctgaaccgcctctctgtaattgtagcatcaaaatgacaacagcagcagagcagcgaatcttgcacagccccacagcatgcctgagacaagactccaacaagtaataattagctttttttctcctgccgcctacagtacctgtctaactaaagagcttcccaaagtggagggaaaggccatagaatccaggtgtcattcagagccagtccttgctgaaatgtggtcttccagtggaagcacctgtattattgagaggaaaaagtgttggatgcaaagtaacaccaggactagagagaaagagaaaggtgaaccatcctaaggagctttggatacttttttagaaggataaatattatgcttactgaggagaaaaaaaaaagcgatcacagaaaaatttcacagctaatatttttacaaaagttgtgccagacattacagagtgaaaacgtctctcaaggtggaatgctttagagagcaaaggcttagcatagacctagacccttgtgtgggtatgacatgacatgacatgtccatgtcaaaattcactttagtcagaaccagagtattgataaacaaaatgtcagttacctggagcagtcctggagaggttaagacattctatactgttctacgtcaaccatttctacaaagttgtccagacacctaaaagcagctttcttggttatccagatgccagaatcaaccttgtatctgacaatgcacatctgttgattctaaagtatatttatgtgtgtgtgtatgtgtgtgtatacagcacatatttacatctatgaagacatagacacttacagagacccacatgagctggcactttctgagcctttacagcctttaagactcggaggttgagaattagagacacaagagaggctgtggatggcctattaaaatgattaaagatgtaaattcagtgccattttaaaactgttcatatttatcaaacaattactgtctacagctacattttttgttaacttacttaaagtcatgtcgcaagaaagatcaaacccatgaatgcttagtagctaaggctagtgttcaaaagcactctaaaagacattttgtccacattttggaaaagaaaatatttgcatgtttaattcataatttaggctatctttgagtatactgtaaagtgctgtgtgatataatatcaataaagtacttattaaatggcactttaatgttttcttttaaaataacgcactgttctaaacttcagtattgactattgactcgtgcatagaatccaatgctgtaattagaaagtaatctgtgactagaatagacctttgtccctgttagtagccctgttgccatgttcaggcttttaaaaaatgcttttgtgtcaccaaatatatctataaagaaaacaaaatttctgttcagaggcctctgaaacttggctttcttacatgtggttggtttatgtgacaatccctatgaaatgagtggacgtatgatttttgaattaaatgacttttccatttggtggtattaaaaaagggggggccgttaaactattttaaaaaaaaacccccccccccctcccctggacccgaaaaaaaaaaagaaagccattggtggtggtaacctggtttttggcgctttataggggtcccaaaaaagccataaccttcccaatttccacaaaaaaaccnnnnnn

SEQ ID NO: 12653 - DNA, 1109 bp, Homo sapiens
  misc_feature 1092, 1093, 1094, 1095, 1096, 1097, 1098, 1099, 1100, 1101,1102, 1103, 1104, 1105, 1106, 1107, 1108, 1109: n = A,T,C or G
accagcaaggaatagcctccttataaataccttcacctatagtgtgaattgcttagggaagctcagggcacagagaagggctggctgcacatttttgcattgagcatagtgtctgacaccctgtgcattgccctggctgagcgaggaggctccatttgtttatttttcaagcatagatgctattttctcaggactgtagagtaaaaacattagaaatttctagctgcctgccacttagagcttgctggcttctagcccttctgctgaaagtcaaatttaagataggggatcatagaaaatgaagaaaagacatacaagtcattagggagaaaagaggagctggtgttctcttgcagctctggaatcagtatcagataattgtgccctgactgcgcagtcctggccagagatacaaaaaaaaaaaaaaaaagaatttttactggagtaaatgaggagtagggagtgaggtaccagaaaagtcttgggttagcccagatgagtggtatatttttaatagggagaggattcatgagctgattcagacgtgtggccccttccagtgtctgtgagaggccatttcataagcaggtctgtgtttttttccaccaagttttgcttaagatttggaaagaacactctacctccttagttaattatgtgcataaatatttgcttctccaggaaggacgttttcccacgttattttaaaggactcacatagatttaaagggtttcttttctcccacccctaaggaattcagtgttggtaaatggtgcccatctcaggaacagagaagcttctgattagttaggagtccagctgtggatataggagcagagatgggaggaagaacagtcctgtacttcagcagggttccgggagcctaccatacctcagagataccatgggttcagttccagaccaccacactatagtgagtcacatgaactcttttggtttcctaggatatataaaagtgatcaggaggctgaggcacgagaatggcatgaacccaggaggcacagcttgcagtgagcccagatagtgccactgtactccagcctgggggacagagagagactttgtctcannnnnnnnnnnnnnnnnn

SEQ ID NO: 12654 - DNA, 1596 bp, Homo sapiens
  misc_feature 1368: n = A,T,C or G
ctccttgtgggcgccgcgaattcccccttttaacaaaaaccggggtccgtgaaacacgtaggccccggggcccttaaacccctctttctccccccccgcaatataccccccggagtgttttttttgtgaattagtgattttttttttttttgcagcttcaagaacgagtgatttaagaacagccctcccatcttagcaatgtcccggggtggctggagccacggtcacttcttggtcctggtccagaactgtcggtagcgctccacatgcaagtcatcactgagctcctgctcgtactccttcctcgactggagctgagcctcacgcttccgcagcctggcccggcgctcctcaggagacagggtgtccagatctatgggcatcgccagcatgcgccgtggctccctgtagcggatgtggatggtggagccatcctgcttcaccagcagcacggggtagagtcgtgcataagcctggcggtgcacacgagtgagtgaggccctgctgctgtcagctcgccaggaggatgtgtgcaggcggcggagtgcaggtccggtggccttcacggtgctctgcctcagccggccaagcaggctgcccacggccgccattcctccttacagccccagtggcacgtggaggtggtcagtacaggccctggcgtgcaaccagcaacctctcccagcaacccttggacttctcagaaccgcctgtagaggtttttccaaaagcagaagttggtcactactcccaaagattctgagtcagcctgcggcagggcccaggctgtctgttctggccgttaccgagtctgcgaaacctctctgaatggactgcagcctcaaaagtggagctgaggtcatgccttgctttctaaggtcattgctagttttaataaaaactcagtgaagtgaggattgtcatgcttgcttaaaggagaatggaggcccagggctgctttgctgtgacctggattcccatgggagtctgtgctgaggtgtgcgaagtaaaagcccagttttcaatactcagattccaggagatgaggctgcacagaggccgagcgcccagcttcctctggcgtacccctgtctctcaccaaggaagggacctgaagacaggtccggctgcctctaaaatggaaatcctgctacgtgtcctatgcccacatccctctccctcggcctcaccagcacaggagcctggggctggtccaacaggagggtcttcggggaaagctccctctcctttcctgctagactgcggccgccacagtcgctgcggaggggtctgaggacaggcggtcctgactcccgctgcccggtggaactaagaccagggacgaggccacgcaggagatcaaggtancctcgtgccgagggtacgcgggtggtgacaagattcgattcttctttgagaaaggcgtttttgatgagaaaggaaatttcctggtccctccggagaaatccatcaacaaaattggccacgctctgcacgcccacgaccccgtcttcaagagcatcacacactccttcaaggtgcagaccttggccagaagtctgggcctccagatgcccgtggtggtgcagagcatgt

SEQ ID NO: 12655 - DNA, 878 bp, Homo sapiens
  misc_feature 1, 2, 3, 850, 851, 852, 853, 854, 855, 856, 857, 858, 859,860, 861, 862, 863, 864, 865, 866, 867, 868, 869, 870, 871,872, 873, 874, 875, 876, 877, 878: n = A,T,C or G
nnnaaatgagcacctggagtctagaattaactaaaaaatatctatgttgatgcatattaagttgattttgaagtcataaattttgacaagaattgatactatggcactgtcataactttacaaaagatgacctgaactaacatgattttatgcttttaccagtggaactccctgaaatatattcagataatttgttattaaagcaaaactaagtttattgaaaccctgtgccaagaaagtacaccattttgacatacttttgcagtgtttcagcagggaagagtgagaggaagatttttcatgtttgtggagaatggcttaagagagttaaatgagtctttcaaagtgagtagctgattgaaattgagctaaactcagagcataatagtttagatagtctaagaaattgaaaaaaaagttgatgccaagcatacaagaaataacaccaccaaaaaatagacctaaatacagacaaaattagattaaaaacaagaatatgttcaatgttaataaaagcaaaaggaacatagacatagttatggaggagttttgttttgttttaataagataaaaataatggttagttttatagcaatacacctggaaatctggatcaattctgtccactatagtcattactagtgacatgtagatattgaacacttgaaatatggtggatttgaattgatttatgctatatgtaaaatacaaactagatttagtttaaaaaatgtaaaactgaataattttaaatattgttttatggctgagatgacaatattttggatatactggattaaatacatataaaatattgttaaaaatcaagtagtatagtaaaattggtctnnnnnnnnnnnnnnnnnnnnnnnnnnnnn

SEQ ID NO: 12656 - DNA, 1161 bp, Homo sapiens
  misc_feature 1, 2, 3, 4, 5, 6, 7, 8, 9, 10, 11, 12, 13, 14, 880, 1160,1161: n = A,T,C or G
nnnnnnnnnnnnnncgaggttcgggctggttgttccgttgcgagctgcagctgcgatctctgtggtaggcccagcctggtggccaaaaacgggatagtccaaatttgtctcctacgggaatattagagttctcacttttttcttgggctggagctgaggccggcttgcattccagtggcaatcggcgtgagttatctgctgtagtatgcccagaagtgtatgctgacttgtaaaggtgaagaagccagtggtgctgcgggtgttctttggggtagtgtctgggatccagtacgagttgaatcattgttcaaataaggtgtaattgaaaagtgatcctctcttcagagatgtcaaaaacaaacaaatccaagtctggatctcgctcttctcgctcaagatctgcatcaagatctcgttctcgttcattttcgaagtctcggtcccgaagccgatctctctctcgttcaaggaagcgcaggctgagttctaggtctcgttccagatcatattctccagctcataacagagaaagaaaccacccaagagtatatcagaatcgggatttccgaggtcacaacagaggctatagaaggccctattatttccgtgggcgtaacagaggcttttatccatggggccaatataaccgaggaggctatggaaactaccgctcaaattggcagaattaccggcaagcatacagtcctcgtcgaggccgttcaagatcccggtccccaaagagaaggtccccttcaccaagatccaggagccatttctagaaactctgataagtcgtcttctgaccggtcaagggctcctcatcctcccgttcttcctccaaccataggcagagttggatcttctaagccgcaagttctgnagaggaggaacaagtctcttctagggttagcgggcatctccaggttgccgggtaaccccgggttgggccagggggcgacaattctttgggggcgcctttgagtatcaagggtttttggagcctcgacgccttggcgtggcgcccttgggtgggtctgctgtcggcccagggtttcggatggccgggggagcctttaaggcccccttggtgtggggggccccgcacttgtggattctctctccgccgaggacactgggggtgagcgaggcacaggtctggnn

SEQ ID NO: 12657 - DNA, 1273 bp, Homo sapiens
  misc_feature 1, 2, 3, 4, 5, 6, 7, 8, 1271, 1272, 1273: n = A,T,C or G
nnnnnnnnatgcattggacttcctgtgcctgcccccaggggcaagactgatccccacctgcctgtgcttcttggaagagcctagaagattcctggatggagaccccattggttcagcctcaagtctggcccgtcttcgaaaaaacaaacacatttgtaagctttgtgggagcttccaggcctgctctaagatgccttgcttgtcctttgacccatcagcatggagctcagtggttgctgtttggttctgcaggctggtggggaggccgcccatcgtggtggggcatctgtccagccccattgccactcagggcatccaaacaggaggcacccgctgggaagggtctaaagatactccttgtggccactgctactgttcacacttgacttgtggagaagcgaagggctgaggggaggtttgtgtacacccatgtatttaaaagtgactgactgactgaaatgagcacataccgacatatgcaacatactaataccttcctgattttcgagactttctaattactacaactaacctgttgtgctcacctctggaattcagaaagagagccactgcgagcactgaccacaagggctgccttaggaaggaaatgtgtgctttcaggagttcttattaggggaattttaagagcacaaaaattttattgaacccaccttagtgacaaacagaaaatgatttgttagattgtcagttggaaggggtttattatgactgctggtgaaataaacagtgaccagtttctgccaacatttatggaaataacgtttctaggttttaaatgtgagccgtaaactgaagctacttcagttaaaaaaaaaaaaaaatcaatacttaaactgtagggaaaaggtggattggtgccagagaaaacattatttaatagtgtcagaacatggaactgcaacacagtttgtagcaaggcactgagaaaaacccacaactaatccttcatcgcagctgtctgaactcttgatcatctgccatcccccaaacaggaactcttttttccggtgactcccaggctgaatgacctagtgtggagagttaaactatgtccggggggacaggaacacagggaggaccttaagtaagcttcacccgggttaggattggccttccgggctggcccaaggcaaaaggacccaggcggcctgaaatcctgaaaagaacagaaagcggttgctgaagaccgtacccaaaagacagagagagtaacaagggccgaggcgcggaaacaattgccaccccaaggnnn

SEQ ID NO: 12658 - DNA, 986 bp, Homo sapiens
gataggctcagcagcatttattttctagttttaagaaaatttgattattcttgtatgaggtctaaagtgtgtatctatcagtccaatcaagcttttaaattttcggaaatactaaatttctaaatcataaagcgtcatttaaaaataattaattgtttcagtccaaaaatagcgtgggtcaaactggaattttcaaagtgacgtatctgtggatgatatgcttatggtaccaaaaagactctcaaaaaccaatactcccacgggcaagggaatagccaagtttgttgcggtttccaatgaatgacatcagccctgtgtaggtctcaatcaaaatgggttcagttaacaccatcagtttctttcctcttccagatccagttgaattcttgtgggcattctggatagctggaacaagcttagacatgaacccagacaacttgcaaatttcaaggaatttctcactggtgtatttcataggatgctcagtgaaagtagcataaggaacttcagtggaccatgggttccagcgggacagaagagactgctcctccggactcccccagtagatcctaaggccttctccttgtctcttgtccagggacatcccagggaaggtgaacttgcccaggcagatgcgatagacagcgctcagaggaatccgctgcagctgcacacaactcagcatgatgaagtcgtatttgcagatcaagagagtcttgtctgtgaccagtagaattctctccttctcattgttccagtggtctatctttgtcaagagccagaagccttgaatggtctctccagaagtctcagctacgtgacctttcaagtcttccatggcagtctcaatggcccccggccgcccgggcaggtacgactcgctgctggcactgccgcaggacctgcaggcggcccgcgccctcgtcatcatcagcatcatcgtggttgctctgggcgtgctgctgtccgtggtggggggcaagtgt

SEQ ID NO: 12659 - DNA, 4339 bp, Homo sapiens
  misc_feature 4331, 4332, 4333, 4334, 4335, 4336, 4337, 4338, 4339: n = A,T,C or G
ctatagggagtcgacccacgcgtccggtgcaagtgtcatcctggttatgctggaaaaacctgtaatcaagacgagcacatcccagctcctcttgaccaaggcagtgaacagcctcttttccaacccctggatcaccaagccacaagtttgccttcaagggatctaaatgagtgtggcctgaagccccggccctgtaagcacaggtgcatgaacacttacggcagctacaagtgctactgtctcaacggatatatgctcatgccggatggttcctgctcaagtgccctgacctgctccatggcaaactgtcagtatggctgtgatgttgttaaaggacaaatacggtgccagtgcccatcccctggcctgcacctggctcctgatgggaggacctgtgtagatgttgatgaatgtgctacaggaagagcctcctgccctagatttaggcaatgtgtcaacacttttgggagctacatctgcaagtgtcataaaggcttcgatctcatgcatattggaggcaaatatcaatgtcatgacatagacgaatgctcacttggtcagtatcagtgcagcagctttgctcgatgttataacgtacgtgggtcctacaagtgcaaatgtaaagaaggataccagggtgatggactgacttgtgtgtatatcccaaaagttatgattgaaccttcaggtccaattcatgtaccaaagggaaatggtaccattttaaagggtgacacaggaaataataattggattcctgatgttggaagtacttggtggcctccgaagacaccatatattcctcctatcattaccaacaggcctacttctaagccaacaacaagacctacaccaaagccaacaccaattcctactccaccaccaccaccacccctgccaacagagctcagaacacctctaccacctacaaccccagaaaggccaaccaccggactgacaactatagcaccagctgccagtacacctccaggagggattacagttgacaacagggtacagacagaccctcagaaacccagaggagatgtgttcattccacggcaaccttcaaatgacttgtttgaaatatttgaaatagaaagaggagtcagtgcagacgatgaagcaaaggatgatccaggtgttctggtacacagttgtaattttgaccatggactttgtggatggatcagggagaaagacaatgacttgcactgggaaccaatcagggacccagcaggtggacaatatctgacagtgtcggcagccaaagccccagggggaaaagctgcacgcttggtgctacctctcggccgcctcatgcattcaggggacctgtgcctgtcattcaggcacaaggtgacggggctgcactctggcacactccaggtgtttgtgagaaaacacggtgcccacggagcagccctgtggggaagaaatggtggccatggctggaggcaaacacagatcaccttgcgaggggctgacatcaagagcgtcgtcttcaaaggtgaaaaaaggcgtggtcacactggggagattggattagatgatgtgagcttgaaaaaaggccactgctctgaagaacgctaacaactccagaactaacaatgaactcctatgttgctctatcctctttttccaattctcatcttctctcctcttctcccttttatcaggcctaggagaagagtgggtcagtgggtcagaaggaagtctatttggtgacccaggtttttctggcctgcttttgtgcaatcccaatgaacagtgataccctccttgaaatacaggggcatcgcagacacatcaaagccatctgtgggtgttgccttccatcctgtgtctctttcaggaaggcattcagcatgcgtgagccataccatcctccatcctgattacaaggtgctccttgtagcaaattatgagagtgagttacgggagcagtttttaaaagaaatctttgcagatggctatgatgttatgtgttcggtgttgtaccatgagtagtattgacttcccttgagatatgatgtacaatgtgcttgtgaaattgacttaccctcttcacttaagttagttctggcctgacctgaactctgacttttactgccattcactttataaaataagggtgtgtaacatatcaagatacatttatttttatctgtttttttttttcctgttaaagacaattatgtagagtgggcacgtaatccctccttagtagtattgtgttttgtgtaaatgtgctattgatattaagtatttacatgttccaaatatttacagactctagttgcaaggtaaagggcagcttgtgatctcaaaaaaatacatggtgaaatgtcatccagttccatgaccttatattggcagcagtaggaaattggcagaagtgttgggttgtggtaacggagtgatgaatttttttttaatggccttgagtttgatctctgcaaaggataggaaacctttaggaagacaagaaactgcagttaatttagaactgtcactgtttcaagttacactttaaaaccacagcttttaccatcataacatggctctggtaatatgtaggaagctttataaaagttttggttgattcagaaaaaggatcctgttgcagagtgagaggaagcatagggggaaactccattggaacagattttcacacaacgttttaaattgatataagtttaggcagttgtagttcataacttatgttgctcatgttgtgctgtgtcaggatgggataggaagcaagtcccatgcttagaggcatgggatgtgttggaacgggatttacacacactggaggagcagggcaagttggaattctaagatccatgaacccccaactgtatttcctccctgcatattttaccaatatattaaaaaacaatgtaacttttaaaaggcatcattcctgaggtttgtcttaatttctgattaagtaatcagaatattttctgctatttttgccaggaatcacaaagatgattaaagggttggaaaaaaagatctatgatggaaaattaaaggaactgggattattgagcctggagaagagaagactgaggggcaaaccattgatggttttcaagtatatgaagggttggcacagagagggtggcgaccagctgttctccatatgcactaagaatagaacaagaggaaactggcttagactagagtataagggagcatttcttggcaggggccattgttagaatacttcataaaaaaagaagtgtgaaaatctcagtatctctctctctttctaaaaaattagataaaaatttgtctatttaagatggttaaagatgttcttacccaaggaaaagtaacaaattatagaatttcccaaaagatgttttgatcctactagtagtatgcagtgaaaatctttagaactaaataatttggacaaggcttaatttaggcatttccctcttgacctcctaatggagagggattgaaaggggaagagcccaccaaatgctgagctcactgaaatatctctcccttatggcaatcctagcagtattaaagaaaaaaggaaactatttattccaaatgagagtatgatggacagatattttagtatctcagtaatgtcctagtgtggcggtggttttcaatgtttcttcatggtaaaggtataagcctttcatttgttcaatggatgatgtttcagatttttttttttttaagagatccttcaaggaacacagttcagagagattttcatcgggtgcattctctctgcttcgtgtgtgacaagttatcttggctgctgagaaagagtgccctgccccacaccggcagacctttccttcacctcatcagtatgattcagtttctcttatcaattggactctcccaggttccacagaacagtaatattttttgaacaataggtacaatagaaggtcttctgtcatttaacctggtaaaggcagggctggagggggaaaataaatcattaagcctttgagtaacggcagaatatatggctgtagatccatttttaatggttcatttcctttatggtcatataactgcacagctgaagatgaaaggggaaaataaatgaaaattttacttttcgatgccaatgatacattgcactaaactgatggaagaagttatccaaagtactgtataacatcttgtttattatttaatgttttctaaaataaaaaatgttagtggttttccaaatggcctaataaaaacaattatttgtaaataaaaacactgttagtaataccaaaaaaaaaaaaaaaaaaacggggggccccgttattccctttagtgagggtaannnnnnnnn

SEQ ID NO: 12660 - DNA, 550 bp, Homo sapiens
acacaaggctgactgttcccagacccactcctcaggggatcacgatgggaggaatgtgacaaacacacattacaaataccagcagaaggactctgaagatacagcccgcagtgtaagtgatgctatgaggcagcatccaacctgtgccaaatgagttatggccaataaatgctgcaggaaccccaaggaaggagccacacctgcaactggatgctggccaagcccttgggcggtcagaggctggcacacttcaagagccacagccgggccaggtctgcacactgagggctgggcacagtggtatctaaactgtgtatgcaggcataggcctgggcatacatttttcccatccacggctcttagaagacccacattgctcctgcaaggagacgcgcagagacggggttgtggactgcacatctgtgtcccccccagacccatatgctgaaatcctgacctccaatgggagtcgattaggaggcggggccttgggggagggattcagtttagataagccatcagggtagggccctcatgatgagattggggt

SEQ ID NO: 12661 - DNA, 2968 bp, Homo sapiens
actactgattgggttggcctctgctgcaacagcggctcccctgttggaaagaagcctatgatgccaaaactgatgattaattaaggttcattatgattcaacgtgggcagcaattccaaattatggagtacgcggggggggttgactgagcgttgcgagccttagctttctcccgaacgccagcgctgaggacacgatgtcgcggctctcccgctcactgctttgggccgccacctgcctgggcgtgctctgcgtgctgtccgaggacaagaacaccacccagcacccgaacgtgacgactttagcgcccatctccaacgtaacctcggcgccggttacgtccctcccgctggtcaccactccggcaccagaaacctgtgaaggtcgaaacagctgcgtttcctgttttaatgatagcgttgttaatactacctgcttttggatagaatgtaaagatgagagctattgttcacataactcaacagttagtgattgtcaagtggggaacacgacagacttctgttccgtttccacggccactccagtgccaacagccaattctacagctaaacccacagttcagccctccccttctacaacttccaagacagttactacatcaggtacaacaaataacactgtgactccaacctcacaacctgtgcgaaagtctacctttgatgcagccagtttcattggaggaattgtcctggtcttgggtgtgcaggctgtaattttctttctttataaattctgcaaatctaaagaacgaaattaccacactctgtaaacagacccattgaattaataaggactggtgattcatttgtgtaactcactgaagccaaaatactatcttttaagatgtcccacatggaagacgctattccaggatctttaaatttccatggatgcatataggatgtttgggagcatcatccgtgaagaaaaaatcaattaaatcattgtgttcaacaggaatatttaaaatattctgcatgaatcctgtggctgtcttattttaaatagctgctgctgtgggattatattttttttccttaacatgccaaatataactttctgaaagtgatggaaaatgttgtcttgtgcagacaacatcatggctcttggcagtttaaatttagtaattttaatttagtgaacagaattgagaagaacgtgccaaatgagaatcaattaggtggatttttggctgtcatttcaaaagtggaataaatttattaatttagtagtactaaatggtatccttagattcacaaggaactacattccagatttaaagaaatgaaaggataccattagtgtgtataacagattattgttcatacttgtaaagcaccttatgtcattgagaatataaagaacagtgccttagaagacagtgaaaggtaagctctagcttaatgtctatgatttgttctttgacattaaggaaggtaaggattggtcagaggatgtaacttgatgtgagcagtagtaaacctgttttagatatcatactgttaatattttattgaaaatttatttcagagcggagaaacttaagctaaagtctgttatacagaattgaaagccttcgtatcttgaacctcccaacatttttcttatggctgttgaaaagtatagagctaaattgatttaattacactttcctttgtactttaaaaaaaagtatgctagcactattgtaccttgaaaggatttccaccagactgtcttgagtagtgacttctttggtgaggcaagaaggatatacattattttagaatcatttactatttaaatgagacaatcatattattttagaatcatttattttaaatgagacaatcattttaagttttaagataacagaagtgaccaatgtaatttcacaacacctaaggattttttggttgatcaggttactgtagatttttactgattgtcctggatgaatagactgtgctttttctttttctctcccttccttcttggtttcccatagtataataagcatgcatactttaacttctatagttttctcctttagagggtcgtcttcagttttagaggtttacttctcccttgcctttgactcattggactagtgcagaggctttaagtagtttaaaatgggcttttgcttttctaggtcattaacgttttttatttagtttctttagccaatagtggctgagtttcgcacttgattttcaatattttatagtaagaaatgacaaactgctttgtttcatttcataaacaaactctgcatttagataactattaaaggttgttaagatgaagatttactgtttctttgttactcgttggtacagctgtttgttttacttgcacatttgtacatatacttaatgttttcaagtgccttaattgtttaaaatctctggcttcaaagtttcttggggaaaggtcggtttacctcacattttttgtttccattagtaatattctaggtacctcacaaaatgtattatggtgccatggctgttagtttttagtgagtgctgtaggattaattcgaaaataggcagaattccattcctcccaaggtggcaaaaattagctatactgatgtaattgtcatttacctgggtatgaattccctgacacacattcatgtcaacatatgtagcaaattttgtgaaacaaataacacttgaacacaggaatttgaacaatggctagtacagctaaattaactaggaaaatagacagtacaaagtgatctgaacaaatcaagcgataactattgcactattacaaggttattctgagaccatatcggggagaaaaacaaggtatttacacataaatacacaatgtagtacatttctaagagtataataagaataacacacggtataccattacgataaacagataaaaaacgtatgaaacagtctcaatgagctgataaatcgacctccactcctcaataaag

SEQ ID NO: 12662 - DNA, 3623 bp, Homo sapiens
acagcaaaacccacctgtgtaaacacacacagcaaagtgatgtaagaagtttccatataaagggctgcagtatggagaggtaatgtgcaggctggtttgcggctgtaggggccaccttgctgcagctctccactgatatggtacctgcccgggcggccgaggtacgcgggggatggagagtaacgccattaccgccggagccgccgagagccttagccgacggaaactggacactggaccggcagcgccatgagactcctcccccgcttgctgctgcttctcttactcgtgttccctgccactgtcttgttccgaggcggccccagaggcttgttagcagtggcacaagatcttacagaggatgaagaaacagtagaagattccataattgaggatgaagatgatgaagccgaggtagaagaagatgaacccacagatttggtagaagataaagagggagaagatgtgtctggtgaacctgaagcttcaccgagtgcagatacaactatactgtttgtaaaaggagaagattttccagcaaataacattgtgaagttcctggtaggctttaccaacaagggtacagaagattttattgttgaatccttagatgcctcattccgttatcctcaggactaccagttttatatccagaatttcacagctcttcctctgaacactgtagtgccaccccagagacaggcaacttttgagtactctttcattcctgcagagcccatgggcggacgaccatttggtttggtcatcaatctgaactacaaagatttgaacggcaatgtattccaagatgcagtcttcaatcaaacagttacagttattgaaagagaggatgggttagatggagaaacaatctttatgtatatgttccttgctggtcttgggcttctggttattgttggccttcatcaactcctagaatctagaaagcgtaagagacccatacagaaagtagaaatgggtacatcaagtcagaatgatgttgacatgagttggattcctcaggaaacattgaatcaaatcaataaagcttcaccaagaaggttgcccaggaaacgggcacagaagagatcagtgggatctgatgagtaaatgttcctttgtgcaacaattcggtctttacttaacctgccctaatatttttcggcctgatgggaattagtgcagagaagccatgtcaccatagaaggcaactcctacttgtgtgtggactgagcaatcagagtctgtggcgataatattgctgaaaatgcactgcattcatttttctaaagtaacaaatttggtttttttttaaaccattaaaatctatgtgtgtgcgtgtgtatgtatgtgagcagttggtcttaccagaatcattgttgaactacctgaaacaagtctttagaatactaaatataatgctgttgtctcttcctttttgacattttctgattttttcccccaaaactcagttaatatttacccactatgattattgatgtcctgccttgaacagttttaaagaaaacaatttttggaatagctcaaatttcaattgatggcacaaatcagcattttgttgttgttactgtattacaattagtattctaaaggcagaagcagaagtagctgctttttagcaatagaattgtttcagtattttgctgctgtttaatgcgcatcttcagaaaacttcccagtggcttcaaggaatttggggatctctctggcaacaaattgtgaaacatgaaatttctgctgactttaatatatgaaacctaatcctacccccttttttaacaaaaagaaactagtacatttgtgaaaattgtgttgtgttgtccattgttgctctagttctgacccagaggtagctctggagtgattttagacctactcactcagttgtgtgtaggtttttttgttttgttttgagagagaatttttctctccttaatagaagcatcctttttaaagagaagttgccttggtccacacactaagcagaaaaccaagttatcaggacagagatatttcccaattactcctaatcaatgaagaaagtgagttggatatttttaaagcagttaactaattttttcttacctaatcttttgggagttttgcttgttgatataacctttttagttaacctgaaagattccaaaaattgttcttaagtgcttgagactggaaccaaaattaaattgtacttcataaaatcctcttatagagttactcttgccctagattgtaaattaagtttggcattattgtcagactggatggagggtgaagtaaaatagtatgaacaattaagaggctctccccctcttgtctttaagccatattctcctacatgtattttataagaaaatgttaagtcaaattttagtggctctttaattcctgacctcttcattctccttttcagtataacctcccctatgctcatgcccacacagacaaaaaaacaaaacgaaatacacacagaaaaaagtctttccaaactgtttaagtatttaaacatctgagccaaagcagatagaagttattgtataattgttaatcactttgcaaataggggctatcaaattacctatattggcattgctggattataaactctatatctgtaatataaagtgtttgagtttttaatggggctgttatgatcagtagttgattttgagaaagctctatgagctctaagtaactgcatggttttttgtttaatgtaatataggagacccttcacattcccaaggaatatattccaaaacatttttgtgaatatctaagtttgtgaaactactagggcatgatacagtaaggtgtaattacagaatttacgaaatgtaaatggcctctacagagttttatggaatacctggtactaacgtaggcagctgcaaaaccacactgagttacagctgtcagccctcctcattcctaaataacttgccttacatatcagccctcccacttctgaagttcaaattagtgcctcggaaatgtagaatttattatttgtcattttttttttttttagcatagattgagaacagttgaactcttaaatcctcagatgccaggggtctgctctagcatcagtaagtatttagcagaaactaactccgtaatgaatggaattcaattccacacatggtttgttcaagcacacttaataagtagcctattttttaaatgtctttttaaaatgtaaatatttggatgaagtttttctttgttttgatatattcatttgctacaccaactatgttttcagaattcatcttttgaacaacttggtttcagaatatgtaaaatgactttaaggatcttgtgtatcaaacctatccccggatgtgtgagaataatgtgttcataaagtcattttacatattctgaaaccaagttgttcaaaagatgaattctgaaaacatagttggtgtagcaaatgaatatatcaatacaaagaaaaacttcatccaaatatttacattttaaaaagacatttaaaaaataggctacttattaagtgtgcttgaacaaaccatgtgtggaattgaattccattcattacgtagttagtttctgctaaatacttactgagtcagacc

SEQ ID NO: 12663 - DNA, 340 bp, Homo sapiens
ccgggcaggtacattttaaacgggtgcattgtatggtatgtaaatcatacctcaaaaaagctgttacataaatggtgcctagagagcatatacatgttctaaactcatccggagagtcagggaagattttactgaagaaattaactaggagttgagagtgaaggaatgagttaaatacattagggagaggtagaagtagaaggtgtgagacttgggggttgagggcattctagacacaaagggaaaagaagtacacacaagtccagtgttgccaaggagctttgtttatagaaagaagcttggtcccctcagttctatgctgttgtgtggcctggttggt

SEQ ID NO: 12664 - DNA, 526 bp, Homo sapiens
ggtggtcgcgagggagccggaaagatggtggttaccagatctgcacgagctaaggccagcatccaagccgcgtcggctgaaagttccgggcaaaagagttttgctgctaatgggattcaagcgcatccagaaagtagtacctcggccgcccgggcaggtacgcgggattcctggctttttaacttttccaaatgtaacctcccaggtgctgagagaaaggaaaatttaagacagtttatgaaagggaggagaatcaacaaatggcacaggtcacccaaatgccaaccagaaagtgctcattttctaggctaaaaattgaacctgaactcaggccaccattgtgaaaagacaaagccttaactgctaagctacagcattgggcagtttccactgcttttcccagaaggagcccagagcagtaaattttgagcttgcaaaggcttttaactgctcaagataatttgtagagctaactactaccccaaaatccctgttgcctggaaggcagagacaaagagaaagtacc

SEQ ID NO: 12665 - DNA, 564 bp, Homo sapiens
acccaccaccacacccagctatttttttgtatttctagtagagacagggtttcaccatgttggccaggctggtctcgaactcctgacctcaggtgattcacccacctcggcctcccaaagtgctgggattacaggcatgagccaccgtgcctgaacttattttatagctctttggtctcctcccagatggcttggcaaacagcgattactgatgagtgttacccatcatgcaacaattctgctctcttttctgtcacacggtggtcagaggctccagatagtcctccaatttaatgtaaaatgagacttggttttgattgacggtctgaaggactctgcttcatgggtgacatccataaattttatgttccagcatatggtttatcttggggaatgttccatgtgccctcagctatgcaccgacgcaccacgtgctctggtgcacatccaccgcctcttcctgcctcagtttctccttttgtaaaacaacagcttgtaaaggcctggggatcttctcatccacgggagttttctaaggatgcaggcgaaagaggtaggaaaagt

SEQ ID NO: 12666 - DNA, 1768 bp, Homo sapiens
cagtgttaaatcctgcaggttccttattctcagcttgtgttgtgagtttcagtgttgggggctaatgtgggtttgctttttggtcttggttttcccagtggccagtccatcagccactgcactgggggccaggtagaggccaactgcaccctgcctgccagagtagaaatactggtaggccccaggctctgctgccccttccatgtccttgtgtaagcatccatggacaaagctgactcacggggtgtgcacagctgcagggaggccaggaaacaggggttttattctagagggccttgtgctcagtgacagaccagagtcccatcactgagagagcagggctggggcagcacaaaggactggagagcatttgccatgatgccatgtgcacagccagtgcaagtccttcattgtagctgtggtcagaggtcatgagacactgccttcagcaccctgggagtccacctggtgtgtggttagagatgtgcatctgcagatttcagaaggacttacgtttggtgaggtgctttgaagtaacacttcacaaataccaagaagcaagaaatacacaaataagcaggtgtccctggccagtgtccttccacctgtccacaagcatggggaacatcttcgccaacctcttcaagggcctttttggcaaaaaaagaaatgcgcatcctcatggtgggcctggatgctgcagggaagaccacgatcctctacaagcttaagctgggtgagatcgtgaccaccattcccaccataggcttcaacgtggaaaccgtggagtacaagaacatcagcttcactgtgtgggacgtgggtggccaggacaagatccggcccctgtggcgccactacttccagaacacacaaggcctgatcttcgtggtggacagcaatgacagagagcgtgtgaacgaggcccgtgaggagctcatgaggatgctggccgaggacgagctccgggatgctgtcctcctggtgttcgccaacaagcaggacctccccaacgccatgaatgcggccgagatcacagacaagctggggctgcactcactacgccacaggaactggtacattcaggccacctgcgccaccagcggcgacgggctctatgaaggactggactggctgtccaatcagctccggaaccagaagtgaacgcgacccccctccctctcactcctcttggccctctggctttactctcatgtgggcaaacgtgcggctcgtggtgtgagtgccagaaagctggctccgtggtttggtcaccgtgtgcatcgcaccgtgctgtaaatgtgggcagacgcaggcctgcgggccaggctttttatttaatgtaaatagttttgtttccaatgaggcagtttctggtactcctatgcaatatttacttcagctttttttatgtgaaaaagaaaaatcaactcactgttcagtgctgagaggggatgtagggccatggggcactgggctccaggagtcgtgtgttggagaagcccggccagccccttggggttacaagctgtgtggaattcattttggggtggttttaaccaaatacgtgcattttaactcagctaagatcaaggggggaaactgaaccaggagggagccgtcattattggggtcggcggatacagcacggggtccctgaatggggggggcccgcgcaatggggagcaaccgacggtgcccgacaaagggtcgcaatcaggggaccacagggccagcagggcagggggccacggggcgaacctgtatc

SEQ ID NO: 12667 - DNA, 408 bp, Homo sapiens
gctttatggaacgcttttgcaccagaaaaatctcattaatacaatgactacttccaaagtgacctggcttctttgaaactggacacattgtggtagattggagggagcccacattggtaaaaaaaaacttttactgttttatgtaaatgtttaatggctccataggttccccattttctcttctgttaaatgcatttcatttctttaagtaaaagttttgttttaaattttaattcttttccaataacttcttcccctacaggaaaacgacagcacgtgttctttttcactagtagaagtaaagttggtttcatgttgacaactttgaagccatttggaagtgtttcagtggagagcaaaatgaataacaaagcgggctcctttttctggaaccttagacaattcagt

SEQ ID NO: 12668 - DNA, 916 bp, Homo sapiens
  misc_feature 1, 2, 905, 906, 907, 908, 909, 910, 911, 912, 913, 914, 915,916: n = A,T,C or G
nnagtcccgagttttggctgctcacaaagcaacgaaaccccatggattatcctgttgaggatgctttctgtaaacctcaactcgtgaagaagagctatggtgtggagaacagagcctactctcaagaggaaatcactcaaggtacagatgcagcctggctaggcagagaatcccttgtagaaaggtgggggagaatcataggatattataactgtaaggaacatgcaagattttccagattatacccttgatagaatagataagttccttaaggctcagatcttgcttaaagtcgtccagcctgttagagacaagtagaacacgaagctggcctctggagtctttattgagtactttgtacaattggtgtagactgggagagccctcctcacttcccctttcttgtgctgtaatttcctgtggggcagaacacctcagaggtttctgtgcatcaaaataagatgcagcaaagacatggaaaaaggataacgagacaaattcccagcaataagtagatgaggttgtgttttttataaaagataacgaggcattccttccagaaatgtggagcctttgtagatttcagtgcataaaaccaagccatgatttcctgcagtgatcacagagcagagaagggagaaagcccttttatcacaaaccagcaggaagtctctgtaaaattggtaaggattctggtttagtgtgaagaaccacattttttgtgtatgtttctgggcccatgggaaggaacagatcatatttgacatacaagaatcaaatgattcaggccaggcatggtggctcactcctgtaatcctagccctctgggaggctgaggtgggaggattgcttgagcccagaagtttgagaccagcttgggcaaaatagcaagacttcatctctannnnnnnnnnnn

SEQ ID NO: 12669 - DNA, 860 bp, Homo sapiens
tatagggagtcgacccacgcgtccggtgacatccgccatcttgagagtcaactactgactggactgagttgtgtggtatatgcttctgtttacttctcttctgtcttttttaagtggccaaatagcaaacgcttaaataggaaatctctgggagacttgaataaaagactttgcttggtagaaaatcatgtcacagaaaggctaatagacagcaaagtaaatcagcaagtccctgagcagtaggattaggattcctgtctcctttcagattcaaatgcatctgtttctggggttaacagtggactgttaagaggctgtgcagcttgggttaagtcattcttatctctgggcttcaggagcttagaccagatagtttctacaggctctcttggtgctgatgccttgggattctgtggctgttttctgtaagatctgcaagggggaaacaggattttggcagcaatcctttcattactaaagcttcctttcttttcgggtacacacatgagaactgaaatggcccaaacccagaaagaaagcccaactagatcctcagaagacgcttctagggacaataaccgatgaggaaaagatggcctccttgtgccaccgtctgttatgatttctctccattgcagcagaaagccgttcttctaagcagacagcaggtgatgatggcaaaatagaccacactcttgaggagcaggaggaggtaccacatgtggctcctccttctcctctagccaggcatggagcggctgggcaggcaaagccagaaaaaccctgcagcaacttttctaccactctggccgatctgcaagttccatcaccaccacctaccacagtgaggcgagcagcac

SEQ ID NO: 12670 - DNA, 566 bp, Homo sapiens
  misc_feature 1, 2, 3, 4, 5, 122, 123, 124, 125, 126, 127, 128, 129, 130,131, 132, 133, 134, 135, 136, 137, 138, 139, 140, 141, 142,143, 144, 145, 146, 147, 148, 149, 150, 151, 152, 153, 154,155, 156, 157, 158, 159, 160, 161, 162, 163, 164, 165: n = A,T,C or G
  misc_feature 166, 167, 168, 169, 562, 563, 564, 565, 566: n = A,T,C or G
nnnnnggggtcaccacgcgtccggagagatgtgcacggtcctatgcagggatgacacccaaattcatgaagccttccatgtttttgtatcctaggaaaaataaaatggcagaactgccagannnnnnnnnnnnnnnnnnnnnnnnnnnnnnnnnnnnnnnnnnnnnnnngtgtttccacaaatgaatgaatgaaagttttacttataacttcactgaaacacagcttttgcttattctagtttaggaaccatgaggggatatttttgggaaaacctttttatggatttaagaaaatggatccctgccttgggcagcggttggctcacgccctgtatatcccaggcactttggtgaggccaaggttgggtgggattcacgagggtcgtggtagatacgatgactcatctctgtgctacaacacgggtgaacccaccccgctctcttatttaaaaaaatgccaataaatatttagcctcaagacaatgggtgggctggggcactcttgtaagctccacaggcttactttgtggaaggctgaagcaggacaatggcgtgaacccnnnnn

SEQ ID NO: 12671 - DNA, 454 bp, Homo sapiens
  misc_feature 332, 454: n = A,T,C or G
acgggtgcctggcctcgcttctgccccaccactctgcccaagaactggctggctccaggattggtgccttctcttatggctctggtttagcaacaagtttcttttcatttcgagtatcccaggatgctgctccaggctctcccctggacaagttggtgtcccgcacatcagacctgccaaaacgcctagcctcccgaaagtgtgtgtctcctgaggagttcacagaaataatgaaccaaagagagcaattctaccataaggtgaatttctccccacctggtgacacaaacagccttttcccaggtacctcggccgcccgggcaggtactttntttcttttttcctttttcagaatgcaaggtcttgtatttaagtagcctgaaataatcttttaaatggaaaataaagattaatcagagtgaaaattaaatgctattttgacccaccgaatcan

SEQ ID NO: 12672 - DNA, 460 bp, Homo sapiens
  misc_feature 1, 2, 3, 4: n = A,T,C or G
nnnnaatcattggaagatttggaacctcactgaaaattggtattgttggattgccaaatgttgggaaatctactttcttcaatgtgttaaccaatagtcaggcttcagcagaaaacttcccgttctgcactattgatcctaatgagagcagagtacctcggccgaggtactgaactggccttttcagtttaggtatagtccccaggaaaccagcataaatagcacctcttattaatagccttcctgagctacacgtgtggattacctccatacgttatgtcagtcacacacttggcactggcagtcagctccgctggcactgcagccttctttgcagaataaaggcccacaataagagctggaagacaagaaattggttctaatttcagcctgaaatcggaaaagatttctgaatcttctcagcagatgaaagcttaccagtcaaccagcccgggaatgt

SEQ ID NO: 12673 - DNA, 482 bp, Homo sapiens
  misc_feature 1, 2, 3, 4: n = A,T,C or G
nnnngtaatctctggccccgattaagagggcctggtcacagtgaccgctgagtaggcatggatgagtgggatatttagctgaggaaccctttcccttttccttcttttgggggtcttttcttacagtgaacttccaaaatgtcaaatctagggctgtttcccaaattacactattctaggcatcattttgattcccatgtcactccttaactcacttccttgagcactacatgtatgttgtcagccacgagacaggacttcctaaatagtgtgtgcaccagcctaactctgccttacccagaaaccaaccacctaagaggaaaactcagaagatattaatgaaaactaattgaaagtacctcggccgggccggagtgctggggctttgaactccgagaggaggtggaccagaacttttggaactagtgccggcggctctccaccccccagtataaaagaacgtgtggatcactttgctgagt

SEQ ID NO: 12674 - DNA, 5499 bp, Homo sapiens
  misc_feature 4437: n = A,T,C or G
agttttcaatactacccttttaaggatttaaaccacctgacttgtttctgtgtaatgaaaacaaatggcacaaaataaatacaagttcattctctgaatactaatgtcttatacacattcatttactaatttttaatatctccatcttttcctcacacacacatacatacatacatatacacacacacacacacacacccctttttcagtctttataatggagggatgttaaaaatcccctctagactgtatttggtttatgctacagtactaatactctgagttgaaggaaaattctttataccaaacaataacacgttatttaaatgtgctaaattaatcacagctgaagtttgtttagaagcttacacaaaataatcagaaaacagatcaactcttaagatttttttttaataagtgctctgtaaggaattgtgtgaggacctaaggagaaagattgcaacaaatagagttaagtgttaccaaacagcacaaagagatttgtcccaaagtcctgcttgtacctaggcaattaagtctattaacctaatgcccccaaaatactgacagttaatatgatggggcactagggttctcagaaagttaacagacattcctaactacatacctctaaccatataatcaaggaaatttcagtggagaaatcaaagtgaaatgttgcattgtttcatttagaagtgagactctcaaaaacctttggacagacagagaagtgatacattctttttggcttctctgaacactgaggcctgagggatatggaaggaaattagaaaagcaatagctttctaaagatgtttaatcaagtgttgcttctaagttaaaaagcccaattcaggtggggtctgggtttgttttttgttttttccttttcaaatatatactcaattcaacctctgtatgtcacaaacccagaaagtttcttgtgagttgtgagacggaagaactttaaaattccaggcaagcaaaatggacatttaaaaaaggggactagagaggggaatctggccctaaggcgacaagtggttacacaaggcaattgaacacacagcagaactttaaaacctgtaaaacaaactggagccttttttccctttaatcaaccttatatgtctttttttttaactttttgaaaatttttatttaaaaaaaacacaaaaacacagacttttttcacttcagttatgtggtatgttgcattttccagtttgttcaatgctttaaagctcaaggatgcctctgctttcaattgtacatgggcctgaagcatcctagcttttggcaagcaggcaggagactcaacaaaaatcaaaataggaacaaggcagactaaatgcagggcacatctgtaaacatattatacatttgaaaattacaatatcagtcaaagtgatacagtttacaggtgaaatgaaactatctggaactggcctaccacaagtttctgaacctggactgatacaataagttattttatatatatatatatatattatgtataaaaaaaagttttgtttacatcaagtggaattggcaatccatgcttatacttttaaaatctaagcagggcagaaatccagactaaaaagatagttactctactctatgttgagtccaacagcttctttcatgaactacttgttttaaaagcctcaaataatcaacaaaacaagaaaacccatccatactacagtcactcaaaactggacatttctaggggtagagccaaagtagttactttctccccaaataccccaggggatccagtctacttttatcagaagactacaactctttatataaatgccctgatattttaacctgtatttgacatacatggatatactaatttctgtgtgtgtgatgtgatgctgtgtcaggccagacaacttgttattatgttactaacatcacccaatctcaattggacccttaatttctgcacacacacacaaaaatttattttagcatgctatacacaagctgcagtgcaacaggatggcaatgtaatgataagacagggctaatgctcttctctgccccaaagaaaatttccagaatttcacattattttccttaaaaacccatcttgctctagtaataaaatatatttattaagatataattagaagctaacaagctcagaagtatagtttgcatgaaaacacaccttctacagtcagggtttattatcttctcactggctaaaaacatgaaaagttttagttttcatggacttttttcttccccttttagattttgctgagaaattaaaagataatttacagaaaggtctaagtttgtcttaaatgtttgatgaaaaacaaggaaaacagcacatttagtgttagtgacggagagcaagtctggagcacctacagttgaaaagcagaatatatttttgctcccagttatacaattacattaaaatatgggcacaggaatatttttccagattgtatatctaagccaattgcttgttctgcaacttttctttaaatgacacgcatagattcttcagttgttaaagtccaatatgtaaccgaagccaagttaactatgtaccatcaactaactattccagaattgtagaacttcaatgccctcccctatccccgccccacaaaaaataaatggaaagaaataaagtatttccccaacaccccagaggccgcttaactcctggcaagacatgcaaatcatattcgctaaaaaaatacaccctgctaacttcaaggcatttatccagcattctcgcagggcttaattaaagtaaaaccaaaaagatcaagggaggagtggggggaaaatgttgaatcattctgggttccccgtgattagtgtatcacttcagtcacagaacaagatacagagatcttttaagtggatttgcctttccagtgggtcatttgttgcccaagttgatgacagcaggaactttagaaccacacttgttaagtctgtattcattaatcacttgcattcacacttaaaaacaaaaactaacagaagaaaaaaaacctattcagtaccggagattaaataaccatgtgtagtctcttgaaataaatttgattccttaagaagtctaattactttcagttgccttttttaaataactatatatatatatatgtatatatatatatttgtatatattatcctgtgattctacttatggttcctctgctgcgttgaagatctaggagcataaaagccttgtgtcccccatgaacgatggctctaatgctgcagaaaggttacgaataggcagtctggtccttcattgatctggactatccatggcttcattgtaagtgattatccttttgggatcttgcttctgcaaattccaaatagattccatttctttagtgtgatatacaatagcagccctcaggtcaaaagaaccccagctatcattcctttctaggcctctctggtatctctgttctttggcagagcctaacaaagtgttcgtaggagaggccagaggattttgactttctatctcgtagtcctttgagagaaacactaaagcaccttgactactggtgtctgctttctgcgagtcacctatatgactgggttccaaggataaggctccactctcactagtagtcccagattttagaatgctacccagaacttgaggactagtccgtttctccagctcgtaagccttgggaaacacaggatgctcagttcctgagggaattatttcagcaccctgtgaaaccaaagtagcaggatattctccttgaaatgtcacctccatcactttatgctctgatgacttcccagtaacagtctcagggccagcactgggctcatttataaatgataaaccccactgattctggaagatatcccccaggttttgctgatctgtctgagagggcagatccacttgtgctgtgctcaacagcatagtttgcatatttgaaggatagataaaaaggctagtcttaatttgttcaacagctgctgaagttagactcatgtcctggagaactgaatctgtcccagaagagatgggtgttagagtattagcagcagtagttagcagtggctgaccccctggaggataaacatttccatcagtccctgctaaaacaggcccattagaaaagttggcagaagtaacagatttcagcgctgacatagggacctgggataagcgacttgatgattgggtctgagtttccccggtagatgatgaagatgatgaagatgaagttggtgacacagaagagttctgtatagttttgttgaggttttccttaactttgcttgcttaacttattttaggaactattttagcactgctattgtccactggaaaaactgggggtggtttaaatagggtccacgagtcctctttggaggcaacagctgaagcatgctttcctttgngccgatcatcaaactttttgctgctcacaccaggtttactatctgagcttttccgaagcatatcacccacagcaggttttcctcgacttgttcctccaggcccagtttcatactcccaaatgggcttcgaaccatctactcgatttcccttttgttcactatagtcaggcttgaaagtttcaagtccctgttttaaggttgggacactggtctcttgttgcattattttgtcctgcactatattaaggttttcacaacccttggcactattgcgcctagctttcctttttttaggagttgtatatccgctctcagatccactaccatcattatctgctcctttacccatataaccattagtaatataaccagaattatttgttaccacaccatttggaattggtatagtatcagacttatctacagactgattctctccagatttattttcataagacttcccattctttttgtccatactgtttttctgaatgaaattcttggttttaattcctgctttcccaaaggtgttggcctttacagtctgcttcaggctagtgtctacaacttgctggttgccattgaggaccctggaaatagggttggtggcttcatcagaactcaggttctttaaagatatttctctttctccagcattaccgtttagttcaccatagcctgttttcttcttcggcgtttcctggtgctgctggagggtgtgtttctgctcatgtttcagcggctttggctgggccttggggctgccctcggctccatgctgcaggtattggtgaggctgctggtgatgatggtggtggtggtggttgtggctgtggttgtagaaataataatggtggtggtggtgcggctgctgctgctgctgctgagggtgatggtgcggatggtggtggctgtgatggtgctgaggctgtggctggccgggcttctcctccattgaaagcggctgggactccctggctgaggctgcgggctgctgcaccgtcaggatctgagactgcttctcagggctcactcagtatatctccccgcgtacctgcccgg

SEQ ID NO: 12675 - DNA, 1014 bp, Homo sapiens
  misc_feature 1: n = A,T,C or G
nattctggtcgtctgtggcagtggtccgggttgttgcgctggtgtttgtgggcttttcgtcgggcatggctgtggtgtgtgcacggttccatgtgggtgtggtctgcaggctgtcctggccttcaggccttgtcggttggctctcttggtgtgtttctttcgtagggtatgcgtccagctttttgcctgtattcttcgcctgtgttgtaatgtagcctgttctttcgcagcacaggttcatgcttggaagcagctaggatacagagtataagaggggtttgcggccagaggcccttggtggctgcatatatcagttgctggcgtgcgcggccggcccttgcctatggttgttagcccggtgacagcgagacgtgtctaagggccagtgccctggcctctacttctagtacgcagtgccctgtccgtgttcctcttagtacagggtgtttagagaatctttctatggctttttgtgttagatttcaaagacctgtgcactttgacgggatgggattttgtcagttctgtgacttcacgtccgtgtgaaagaggtctttaaggcagttcggttttgtagatcccatgcgaaaggagtcgctcaaaatcagggggcgaactacgcgggcgtgaactcgcaggatttatttttcgggtgcacagtaagtattcagtgaccttcagcggtgccctgacgggtgggtaatcagagctctatatcaccggcctcctctggccctttggcagagggcttcgcagctggcactgggccagaggagaacttcaggacccagcagtgactgtgaagataagcacatccatgatcctggacttcacgttctgattgcttgcttttttcattggttttcttgaaaacaaattttgggggcctttttgttgtcttagctcttgacactcggtcttccatcttgtcatttgacatttccttgaaactgctggagctgaaagtttgtgaaattctgtcttcgcggttgcccccactgcccgcccccgcgt

SEQ ID NO: 12676 - DNA, 671 bp, Homo sapiens
  misc_feature 619, 649, 669, 670, 671: n = A,T,C or G
acaaaaagcaaagaccccttctccatctctggattttaaaaactggaaaaggatgctgagaggattgagccaaagagccagtcctgggacagtcactgtggccagctagtggtgtgctttgtctggccacgctgggtcctgctgctcgctccaaaggggcaacatacttgatttgcagccctggcagaatcatatgattaaagtgtgggagggcggtggtgagggaagtatctccccaaaggaaagaaggggtatggaacaggtaaaattaacagatgtttacaaaattgtcttaattattttccccaaaatgcatagccagttttcccaatcctagtttttctctatttacttaaaatgccatctttattatatatcatatagtaaattatctgtcttttcatttgccagtgccacagtgtcttcatttttttaaagctttaaattaaaaaggaaaaatcagagcttattcaactatctggtcaatggaaatttaacagtgatgcagtagttttagaatgtatacaaatttttccagcctgggcaatatggcgaaaccccatctctgcagaaaatacaaaagatggagaatcacctgagccttgggggtgaggctgangtgaactgagaatgtgcactgcacttcaanctgagcacagaatgagaccnnn

SEQ ID NO: 12677 - DNA, 909 bp, Homo sapiens
  misc_feature 1, 887, 888, 889, 890, 891, 892, 893, 894, 895, 896, 897,898, 899, 900, 901, 902, 903, 904, 905, 906, 907, 908, 909: n = A,T,C or G
nagacataataatgtacatttattgccagccttcctcgttgcaagcttccaccctgcagcaaatgcactatgctgactctcgcaccttcagctgtgccctctgacactctgctggccattgcctgagggactggggagttcaggtgaaatgtaatttcctcagtggatgagaatcatcaattgtcatgaaaaggcgatttcaccaaccctgagtcggtattgccaagggttctactccccaagtgggcttcccatcacaagggatctgaggtccaggtgggtgtggtgaggcccagcctgtcatgtatgccttccttccccagtctcaaatgtgagagacggactctgctccgtggacatgagcagccccttgaagggtggtctcattctctaacagtaacagcactgccagaaacaccccctgaatgccacacgatcatctcactttgggtcaggccagcagggcctcacgatcatttcttgaacttgaattttcagtgttattgaatctttaaacatttaaatccccaagcaaaaatctcattacagtgaataaaaaggaatccaatcaaacaagccaccacttccctaatggatggactacctacaactatagtgttttgttatttcaataacaattctatgcacagccaattctccataccaaagtactaaaaaaatgtttaacaagcatttttgaagaaaacaaagagaacttcattatggttaaacttgcttttcatctcagtgttgctttttttaacctgttaataacattgattcttaaaaagtcctaatcaaacttctttatttggatgggccctaaatattcattttcagatttctcttcaaaagtttgaacatcatcattaaaaaaaaaatagcannnnnnnnnnnnnnnnnnnnnnn

SEQ ID NO: 12678 - DNA, 698 bp, Homo sapiens
  misc_feature 697, 698: n = A,T,C or G
acgcggggaagcgcaaaagaagaaagatgaggcagaggtccaagtaaaccgctagcttgttgcaccgtggagaccacaggagcagaaacatggaatgccacacgctggggatgctggtacccgtgcccgcgatgacgccgagctccggccccgagccctggacatctactctgccgtggatgatgcctcccacgagaaggagctgatcgaagcgctgcaagaagtcttgaagaagctcaagagtaaacgtgttcccatctatgagaagaagtatggccaagtccccatgtgtgacgccggtgagcagtgtgcagagaggaaaggggcaaggatcggcaagctgtgtgactgtccccgaggaacctcctgcaattccttcctcctgaagtgcttatgaaggggcgtccattctcctccatacatccccatccctctactttccccagaggaccacaccttcctccctggagtttggcttaagcaacagataaagtttttattttcctctgaagggaaagggctcttttcctgctgtttcaaaaataaaagaacacattagatgttactgtgtgaagaataatgccttgtatggtgttgatacgtgtgtgaagtattcttattttatttgtttgacaaactcacgaggacctcggccgcccccgcggtgtggccgttcttttccacacaggaaacagcnn

SEQ ID NO: 12679 - DNA, 653 bp, Homo sapiens
  misc_feature 653: n = A,T,C or G
acctagagagaaagtggtccaagcacagggaattgtgagtgcaaaagctttaaggtggagtcatgtgtggtatgttgaaagacaaggtaggaggccagggtggctagagtgcagtgagccagcagacagcagtagacactgaggccagagggttagaggacagggcctgggcaccatcaaataagctttggagttcctgttagggtcggagatctcactcagtgtgacatggggagcctctccggaggctttgggcagaagagtggtatcatcccactcaagtcacgtcggctgccatgtggtgatgaggctattaggtggctagtgtcaaagaagggagaagcagcgttatatcggaatgggctcctaccaactcagcagaagccatgtgtgcatctcttcctgaaccatgccctcatgtcacttgaaattagccacggcgaaggtaagtccatgtggaaatctgcaaatactatagaggatttcttctccctcccttgtcccttccccttctcgtctttcctgcatttcttcctttcttcttcttcttcctcctcctccagttccttcttttctctttttttttacaacattatatatacttatttattgttaataagcaaagttgtagataaacacttaccagcacatcn

SEQ ID NO: 12680 - DNA, 854 bp, Homo sapiens
  misc_feature 852, 853, 854: n = A,T,C or G
acgcgggagttgtagagaatttttaccctgctcctggagtggtctggaggctcccatgaggtcctccatgtggaggcgctcagcaaaacaccttagcaggaagcaagcgcctggatccttccatgcagctttcaagttcactggtggccccgcactgctccaggcactggggagacaggtgtgaaccagcctaatgcaggcccctgtctttgaagagccccattgagaaggacaaccagatgtataaacagataaattaggagacagggtgacaagggagatggggcagcgggacgaggagataacccccaaacactagatttgaagtctaacgactcagagataaaaaccctcttccaccggacagctgggtcatttgaccttgaccttctgtgtcttctataaatagaatggtaacaactaccatgattagtgagctgactatgtggtagctagtgtttttcttactctacctgtagcctctccatgctcctgtgagatgtgttattcctatcttacagatggggaaatggaagcacagagaggccaatacacttgttcaaggtcacacagcccgtaagtggtaaggccaggacttgaatctgagcagtccagctacagagcccacatgctgagaccaccgtgctgtgcaattttctggcaggtgatgctgatgacaatgatgacacttttgacacagcgctttggtgagcgccacatgcattaatatgtgggaacctgctctgtctctagctaaaaagcgatggacccatatgaactctgacttaggttgcagtgagcagaaatcgggccactgcactccagcctggggggcagagggagactctgtcnnn

SEQ ID NO: 12681 - DNA, 506 bp, Homo sapiens
  misc_feature 506: n = A,T,C or G
acctggcgcttcctaagtcctggcagctaatgattgtggtggttgtcatggtttttatttctatttatctttcttttcatcattatcttggctagtttcttctctccctagaggcagacttagtttgtatgccaaaatcctataattagtgagaaataatgatccaggaacaggtatcatccgatagccacagatcctgtgagttctctgcaaaagtcatctctactgagcagtcgcctgccagccctcttcctttagctcccataagcaaaacagaccaactcccaagttgcttgttatgcatttcctggctcactgctactgtctttctttttagggtttcactaagatcaatgccttcaactgggccaaggtgcggaagctgagcttcaagaggaagcgctttcttatcaagctccggccagatgccaatgtaagtggtcctggcgggaaaggggacccgttgagccatgggatggcctgtgtcctgcaaggggtggaggtcn

SEQ ID NO: 12682 - DNA, 704 bp, Homo sapiens
  misc_feature 704: n = A,T,C or G
accatggaggggggaaaatagggcattttctgagagaaaggagccttggatatttgcattccattttgattagtattttttgtttctctcagttcattcagaatcaagggaaaacatatttaaatggatataatgtgatgccaagtgcctctggacaccaaaagcgccccctccacacacaccctacggtcagctcaggcatgaaggtgcatgtcccctcaaggccaggctaatggtggccctgactcagaggcaggcctcaccagcatggatcaactataaactaaactgcagaaggcactcatgccctgggtgggctatgggcagagaaaaactcatgagccccagacacatgtggtcagtgtgtatctgggtggaggcgggacgttcccagcattggagctgaccccatgcacagcctcacaggctggaaccaggcgtctttgagtggaagaagtcaagggagtcccattagagaaggaccctctgtgttcactgtgcacctgggagcaaggtttctcacaacagactctgctgctgaaaaattagtgtttgagttctaactggagttacagaccttggtgactttgcatagccctcttgacaagcggggcagccttgccaaatgacacatgggaagtggagggtgtgcagcaaatgctatttgtacgtgttggctctgggagtggcagagtatttctgan

SEQ ID NO: 12683 - DNA, 530 bp, Homo sapiens
  misc_feature 503, 504, 505, 506, 507, 508, 509, 510, 511, 512, 513, 514,515, 516, 517, 518, 519, 520, 521, 522, 523, 524, 525, 526,527, 528, 529, 530: n = A,T,C or G
acgcgggaggctcggtgggcgcgggcggcgagatatgccacacttctgcctgctgttggcaaccctcctggactaggctgctcttgttaatcacatggatgttgtgagtattatattcacaagtggatgtagagaagatatttttatttaactataaatgcttaccacatgagctactcatgcttcgcaaaaatatattaaacatttgtgatctggagtttcattaatctcagggattatgctgcttgttcattggttaaataatgtggtttcagtatcttcccctaatcatattgactttttatgaaagaacttttgacacaaagctgtgtctcagaatgttttgatgtaaaggtagctgctgatcttaatttgcaattgtggattcatttcatcttgtatgcttttatgttataggttccttaaggttgccagcatgaaagtgcttcagatggctttgagtcctaatcttgtggttctgttcactgaagataagcagcaannnnnnnnnnnnnnnnnnnnnnnnnnnn

SEQ ID NO: 12684 - DNA, 309 bp, Homo sapiens
acaccgccgagtcccatttctcacctttcacacccccatcctcacacaagtaacccgggtgtctgacacgttacttaggtttttaatccgcgctgagacaatctcacagagaccctacttcacctctcagtaacttgcatttctcagctctgctgtgtgtgtgtgtatgtgtgtgtgtgtgcgcgcgcgcgcgccggcgtgtgccgtgttgggggagtgtgatgtgggggaatcagttaatttggtgattgcaatgaaaattcgacaccgctagatgtattttccctgccaatctgtgtgtgctggccc

SEQ ID NO: 12685 - DNA, 491 bp, Homo sapiens
  misc_feature 484, 485, 486, 487, 488, 489, 490, 491: n = A,T,C or G
acttttttttttttttttttttttttttttcttcttacctttcctttctctctccttgacccatttcaattcaactgccacctactgagaacctgttatatgccagggatagggatatcaagatggatgaggtccaaccctaacttcaaggaactcacagtgtagtggaaaacccaggtatctaaagaaattatttcagtcccatgtgctaaggatggtggagtgtggtggtcaaaagtgcggactgaattcaagatcttgcctgctgggggtgacgtcagttgatctcactaagcctaagtttttcctctgggaaaatggtaattacatcttccacagaaggtttttataaaaattaatatgggataatcattgaccgtttgtgttgggggccaaggtaacaatgagatattaactgcttactaattaaattgacttttccaggaaccttcatattttttcccagtcagtggcattcactgannnnnnnn

SEQ ID NO: 12686 - DNA, 525 bp, Homo sapiens
  misc_feature 520, 521, 522, 523, 524, 525: n = A,T,C or G
actctattgaataaggggaagggattgtagaggtatggataccaggaggtggagatcatggggccatttttagagtctgtcagccattgtccatcatctgggcttcagtgattcatgtcccttccccatgcaaaacacattcattccctcccaagatctccaaaactctcatcctattacagcatctattgaaagttcagaatttcattatataaattaagtccaggcatggatgagtttccttggatgtagctcttcttgatgcatggatctcagtgttgatgtctgctggactgatcagcgtggtggctgctgaaggttgaggtggctgtcataatttcttaaaattaaacaacaaaaatttttctacaactattgactcttcctttcataaaagttttctctgtagcgtgttatgctgtttgacaacattttagccacagtataatttatttcaaaattggagttcggaggagccaagatggccgaatgggaacagcttcagtctccccgcgtaccnnnnnn

SEQ ID NO: 12687 - DNA, 565 bp, Homo sapiens
  misc_feature 564, 565: n = A,T,C or G
actataataattgaagaaatgaaaaaggcagttttctctggtttgcagaattattttagtttgttaattgaaagggtttactaagttccaggaaggactgatggaaaaagacacatttaggcaaatcgtcctgaagtttctgattcaaaaaaaaaagagaaaatttttatgagttctcaaacaaaaagttacacacaaagaaaaaaatgtaaactttcatgggatttcttctctttaatgctagaagagaaaagcacagtgtaaaaacatctgctaactactgaaagaaaagcactgcaacgcaagcatccgtcccgcacatggatgagataacattcacctatcagggtaagaagatgtaagaactgagagggttggagcaagatggccaaacagaagtctccactcaacataacccctacagcaacaccaaatttaacaagtctctacacataaaaagcaccttcataaggaccaaaaaatcgggtgagcatgacagtaggcagttttaacttcatattgctgaatgattcactgaagaagggaggaaagacagtcttaaann

SEQ ID NO: 12688 - DNA, 1050 bp, Homo sapiens
  misc_feature 1, 2, 3, 1050: n = A,T,C or G
nnnctcgcgatgagcgcctcggtttattggtgctttgtttttggtggcctgtctcgcttttgctcttcgttggtggtgtcataagtgcgtttttggttgtcctgtgactgtgccttctgtctccctcttttttggccgcttccttctgcaggtttcttgccctggttcttcgcgggcaccttggcagcccttaagcgtgctacacccgtggccgggttttcctgactcatcctccgggcctcctggccccttcgctgccatcctcgcataggtcttcttcagcacgcttcagctgtttgtgctgggagctggtggcgcggtgcagggctcttaagaacgaacggcttgggcgcggactggtatccggggactgtgacttgcagggtccgccatggagccagagcagatgctggagggacaaacgcaggttgcagaaaatcctcactctgagtacggtctcacagacaacgttgagagaatagtagaaaatgagaagattaatgcagaaaagtcatcaaagcagaaggtagatctccagtctttgccaactcgtgcctacctggatcagacagttgtgcctatcttattacagggacttgctgtgcttgcaaaggaaagaccaccaaatcccattgaatttctagcatcttatcttttaaaaaacaaggcacagtttgaagatcgaaactgacttaatgggaagaacagaaaaatttagttgctactgtagatttacatgattaagaggcagctttaattgccatgatcattccctctttttggatgtataagaaccttccggacaacagaacctatttctggaattgcagaagataacatatttcccttattttgatttaatcaccataaaccatacctatttaatgagtgtattctgtgcaatttttttctcagattgtctttaactttgtttttaaaatgaccttcaaaataaactgtcaaaacaccaaaaaaaaaaaaaaagaaccagcaggtttagagacagggcaaacaacaattgggggggccggccctacaagagtttcgaan

SEQ ID NO: 12689 - DNA, 446 bp, Homo sapiens
  misc_feature 1, 2: n = A,T,C or G
nncctcggtcctatgactttacagttgcaaaccccccatggtgcttccctctgcccagagatagcagctccgggctcttttatagcatgggcccagttcatctgcctgaagaaaagaagatgtatcaagttcaaggatatccaagaaatggatctcactgtggtccagattatagactctacaagagtgaaccagagttaacaacagtggcagaagttgatgaatctaatggagaagaaaaatcagaacctgtttcagagatagaaacttcagttgttaaaggttcccactttcctgttggagtagtccctccaagagcaaaatcaccaacacccgaatcttcgacaatagcttcctatgtaaccttgaggaaaactaagaagatgatggatctaagaacggaaagaccaagaagtgcagtggaacagctctgtttggctgaaagt

SEQ ID NO: 12690 - DNA, 480 bp, Homo sapiens
  misc_feature 1, 2, 3, 4, 5, 6, 7, 8, 9, 480: n = A,T,C or G
nnnnnnnnncaggtacacctcacaaatgatagtggctgagagccaaatgatgagcttctctgtgttatgtctacctagctgtgattatatcaggcacaggattgcgcgcgtgtgctctaatcccactgtgtcatgcaggatttttacctcggcctatgcctgcctggcagcaacacagccatgttccttacactccgccccctaggccaagggggtcctcttaatgggaactcgtgcacataggggagcaccctggacccataggccacagcaacaataaagagagcaacaacctactactaatattcctgctatgctacctatgattataagagcccagtgtaggccagagcccagagacacccaccatctctgcaggcggtcatcagtaaggtattcaattgccttaatctcccatgacatgacaccccctgcaaagctgccactatgttctggtggttgtcagggatgaatgtaccn

SEQ ID NO: 12691 - DNA, 418 bp, Homo sapiens
  misc_feature 1, 2: n = A,T,C or G
nnctaattctgtgaccggtgtacctgcccggacgtccgcccgggcaggtacaacactctgtccctacaagggcacaggtgccaccttgagcagctgtgactatgtctaaggccatccggttttgcatcaccaccttcctgatctgatcaatctcatcaattaacaaaaggagggcagctcaggtgtaattcatgggcccaatctctgtgttctgcaagggctgtaacctgcatttctacagtgatgacacctgttccagggacagttattgctaaggggtagaaccactaggggctcaatgcactcacaaaaactgggaacacagcacctcccagttatgtgtgtgactaagcaatgtgggaagcacagtggcaggcacagaaggccactcccaggtacctcggccgccaccgcggtg

SEQ ID NO: 12692 - DNA, 763 bp, Homo sapiens
  misc_feature 734, 735, 736, 737, 738, 739, 740, 741, 742, 743, 744, 745,746, 747, 748, 749, 750, 751, 752, 753, 754, 755, 756, 757,758, 759, 760, 761, 762, 763: n = A,T,C or G
accaaggcaaaaaaagaaaaaaaaatcaggatcctctgtgagaaacagaagttagagcaactgaattgcttaaacagctgggagttgagccaagtgccaacattcacaagctggtgagtttgggtcttagtttctgctttagttatatgagaaatttgccccctgagtgatgataattgctccttatagtaaatccgtgtctgcataaaggcaaggagtccttggataggggttgagtaggtctgcaaactctaatatcatttttatttttctgaatattgctctgggcttttctgtctctgccaggtaacttcaacatctccgctgatgagcctataactgtgacacctcctgactcacaatcatatatctccgtcaattactctgtgagaatcaatgaaacatatttcaccaatgtcactgtgctaaatggttctgtcttcctcagtgtgatggagaaagcccagaaaatgaatgatactatatttggtttcacaatggaggagcgctcatgggggccctatatcacctgtattcagggcctatgtgccaacaataatgacagaacctactgggaacttctgagtggaggcgaaccactgagccaaggagctggtagttacgttgtcccgcaaaggagaaaacttagaagttcttgagcccaagaagcaataagcccaaacttccctaatctgcccactgaactccagcctgggcaacacaacgagactgcnnnnnnnnnnnnnnnnnnnnnnnnnnnnnn

SEQ ID NO: 12693 - DNA, 1096 bp, Homo sapiens
acgcgtccgtcttgaatgcaaaaaatatatatagatacaagtctatcatttactaccacaaaacacacaaatcaattaaaagttaaattttatgaaaacatacagactgtacgtgtaagcaaatttaaaatgcagtattaaatcataactctatagccgccactgtccggccacagcctaacgctcttcgctgtcgtttgtggtctcgcgcagggcggccccggttctggtgtttggcgtcggaattaaacaaccaccatgtcgagcaaaaaggcaaagaccaagaccaccaagaaatgccctcagcgtgcaacatccaatgtgtttgccatgtttgaccagtcacagattcaggagttcaaagaggccttcaacatgattgatcagaacagagatggcttcatcgacaaggaagatttgcatgatatgcttgcttctctagggaagaatcccactgatgcataccttgatgccatgatgaatgaggccccagggcccatcaatttcaccatgttcctgaccatgtttggtgagaagttaaatggcacagatcctgaagatgtcatcagaaacgcctttgcttgctttgatgaagaagcaacaggcaccattcaggaagattacctaagagagctgctgacaaccatgggggatcggtttacagatgaggaagtggatgagctgtacagagaagcacctattgacaaaaaggggaatttcaattacatcgagttcacacgcatcctgaaacatggagccaaagacaaagatgactgacaagaactttaggtctaaacatcttccaggttacatctgtcttactctcttttacttctcagacacttcccccagcctcatagaacctgttgatgcaacttagtttaccagctatgcctcttctttgatgtatttattccagactttctgcgagttaggacttgttaatcgatgcaatggggtggggggtatcgttggaaagttcggattaaatccaagtggaaaaaaaaaaaaaaaaaggggggggaatcccggggacaagtgcacattgaaggcaaggggaaaaagggggaagggaagtggtgaaccgggggcacaa

SEQ ID NO: 12694 - DNA, 993 bp, Homo sapiens
accgggcccccccctcggaggtacttctagaattaattaaggcggggggcgctgagaacgcgggtccacgcgtgtgatcgtccgtgcgtctagcctttgcccacgcagctttcagtcatggcctccggtaacgcgcgcatcggaaagccagcccctgacttcaaggccacagcggtggttgatggcgccttcaaagaggtgaagctgtcggactacaaagggaagtacgtggtcctctttttctaccctctggacttcacttttgtgtgccccaccgagatcatcgcgttcagcaaccgtgcagaggacttccgcaagctgggctgtgaagtgctgggcgtctcggtggactctcagttcacccacctggcttggatcaacaccccccggaaagagggaggcttgggccccctgaacatccccctgcttgctgacgtgaccagacgcttgtctgaggattacggcgtgctgaaaacagatgagggcattgcctacaggggcctctttatcatcgatggcaagggtgtccttcgccagatcactgttaatgatttgcctgtgggacgctccgtggatgaggctctgcggctggtccaggccttccagttacacagacgagcatggggaagtttgtcccgctggcttggaagcctggcagtgacacgcattaagcccaaacgtggatgacagcaaggaatatttctccaaacacaattaggctggttaacgaatagtgagcttgtgcccctgccttaggtgctgtgcctggtgtcacctgtgcccccactggtgcctatgctgacccaggaagggcaactggcctccaatcacagttgggacctgggggtagggcagcatcaggccacggagagaggggccgccaaaggcgcatggaggaaaaggtgacaggaaagacaacaggggggaaacaacgggacaaaaagcgacagacgagcaagcgcaaaccggctggtggcgggcgacggcagagtc

SEQ ID NO: 12695 - DNA, 981 bp, Homo sapiens
  misc_feature 1, 981: n = A,T,C or G
nacgactcactatagggcgaatggcaactccgccctccaccgcggcggcggccgaggtacgcggggaagatgtagctgtgtagtctccttccatagctgctctaagggggctggcaacatggctcagcaggcttgccccagagccatggcaaagaatggacttgtaatttgcatcctggtgatcaccttactcctggaccagaccaccagccacacatccagattaaaagccaggaagcacagcaaacgtcgagtgagagacaaggatggagatctgaagactcaaattgaaaagctctggacagaagtcaatgccttgaaggaaattcaagccctgcagacagtctgtctccgaggcactaaagttcacaagaaatgctaccttgcttcagaaggtttgaagcatttccatgaggccaatgaagactgcatttccaaaggaggaatcctggttatccccaggaactccgacgaaatcaacgccctccaagactatggtaaaaggagcctgccaggtgtcaatgacttttggctgggcatcaatgacatggtcacggaaggcaagtttgttgacgtcaacggaatcgctatctccttcctcaactgggaccgtgcacagcctaacggtggcaagcgagaaaactgtgtcctgttctcccaatcagctcagggcaagtggagtgatgaggcctgtcgcagcagcaagagatacatatgcgagttcaccatccctcaataggtctttctccaatgtgtcctccaagcaagattcatcataacttataggttcatgatctctaagatcaagtaaaaatcataatttttacttattaaaaaattgcaacacaagatcaatgtctcatagcaatatgatagcatcagccaattttgctaacacatttctttgggatttttgcccttcctggggtataggggatcagaaaatattgaatccaatgtgcacgcagaataaaaatggcn

SEQ ID NO: 12696 - DNA, 669 bp, Homo sapiens
acgcgggatggaagttccagaaattccctagctcttaactcattttggataccccctcactcctgctttaaaaacccttgcttataagccagcagggagctcaggtgttaagtgctaggtacgcgggggcccctgtaacctgtcaaagaagagctaagggagctttcggggttggcttcttggaggctgctttctcctttacttggaaggcttcgctagtgatggacccatacatgattcagatgagcagcaaaggcaacctcccctcaattctggacgtgcatgtcaacgttggtgggagaagctctgtgccgggaaaaatgaaaggcagaaaggccaggtggtctgtgaggccctcagacatggccaagaaaactttcaaccccatccgagccattgtggacaacatgaaggtgaaaccaaatccaaacaaaaccatgatttccctgtccattggggaccctactgtgtttggaaacctgcctacagaccctgaagttacccaggcaatgaaagatgccctggactcgggcaaatataatggctatgccccatccatcggcttcctatccagtcgggaggagattgcttcttattaccactgtcctgaggcacccctagaagctaaggacgtcattctgacaagtggctgcagccaagctattgacc

SEQ ID NO: 12697 - DNA, 1075 bp, Homo sapiens
  misc_feature 1, 2, 3, 4, 5, 6, 7, 8, 9, 10, 11, 12, 13, 14, 15, 16, 17,18, 19, 20, 21, 22, 23, 24, 1074, 1075: n = A,T,C or G
nnnnnnnnnnnnnnnnnnnnnnnnaggctaggacgaggccggggttaatcggacgagggctgagtcctctgatcaccctgactggaaaaaccagtttctcttttatgtctgttactaatctctattctaaaaattcagctcaattctcaaccatactccaaactctctcttttccagctacctttactccctctccttcaattccactttcctctgcttactttttttttttttctgacagggtctcacttggtcgcccaggcaggagttgcaggggctcaatctggggctcactgcagcctcaacctcccagaggcggggtttcaccatgtgtggcccagacgggtcttgaactccgtgagcttaagcaatccaccgtgcctcggcctcccaaagtgtggggatcacaggcgtgagccaccgatccggcctcagtgttctttttcattaaagagagaaatcaactattcaggaccggcccccacctttcctcaggagtcatttctgttccgcacaggcctgctgaacggggtgcttatatataggacacggtcatctctcaagtacccatctgggagggtacggaccccacatgagggtgaggctctctgcacactccagaaaaggaccaaccacgccgagctcagttatggcacacacagtgggacctagacaaagggagagggtgaccgacatcccaactagatttcagtggagtgaagttcaggaggcatggagctgacaaccatgaggcctcggcagccaccgccaccaccgccgccgccaccaccgtagcaagccgagctgagcagcagcagcagcagataactctgacttaggaatagagacagccagagagaatgtgtcaagagggacatctggagggcgtgcttctcgaggacgggatggcaaattggaaaaagcaccgaatggaacttatcttctttctaaatgggctgaaatgggttccggactgtcacctcagtgtgttccgcacacaacacacccgctctcggcgacaagtgaagccagtcatgcgcccttgcagggacgccagagttacgcagatacgann

SEQ ID NO: 12698 - DNA, 1151 bp, Homo sapiens
  misc_feature 1147, 1148, 1149, 1150, 1151: n = A,T,C or G
gcccggcgggcattgacgtcaagcgccggcggagcgctgcctacagacggttgacccgggccctcctccacacccccttccttcttcgcctcctccctctttcctgcacgggggctcgggctcactataaaaggtgggagcgcgtggtgccccgggaacgaatttcagaacgatggagagctcccgcgtgaggctgctgcccctcctgggcgccgccctgctgctgatgctacctctgttgggtacccgtgcccaggaggacgccgagctccagccccgagccctggacatctactctgccgtggatgatgcctcccacgagaaggagctgatcgaagcgctgcaagaagtcttgaagaagctcaagagtaaacgtgttcccatctatgagaagaagtatggccaagtccccatgtgtgacgccggtgagcagtgtgcagtgaggaaaggggcaaggatcgggaagctgtgtgactgtccccgaggaacctcctgcaattccttcctcctgaagtgcttatgaaggggcgtccattctcctccatacatccccatccctctactttccccagaggaccacaccttcctccctggagtttggcttaagcaacagataaagtttttattttcctctgaagggaaagggctcttttcctgctgtttcaaaaataaaagaacacattagatgttactgtgtgaagaataatgccttgtatggtgttgatacgtgtgtgaagtattcttattttatttgtctgacaaactcttgtgtacctttgtgtaaagaagggaagctttgtttgaaaattgtatttttgtatgtggcatggcagaatgtagttagatctagctaatctcggtagatgtcattacaacctggaaaataaatcaccctaagtgacacaaattgaagcatgtacaaattatacataataaagtgtttttaataatcacacaaaaacacaacaaaaaaaaaaatttggggcggccttggagccggaagagttttaaaccctctgtgtggcgcgggcccctgggttatgggaactgtgcctacgggtccagaaaccgggcggaatggggggtttcacccataaacgccggggccgggttgaaaacgaggggtggggctgggtctaacgggccnnnnn

SEQ ID NO: 12699 - DNA, 810 bp, Homo sapiens
  misc_feature 1, 2, 3, 809, 810: n = A,T,C or G
nnnacgcgcccgctttgctgctctcctccctggtcgttaatatcagcacattgccgctgactgattgacttaggccatgcatgcagttggatcattctagcacatccaacatgtgttccttctatttccttctctgatcacatcattcttaggaaagacaggaatcagaaggcttgcaccatcactttctgttcccagggatttagtgacagttgagggatggtttccatcttgtagcgaaagagacctctgccttgagcagagacgaaagaggtacagcaccagccctctaaaccaatgctgcagccctgtgtcttttggcttcagggcagatgctgtgctgaatgtaaaagaaacgaaactcaacagtggtattgtgccaaacctttgaaataccataagcaaaaatagctgatctggctactctaaaagttgtgtatcttcctgtatcctgtcttgcctgctgcgtgtctcactgcacctgacgacttttctctgtcccttttcatgtatttaacaggacaagcatgagagctcagccaccagactgcccagttccagcccaggctctgtgtctcacttgctgtgtggccttgggtcagttacttgacccttccgtgcacatctccacatctataaaatggggagaaccaggccaggggcataggctcaaagcctataatcccagcactttgggaggccaaggcgggtgaatcaattgaggccgggagttcgagaccagcctggccaacatggcgaaaccctgtgtctactgaaaatacaaaaattagctgggcgtggtggtgcann

SEQ ID NO: 12700 - DNA, 1298 bp, Homo sapiens
  misc_feature 1, 2, 20, 29, 42, 99, 116, 1297, 1298: n = A,T,C or G
nnctgggactacaggtgcgnactacccangccccagcctaanttttgtaatttttagtagagaaggggtttcgcccatgttggacaggatggtctcganctcttgaccctcgtganctgcccacctcagcctcccaaagtgctgggattatacgcatgagacactgtgcccggccgtagttattactattgtcctttctgacctgacccttcaccccacctgtgcttcccttatacccttatatacttaatcattcctctctgacttgctaggattctttatatcaaagaccatgattcaagaagctgtttgtaaacataaagcactagtgaccctgtggtgttgttgctgttcttattgcagtggacggaaagtcccgggattctttgcgagccttcacccggacattcattgctgttcctgctagcaattcagggtaagtattctgcttttcgcattggacacctagtcctaatccatggccaacagtgtggtaattggagggtagagtcagtctttggggtgatttcagaaaggcaacaggaaatcagagaaagctcacatagtagttaagagccagttaatagcttggctctggaattgtaccgtctgggttttcatcctggctccaccacttctagcaagtaggctgctgcctcatctgaaaattcatataacaatattcattccctaagtttgttgtgaggatgaattaaaagagctaaagtccatgcgttgggagaaccctagtgtgtttagtagataatccttccaaacattgattccatgggaggggataaatgataaaaggtaacaatagctaagagtgggagggggaccttgtggatattgaaagaatcagagaataggaatgatgttgggaggatgatgttatctctgtctagctttttaagtgctctttgtcctcaaggctatgtattgtaaatgatgagctatttgtgcggaatgccagttctgaagagatccaaagagccttcgctatgcctgcacccacgccttcctccagcccggtgcccaccctctctccagagcagcaggaaatgttgcaagcattctctacccattctggcatgaacctcgagtggtcccagaagtgccttcaggacaacaactgggactacaccagatctgcccaggccttcactcatctcaaggccaagggcgagatcccagaagtggcattcatgaagtgatcgtagtcatgcctcagaagcagtcccccctgtaaatagtccttggatattaccgtctaggagcgtaatcggtaccgagctcnn

SEQ ID NO: 12701 - DNA, 1880 bp, Homo sapiens
  misc_feature 1, 2, 1874, 1875, 1876, 1877, 1878, 1879, 1880: n = A,T,C or G
nnctggtctgctgtgtcttcttttctttctgctgtgtgttctggctcgtgctctctttgtttctttcttctctcttctgcttcttcttttgttgtcgtcttccttctctgcggcttcgtctcttctttggctcttggtcgcttgcgctgtcctgctgtggttgtcttctttgctctactcggtggctgttctctcttcttttgtgtttggctgcttttcttttccttttctgtcttctctccctgcttctcttcttcttgccttctgttgtactgtgtgattctcctcttctgttttctgtctctcctgtcctttctccttctcgggtgtgtctgctttgtgtatccctctcttcttccgtcctcttcctcgctcttgctctttgctttcggcgtgcttctctctctttgcgtgtcgctctcgtgttcctgtttctgcttttctgttcgtctttgtttctttcgctctctcgcttcctctctgcctcggcctcctcttctccctcgctgtctctctccttccccgccttctgcctcatcccgtctcctccgctctgctcgtctcttctctttcctttctctccctgcgttcttgttttctgttctgctcgccctccttcgcctctctccttcttcctttcgtcctgcgtgcgttgtctcgctttctctgctcttctcgcctcctctgtctcttttcttcgcctctctcccgttgctcggtggtttttcgcgttcgctctttctctccctcgttttttgctccttgttgctcccctggtgcttttcgcttgcgccgccgtgtttcttctcgcgttgatttcttctgctttcctttcctgctctcttgtgtggtccctccgttgtcttgttccctgtctttctcttcgtcttgttttcgctttcctcctcttggctctgtgggaagaagagaaagaagagacggagagaatgattcctctgtctatactgtactgttggcgtggcactatcagctatcccccgcatttcatgtgcccgtacaggatctttcacctcgagacaccgctgtattgggcaggaagttcagtagcaagttctatcgtcactgggcacttgtatagtcgctgtgaagcatcaactgtcgacccggtccttgccccgctatatattcttttggtagtatctgttgtaagaccgttgcgttgttgttgttgctgaactgtttgtgttttctgatgagattgagtctcacctctgttgcccaggctggaatggagtggtgcgatctcagctcactgcaacctccgcctcccggttcaagcagttctcctgtctgagcctccagaggagtatctgggattacaggtgcgtggtaccacgcccagctaatttttttatgtttgtagtagagacgagtttcaccatgttggtcaggatggtctcaaactcctgacctcaggtgatctgcctgcttcggcctcccaaagtgctgagattagaggcatgagccaccatacctggctcttttgcttcatccatcccttaatttctttgctggagcattttaaagcaaatatcagacataccctttcacgcctcacacttcaacatgcggcttgttgaaattcgtgctccactccagcaactgctttcaatcggagttccatcctccgccgcagtatgccctaacgcagcgttatcttcagagctaccaccagcttccgaaacctttcggaggagcgcttcgccaccacctgcacggcgaagcggcgcgtaaacgaacctcgaacgccagcctttgcgcctgcgtgccgcggctccgtttggttccgcttcgctggcgcccgccgggctcttcccccgccgaggcctgtggtttgtggagtcgaatttccnnnnnnn

SEQ ID NO: 12702 - DNA, 462 bp, Homo sapiens
  misc_feature 462: n = A,T,C or G
accctatgccaggcaccatgggaggcactggggagataatgtgaacaacagacaaaaagctctgccctcatggaacttacattctggttgaggagatagattgcagatacttgaaaggcctagttgttaataatttatacctgctaaggagggaaaaattaagcaagaaagggtgatatgaactgtagggggtggggatgctgggatgttaggggaacagggagccctttgcgtaactctggaaggaaacaaagtcagccatgcaggaatgaaagaacatcacgttgggcagagaaaacagcaagtgcaaagaccctgcaagcaaagaagtagcctgactggaacagagcatgaggaggcaaagggtggaaacggggtcagagcggcagcagacagccagctcatacagggctttgcagatcagttaggactctgaccttggctctgaattaaagctggagn

SEQ ID NO: 12703 - DNA, 1750 bp, Homo sapiens
  misc_feature 1, 1748, 1749, 1750: n = A,T,C or G
ngcgtccggtagatgccaagcggacctcgcgccgctctgcgttgggccagcccctcacagctggtttcttaccacgtattgcgcaagcggaatctatgcctgttacccacactccctgcgcccccgcaccccgctcctgtgcgcaagtcggaatataaaaccgcggaggagtgagctcttggggtgtccagttggttgccgcggcagtctctccgagcagcgcatttgtcttctaggctgcttggttcgtgcctccgagaaaggggtctcctgctgccagctaagtgtgggagaacttgtgcacgtatctcccctccgaatcccaacgatgggtaacgccagctttggctccaaggaacagaagctgctgaagcggttgcggcttctgcccgccctgcttatcctccgcgccttcaagccccacaggaagatcagagattaccgcgtcgtggtagtcggcaccgctggtgtggggaaaagtacgctgctgcacaagtgggcgagcggcaacttccgtcatgagtacctgccgaccattgaaaatacctactgccagttgctgggctgcagccacggtgtgctttccctgcacatcaccgacagcaagagtggcgacggcaaccgcgctctgcagcgccacgttatagcccggggccacgccttcgtcctggtctactcagtcaccaagaaggaaaccctggaagagctgaaggccttctatgagctgatctgcaagatcaaaggtaacaacctgcataagttccccatcgtgctggtgggcaataaaagtgatgacacccaccgggaggtggccctgaatgatggtgccacctgtgcgatggagtggaattgcgccttcatggagatttcagccaagaccgatgtgaatgtgcaggagctgttccacatgctgctgaattacaagaaaaagcccaccaccggcctccaggagcccgagaagaaatcccagatgcccaacaccactgagaagctgcttgacaagtgcataatcatgtgagccctgggccttaagagccagctcttcctatcctgtagcgtgtagaaaacgtggactcatttcactatgttacatgtacatggttgattttgtgctgttgtttggactgtaacatccatgttgtcaatacgtataccttgtaagtggataacttttctttttcccaggccagagaattcaaattgttaaaacattggcatttgaagaggagaacaaaatgtagcatgatgtatttaaagtaaggcctttagtaatgaatgtaatgagagaaaatgttttgaaaagaacaaaacatcaaaatgaatagaaagaaaaattggaaggcgtccttttggtaacccgattattgtgtattacctttaaatatttcacatcctgtaagtgcttaatcatatcttttaattgtgtatttaagaaaagtgttttcacaacaaaagcttttgataaattgctgcgtgacatatactaaataaaaaaatgaatatgttgatcattaggggtgtgggagcagagaaaattgtgaaagtgactctcactaaagatgttagtagtttctcatgtcatttaaaaatgtttgagtattctgcatagcagtttgtaaaagtgtaacagcttattgacttaataaagcttttcctgcatgcaaaaaaaaaaaaaaaaaaaaaaaaaaaagggggacctcggccgaggtacagcagcagccccagagtcctaagcaacaacagtgacnnn

SEQ ID NO: 12704 - DNA, 341 bp, Homo sapiens
  misc_feature 1: n = A,T,C or G
ncatgtgggttagccatggaccttgccttcccttctcgtccttgagggtttagaacacacaccaacacctccagcgtccccgccccagcttccggtggggtgatgcggtcaccctgcaaaagacttgcactttcctcagaaccaacatgacgcagctcaataagggtgagggtcactccctcccagaagccccgtctggacgagccttgcctgacctcttcggtgctgaccttcccaaagtgatgccttactggttttgtacattactcttctcatttcaaggacatgaaaaagtaaaggatggtctggcactattttattttattttttttttgacttgt

SEQ ID NO: 12705 - DNA, 505 bp, Homo sapiens
  misc_feature 503, 504, 505: n = A,T,C or G
acaaggagtttgtaggagggaaggtggcagttaatgagccttcctggtgggaccggatggtgagggcaggggcatctggcccagcgtggactcgggccatagatgggaagtggtcatttggaggtcaccatctctctgacaccctgaccatagcacctgcacccctgtgctgagctgcaggtccccggcaccagcgtctgtgcagctcaggtgttgctgagccgtggcctccgcagctctccatcaggatttctcaagcttcattctgaattatctctgtgtgagctcacaacggtgactgcagagtcccaggtcatctctcagatcttctgaatcaaacatatggtctgcagttgccgcgcatgtctttggccgattttctgacaatcaaagtgaagaagttctgagctaccggaagttggggtgaaggcatgatggggaaaacatgattagttgacaacttttcccaaaaatttttagacaaaactaaaccttggtaaccnnn

SEQ ID NO: 12706 - DNA, 536 bp, Homo sapiens
  misc_feature 1, 2, 535, 536: n = A,T,C or G
nnatccctttccggactggatccttaagaggtgaattttcttccgtggattccgatttgctccgtctgaccagcctaggcaatccagcatcgcgtggtaccagtgccgctgggcacactggcttgacgccggctccacctcaccagcaagcgcattcccagaggagaaaatgagacactgggtgggactcagggattgctccaggccacacagtcagcaggaggcaaagcccagattcaaatgcagattactcagctccacaatccacatcctcacaggaggctgcactccttgcccaagcgtcagacaggagcaaagagaaagaaggcaaccagctggctactttcttcccttcttggatgcctccaacagggtgagaaggactaaacaaatgaccaagtgtcatcccattttggacatacttaaaacaccccatggaatttttattctgactttcttctgcctgtgtggcatttatgtttaaataaaagagaattcaactcgtgaaaaaaaaaaaaaaaaataaaaacaaggnn

SEQ ID NO: 12707 - DNA, 1411 bp, Homo sapiens
  misc_feature 1, 2, 3, 4, 5, 6, 7, 8, 9, 10, 11, 12, 13, 15, 16, 17, 21,31, 35, 37, 38, 39, 40, 44, 45, 51, 54, 55, 56, 59, 60,63, 64, 66, 69, 72, 77, 78, 88, 92, 96, 99, 110, 114, 116,120, 121, 123, 125, 127, 135, 138, 139, 149, 155, 158: n = A,T,C or G
nnnnnnnnnnnnnannntaanttgaacaaancccngnnnnatanntaatcncannngtnncanncnatnatnaaatnntttaacccangccntttnaanaaattccttgncccntngacnncntntnaatgggcngtnnggttaggccntaaaangtncaaaccgctaacgttaaatctccaaaacgagcgtggggccgggtgctagagtcatagcgggcacttctgtgtcgtccgttgtcatcgcagtgtctgctctgcgggtgctggggccatgctctgcatccagtctaggtggctcctagcggggcttggtgggttctccatcctcagcaccatctgcagcaccatcttggtcatctgagaagctgagagaaacacaaggtaaatgttcctgtcctcatttctgcctcccaaccccactgctgctgctcaatgtccccagtatctctctgcagactcctgtgtgccctcaaaagtctacacggtaccagtcaagagacatccatactgcaagatgatagaaaggtaagtggaacccaaccacctcattctctaccctcatgtctaccacggacagctgaacctctccctgtggaacctggaaaagtagctcagagaggagtagcaggtggcaaggaacatcagggaaacaaagctagaaggagcatgtaggcacctttgacctgaaatagacaagatgcaagatctcaggattgtcagggaccttaggaaccatctaggccacatcccggctttggcctgcagtgcaggcaaagggtttgcctctgccagccatcgcatccagctttgctgtaggtggaatcgggcctgtatgtgagttaccagggttgcagaggacactgtggtctgggtggcagtctggtgccacatggcagaattcatcacagtagcaacttcccctcttgcagcggtgatccgtcccaagacagcaaaggttctggggttgggagcagctgcctggcgtcaaaggaacactcagccacagcaggaggaggaggaccagccacgtggcagcaggcatcaagcagagatagaagtgctgcagcgtccaaggcctggtctttaaatatccacccatcccagccagcccacctggttcctccctactcctggggaggaaccagcagacacctgggcagtcactggcagacagcaggagtgacacaggtatcccagctgcttgaaatagctcacccaagcagaggtaattttgacatcctggaaactccagcctccaggggaagaatctgaaaaaccagagtgacaaaatgacagcgctcacaggaactttgcagattatctaatctttttatttattttattttattttttgagacagagtctcactctatcgcccaggctggagtgcagtggcacacacctgtggt

SEQ ID NO: 12708 - DNA, 1616 bp, Homo sapiens
  misc_feature 1, 1545, 1546, 1547, 1548, 1549, 1550, 1551, 1552, 1553,1554, 1555, 1556, 1557, 1558, 1559, 1560, 1561, 1562, 1563,1564, 1565, 1566, 1567, 1568, 1569, 1570, 1571, 1590, 1591,1592, 1593, 1594, 1595, 1596, 1597, 1598, 1599, 1600: n = A,T,C or G
  misc_feature 1601, 1602, 1603, 1604, 1605, 1606, 1607, 1608, 1609, 1610,1611, 1612, 1613, 1614, 1615, 1616: n = A,T,C or G
nctctcattaccttctgcccatcacttaataaatagccagccaattcatcaacattctggtacactgttggagagatgagacagtcacaccagctgcccctagtggggctcttactgttttcttttattccaagccaactatgcgagatttgtgaggtaagtgaagaaaactacatccgcctaaaacctctgttgaatacaatgatccagtcaaactataacaggggaaccagcgctgtcaatgttgtgttgtccctcaaacttgttggaatccagatccaaaccctgatgcaaaagatgatccaacaaatcaaatacaatgtgaaaagcagattgtcagatgtaagctcgggagagcttgccttgattatactggctttgggagtatgtcgtaacgctgaggaaaacttaatatatgattaccacctgatcgacaagctagaaaataaattccaagcagaaattgaaaatatggaagcacacaatggcactcccctgactaactactaccagctcagcctggacgttttggccttgtgtctgttcaatgggaactactcaaccgccgaagttgtcaaccacttcactcctgaaaataaaaactattattttggtagccagttctcagtagatactggtgcaatggctgtcctggctctgacctgtgtgaagaagagtctaataaatgggcagatcaaagcagatgaaggcagtttaaagaacatcagtatttatacaaagtcactggtagaaaagattctgtctgagaaaaaagaaaatggtctcattggaaacacatttagcacaggagaagccatgcaggccctctttgtatcatcagactattataatgaaaatgactggaattgccaacaaactctgaatacagtgctcacggaaatttctcaaggagcattcagcaatccaaacgctgcagcccaggtcttacctgccctgatgggaaagaccttcttggatattaacaaagactcttcttgcgtctctgcttcaggtaacttcaacatctccgctgatgagcctataactgtgacacctcctgactcacaatcatatatctccgtcaattactctgtgagaatcaatgaaacatatttcaccaatgtcactgtgctaaatggttctgtcttcctcagtgtgatggagaaagcccagaaaatgaatgatactatatttggtttcacaatggaggagcgctcatgggggccctatatcacctgtattcagggcctatgtgccaacaataatgacagaacctactgggaacttctgagtggaggcgaaccactgagccaaggagctggtagttacgttgtccgcaatggagaaaacttggaggttcgctggagcaaatactaataagcccaaactttcctcagctgcataaaatccatttgcagtggagttccatgtttattgtccttatgccttcttcttcatttatcccagtacgagcaggagagttaataacctccccttctctctctacatgttcaataaaagttgttgaaagattaacaactacannnnnnnnnnnnnnnnnnnnnnnnnnnttaaataagaaagaaggcnnnnnnnnnnnnnnnnnnnnnnnnnnn

SEQ ID NO: 12709 - DNA, 508 bp, Homo sapiens
  misc_feature 501, 502, 503, 504, 505, 506, 507, 508: n = A,T,C or G
acgcgggaagtgagttaagtccagcaataactatatctctgcatatttcgggccaggaacagctgaggtgaaccaggataactgaattccctccctgtggctggctttatttggttactgtgaaagggacctatttccagcccagtgagggcactggggctgaagagtgttctctagaaccccagccagtcctcaagtttcatctctcacctgtcctgtaggtgaggagcctgagtgcaacgacatcactgccaggctgcagtatgtcaaggtgggaagctgtaagtctgaagtagaggtggatatccactactgccaggtaagggctctgcttcaataagggctgggtgtggagggctgagcctccgtgttcggatacctatccttagttgcattctagaaagatctggaaaattcgcagggaaaaaaagggaaataaactggaagcatttttttttaagcaaatgttgtattgaagtaactggaaatttttgactccannnnnnnn

SEQ ID NO: 12710 - DNA, 668 bp, Homo sapiens
actattacagtcattacctttaaaattatagcagcatgcccaacaagacacagtggaggcaaagggtcgttggacagaactcagctgaatgccaatgttagttttgtttccttaacgtgtagtatcggttccaaatggaattgaatcatcaagtatgcttacctggtttattatgccaagtaacaagattggccaatccttcttatttattgttcagaaactatagaagaaagcagccaacaaatgatgatggtttttcagtgactcatgcctcctttgattagaatccaatgtagcctactccttatcctggcatcattactagatattgccttttattttgactaatggagcacatgaatggatagattttaaagaaatgcctaggctgggcgcagcagttcgcgcctgtaatcccagcactttgggaggccaaggcaggcggatcacctgaagtcgggagtttgagaccagcctgatcaatatggaaaaacgccgtctctactaaaaatgcaaaattagccgggtgtggtggcacatgtctgtaatctcagctacttgggaggctgaggcaggagaattgcttgaacccaggaggtggaggttgcagtgagctgagaatgcaccattgcactccagcctgggcaacaagagcgaaactccatttc

SEQ ID NO: 12711 - DNA, 5816 bp, Homo sapiens
  misc_feature 1, 2, 3, 4, 5, 6, 7, 8, 9, 10, 11, 12, 13, 14, 15, 16, 17,18, 19, 20, 21, 22, 23, 24, 25, 26, 27, 28, 29, 30, 31,5815, 5816: n = A,T,C or G
nnnnnnnnnnnnnnnnnnnnnnnnnnnnnnncagagggcatggcgacgggtcgggacaccagtgaaacttgaaccgggaagcgggaggacgtagagcagagaagagaacatttttaaaaggaagggattaaagagggtgggaaatctatggtttttattttaaaaaagaaaaaggaaaaaaaaaaagtcaataacaaaaaacccagctcaagaacccattctacgccaaactggaaaggagaagagagcaacaggaagattccagaaacggggggccccagtttttgaagaactttatgaacttttcaaagattattttcatatggcagcaagtgatacggaagactgctgtcagggacacctgatatggaaatcaaatagatttttaattaattgaacataagatttagggatttttccagaactcgaaagggtcaacagccctccagaatgtcgggctgcagcctgaggaggctgatgtttggagctggtgtgggattggcgaagcccagtccgggctccctagtcaggaaagacgggggacggccaggctgctggaaggcccccgggggcgcggggcgagttttctttttctgagcactctggataaatccctaagcaacgttgtttctcaaatgtcattaataatgtgtgttgcaaactttaggtttttttcttttctgaaaatgtattttctctttgaatccacccctagtcgcgtagcgtagggctagcggtcgtcacagacaccctagtagaatgtagcactcagcacccttgtctcctaccttgtgttcaactccaatgataccaatagaatattcctcaatgtaattgcacaaaaaaaagcgatataacataggcatgtaaccaatgtggcggtgcaggtgtgcgggtgagcgagcacgtgtgggtgtgcacgcgccgccctccccgcgtggccctcggcgccgccaccctagctggcgcagtcttgacactgcatccttccctcctagtgccttaccgagcgacagacgcggcgtgagggtttacttccactggtactccaagaaactgaggctagtcagacacaatctcagctcttctgttgtgctgttgtaacagtttacgctggccttttttttttctttttctttttctttttaaaatgttaatgcccgttgtctttcctgggctgtttgctagcggaaggatgccagggaagccagcaggagctaggagagagtccgtggatctcgaaagaaatatgggagacagatgcccggcgggtgcgtctggagatggggacggcgggagttgagttgtggcagtagttgagttgtaatttgtgggcggaggcccagagagactccccacccttcacccctgccccactctgtccccagttccgccatttgtgaggccagaggtttccggactgttggcctcgccaggcagccgtctcccgccccaggcggcatcccccagtccctcccgcctccacgagagcctggagctctcagcctcgcccggggctccactctctcctccggctccctgggctgttttgctctaacgatcttgccagatccctccctctgtagacaaccaccaacctctgtttgctgttgaattctctcctcacattacccaggtctgctcaagacatgattttggttttggtttctgagggttctagtgggcagaaggttggagggacacttatgagggtggccgggggtctgacgctgcactttggaaaaactcacacagttgaatttccaaagaaatctgccctttgccctctttgcacctttgatacattctggaagttttctcaggctttggacacttctggggatggaggtgtggagaagtggggagttccctctcttcatagtaaataactctgaaatatgtgaatgtgaatggcaggagaatctggccaaggatggggccgaaaagggtggttctaattgtttgcttctgatgttgagtctttagctgaccccacaggcaggtttccaaggtgcaaagagatctttcccgagtcagcggccccatcctcatcctccctccctttacttcctcactgtgcagtctccctcaaggatctactgtgaaaggtgtgtttgtagtgatatccaacctaactcagtaacgaagtcgttacttagctcttagctgtgaaataactctggaaacttccccaccccaaccataaattcttacttataaagaaacaggtccccaaactggaaacagcttagtccaggcctcagcgagaaggaaggacaccatgactgctccatgctgggcacagccgggcagtcttgccaagtgcctgctggaggctgtgccggcaagaggcctgcagcaaggagattcccttccctcgggccattatcaatactgtctttatctggaggtggggaagcgcagccctctgagacagcaggacaatggtcagttcagagagggtgagggcagcaaacgcttcagaggacacagaagccagaggacccccccccgccccacagctgggtcagcctggaaaatccatctattagggactttttggcagccagatggcagcaatagcccattaggtctcatcccgagttccaagtcttggctgcaaatgagcctcagttcgccttactggagagcacccccagattcctgggcacagttcatttccagccctttctagatctgatcttttagggggaaagacagcttaaaatgttcttttcattttaaagaaaattattctgtctgcttaagttggaggctacttactctttcacctgacattttctttccttttattcttccagatcaggaatgaaatttccatgctgctcataaagataatattattgtactaattatttttattaccattgtaattatgatcattatgttgatattttagtcagggttttaaatgcacatttattccaagtatctttgtgttttctctttaatatttaaacttattctctctgtgagtatataagtagactggagggacatccagatgtccagttttgtcaggcaaaaaaaaaaaggaaagacttaggaagtaggaaaattgtttctgtcatctctatcccaacaagagacgtcaagaaagatccaccacagaacaaaagtttaaagaagaatcaaagccttgattgggcttctgacaacatggtcaccatcaaggttgtcattttctagatcccagaggcctgggatgcgacgtcaggtggcatctcatgggctcggggaatgtcgagtcactgactgtccagcccttagccagcttctctcccacatcctcagagctctcctgtgcttctgaaatctgttaactaaatctttggcttgcctctggtatttaagcaagaaaattccctcccagaggtgaccccatccgcttccccacaatccatccttttgccatcggcgcacctggggcgtggcttaggttcttcaatgcagggacatttgccccctcccagaagctgctgggcacagtgaggtggcgtaagagtgactggcaggtggtaccttccccaggaaatttcaccacaccacccagttcctcagcctgccccctccccctgtgatgcatgcccccagcacccaattctagccagctggaagtgggtggagggacagcaggaggccagagaaaccctgaacaaagctgggcggctgctcaggcatcacaggctgcaccccctctgaaagcatccccactgggctccggccacatcttcagtgcactgtgctgtgtgcgctgggtgctcacacgctgtccccagacccacaaagtgctaggccccagttgaagaaaggggtgaaatagccagcttcaccgaagggaagggaagggaagtattgggcgatgccagccccacagacgctcagcaaacattagtgcacattctcctagtcctcacccaatggcctcctctacccccatgcatggagctgccacatcagaagccccaagagaagctccctgcaggagaggccagctccctggatgcccaattgcatacctggccgaatctgccattgagtcaccttagcaaataggctgctgtcactaggaccaagctctcaagcagagggatgccaacctagtccttacttagcccacgaatcatctagagcatcctctagtcttttgtgggctccctccttcccatttgaagagacattgttcagaggaagaggggaagatttgaaatgtcaggtcacggaggagtgtttaactggagcctggtgaaccgcagggcaatttgcttctgctcactgggttctgactggcccgtctggacgtgggcccccatgtctctgtgcttagggcctcttcatgatgttttggatgtttccaagggaagtgggtgagcagatcaaggggtgggagagtcgaggcttgatgccagttaatactgtgaagtggagcgtgcggtcagtggaattcagaggaaaaagaagggttggagcaaagcggcattcatctcctggactgttagcctttctagtcttcctggtggctgaggtgttcacgggctgggggagccagctgacctttgtcctcttcaacctagaagactcagcccgcccagacaccaacgtgtgagacggatggacatcaggaagggaaggggagattagcccaactgctgacagaacgatttcccttggttggaccttgggaatggcaaacactcatattggaacaagcttggggtggaagattgaggccgtgtgagcgtgtgtgagtgagtggaacaaactttcttggaaactggagggaggagatgaggaggcttcgggaagtattactgatggctcatggttgagagagcgacgtggggacccagctcgccccagcttttgtcccaggttctctttgtctgatgctgagggcagggtggggtgtgggaccaccactcttgttggcctgtcaagtagaccctaggacagaaaatggaaagaaggaaatggctcggtgctctcaactagcagagagaattgaggagaggtaagggttccttctgcaggccagcctgggactccacagcgccagcaggagtgacttggccacaagacattccagccccagggactttgcaggcttcattccctgtctgtgtcttttccttctggtgtgttttacagacttctgatggggaagcttcaaacttgagcaggccagagatgtccttaccaaattggaaaggaaggtgaaactgttcctttctttagccaaagaacccttctcaaagacgcctccagaaatggacaaaatggccttcccttcgttcctttccaggcaataatgacatcattagtgatgcaattctatttgtctttctctttcctctctgtccttttttttaacacaacacattgcttttattcaaaaactgtgctatacgcttacacagaatggaaggtagaccattcagagcagagagaatcggaggatggggaatccatataggtggcatgactaaaacccggacacctgggaacgaacaacgcagtggacgcagagaaagcaatgaaccaggggatcaagacccgcgagggagcgggacggaataaacacaatcaaccgagcgccgctagaacccacaatctcagcaacaacaccacagacgcacaacctgcccacaaacagggagggatacaagcacatgcagaacaccacgaacgcgagccggcagcaaagcaagagcacaaagacaatgcagacacagatcacacacagaccagacagtatggagccaacaaagacacagcgccaccgaggacagcagann

SEQ ID NO: 12712 - DNA, 497 bp, Homo sapiens
  misc_feature 1, 2: n = A,T,C or G
nncaagagtggcgacggcaaccgcgttttgcagcgccacgttatagcccggggccacgccttcgtcctggtctactcagtcaccaagaaggaaaccctgaaagagctgaaggccttttatgagctgatctgcaagatcaaaggtaacaacctgcataagttccccatcgtgctggtgcgcaatataaggtgtgtcacccacccgcaggtgcacacacacaacggcgcaacctgtttattttatttattttgttaagagacagggcatctctctgttgcccaatctgtagtgcagtgccaagttcccggctctgtgcagccttgaactcctgggtttgtgtaatcctcccatcccagctactcggaaggctgaggcaggacaatggtgtgggccaggtaggcgaagctttcattgagttaagatcgcaccattggactccagcctgggtgacagagagagactctgtctccccaaaaaaaaaaaaaaaaaaaaaaagt

SEQ ID NO: 12713 - DNA, 730 bp, Homo sapiens
  misc_feature 1, 725, 726, 727, 728, 729, 730: n = A,T,C or G
nccatagtccttaactattacacaacttcaaccaacctttctacagggtcttccctctgtcagtattacagaggcccatccattccctagtttcttgttttcatcaaccttaattaggctaatctggtgttcagcacatgggcctccaccaacttcacacacacacacacgcgctcatcacagttggatacaggcacacaaagatgggcttggtacttgtctaaggctctggcggctccgcgaatctcatgtgctgggccatcatggacgagagtggtcttcagcaccgcttgtaaagcagtgttaacaaccatcacaccgccagcagcaatgccctcctcagccaccaaggcaggccacaggtaacgagtgatgccccatcttgaacgcacccaagcctccgcctccataactcaacagcagcagggaaaaagcatggtctcaattctcttgacaaatctcagaggtattatactcttattccaactacatctccctccccaaagaagcgcacacaaaacaattttaaaacttatgttttctacggaaaccttacctcaaagtgatgcacaaaactgaaatttatatggctgcttaaatgtcacatcctggctcctagcagggaaacaaaacgctctgaagagaggatggttcctgcttgagggggaaaaagtctgtctttcttagcagtgctccttcccacaataaacaaatgatccaggaannnnnn

SEQ ID NO: 12714 - DNA, 1964 bp, Homo sapiens
  misc_feature 1, 2, 3, 4, 5, 1901, 1913, 1915, 1958, 1959, 1960, 1961,1962, 1963, 1964: n = A,T,C or G
nnnnnagtccctctggggcccccgggttgcctctaatgttccgggtcgtatgtgttggactggtagggaattcaatttcaccagcatcagcattaccatgtttccgccaggcttggtacgcgggggcctgcgccctctcctataaagcagacgccgcgccgcgctgcgacgctgtagtggcttcgtcttcggtttttctcttccttcgctaacgcctcccggctctcgtcagcctcccgccggccgtctccttaacaccgaacaccatgccttcaattaagttgcagagttctgatggagagatatttgaagttgatgtggaaattgccaaacaatctgtgactattaagaccatgttggaagatttgggaatggatgatgaaggagatgatgacccagttcctctaccaaatgtgaatgcagcaatattaaaaaaggtcattcagtggtgcacccaccacaaggatgaccctcctcctcctgaagatgatgagaacaaagaaaagcgaacagatgatatccctgtttgggaccaagaattcctgaaagttgaccaaggaacactttttgaactcattctggctgcaaactacttagacatcaaaggtttgcttgatgttacatgcaagactgttgccaatatgatcaaggggaaaactcctgaggagattcgcaagaccttcaatatcaaaaatgactttactgaagaggaggaagcccaggtacgcaaagagaaccagtggtgtgaagagaagtgaaatgttgtgcctgacactgtaacactgtaaggattgttccaaatactagttgcactgctctgtttataattgttaatattagacaaacagtagacaaatgcagcagcaagtcaattgtattagcagaatattgtcctcattgcatgtgtagtttgagcacagatcccaaaccttacggccaagtttcttctagtatgatggaaagtttcttttttctttgctctgaataaaactgaactgtgggttctctataagtggcattttgggctttccctcttttttgtaaagcaatgtctgcctagtttattgtccagttaactttagtgaccttttaaaagttggcattgtaaataaaacaacttgcaaaaaagttttctggaatagaattaacaaaatattatctttattcatgagttggaaactggaaaaaggcttcttgaagtaaatgttctgagtggagctactaggatgtcttccagcctcctgcagtcaaggagtaccactgtattgattagcctgtatgtagcagggctcccttcattgcatctgaggacttgttttctttttctttatttttaatcctcttagttttaaatatattgcctagagactcagttactacccagtttgtggttttttgggagaaatgtaactggacagttagcttttcaattaaaaagacacttaacccatgtgggatgtcatctttttataattagtgttcccatgtggagaaaattattcacactacttgcatgtaaagaataatttaacttttaacattaaaatatgtggtaaaacccagaaagcatccatcatgaatgcaagatactttcaataaaaagtaagttatatagtaggtagttaagtttgcttttgtggacttaaatgtgtctcttcacttaaatgggttgaatgtgtatatatttgttcagcttgaaaagacttagtttatatcctagctcactggaggctgctgacataaccataacttctggcccttctaattgtcatttatatgcctaactggaactagtacctggggccgcaacaccttagggcaaatccaacccactgcggccgtactaggggacccaactcgaccaaacttgggtaacatgggcataacgtgggcgcggaaanaaaaaaaaaaananagagggaaaaggaagaggaaaaagcggaaattttggatgaaannnnnnn

SEQ ID NO: 12715 - DNA, 667 bp, Homo sapiens
  misc_feature 654, 655, 656, 657, 658, 659, 660, 661, 662, 663, 664, 665,666, 667: n = A,T,C or G
gccgcccgggcaggtacagagcatagtgaagcatgatgggtggtagtattaggagaaaaacatcagtcaaattaaatttagcagagtttatttgagcaaagaagtgactcatgaatcggacaactccctaaaccaggagagacaccacacggcagtatgggcaagcagtattcacaggcagaaaaaggaggtgacatacagaaacagcctggctggccacagatcacagcttgccttacttggtcacagtctgaggagctagcagcctgtggtggactgaaagcccagctgctctgattagccaacatttggctacttgtcgcaagaatctattcatctgggccgggtgcagtggctcacgcctgtaatcccagcactttgggaggccaaggcggtggatcgcctgaggtcgggagtttgagaccagcctcgccatcatggggaaactgtgtctctattaaaaatacaaaaattagctgggcatggtggtgtgtgcctgtagtcccagctacccgggaggctgaggcaggagaatcacttgaatccgggaggcgaaggttgcagtgagcagagatggtgccactgcactccagcctgggcgacagagccccagtccatcttactttacccacatcaaatgctagaagtgcctcnnnnnnnnnnnnnn

SEQ ID NO: 12716 - DNA, 3841 bp, Homo sapiens
atgaactacgtgaaactgtaaaaaaatgattgaatatctccatttttatatggttcaacctaatagaatgtgagagggctcatatttgaacccaggccaatttagttcaaaagcctatactttgcattgtacctgcccgggcggccgaggtacgcgggggacctcattcatttctaccggtctctagtagtgcagcttcggctggtgtcatcggtgtccttcctccgctgccgcccccgcaaggcttcgccgtcatcgaggccatttccagcgacttgtcgcacgcttttctatatacttcgttccccgccaaccgcaaccattgacgccatgtcgggttattcgagtgaccgagaccgcggccgggaccgagggtttggtgcacctcgatttggaggaagtagggcagggcccttatctggaaagaagtttggaaaccctggggagaaattagttaaaaagaagtggaatcttgatgagctgcctaaatttgagaagaatttttatcaagagcaccctgatttggctaggcgcacagcacaagaggtggaaacatacagaagaagcaaggaaattacagttagaggtcacaactgcccgaagccagttctaaatttttatgaagccaatttccctgcaaatgtcatggatgttattgcaagacagaatttcactgaacccactgctattcaagctcagggatggccagttgctctaagtggattggatatggttggagtggcacagactggatctgggaaaacattgtcttatttgcttcctgccattgtccacatcaatcatcagccattcctagagagaggcgatgggcctatttgtttggtgctggcaccaactcgggaactggcccaacaggtgcagcaagtagctgctgaatattgtagagcatgtcgcttgaagtctacttgtatctacggtggtgctcctaagggaccacaaatacgtgatttggagagaggtgtggaaatctgtattgcaacacctggaagactgattgactttttagagtgtggaaaaaccaatctgagaagaacaacctaccttgtccttgatgaagcagatagaatgcttgatatgggctttgaaccccaaataaggaagattgtggatcaaataagacctgataggcaaactctaatgtggagtgcgacttggccaaaagaagtaagacagcttgctgaagatttcctgaaagactatattcatataaacattggtgcacttgaactgagtgcaaaccacaacattcttcagattgtggatgtgtgtcatgacgtagaaaaggatgaaaaacttattcgtctaatggaagagatcatgagtgagaaggagaataaaaccattgtttttgtggaaaccaaaagaagatgtgatgagcttaccagaaaaatgaggagagatgggtggcctgccatgggtatccatggtgacaagagtcaacaagagcgtgactgggttctaaatgaattcaaacatggaaaagctcctattctgattgctacagatgtggcctccagagggctagatgtggaagatgtgaaatttgtcatcaattatgactaccctaactcctcagaggattatattcatcgaattggaagaactgctcgcagtaccaaaacaggcacagcatacactttctttacacctaataacataaagcaagtgagcgaccttatctctgtgcttcgtgaagctaatcaagcaattaatcccaagttgcttcagttggtcgaagacagaggttcaggtcgttccaggggtagaggaggcatgaaggatgaccgtcgggacagatactctgcgggcaaaaggggtggatttaatacctttagagacagggaaaattatgacagaggttactctagcctgcttaaaagagattttggggcaaaaactcagaatggtgtttacagtgctgcaaattacaccaatgggagctttggaagtaattttgtgtctgctggtatacagaccagttttaggactggtaatccaacagggacttaccagaatggttatgatagcactcagcaatacggaagtaatgttccaaatatgcacaatggtatgaaccaacaggcatatgcatatcctgctactgcagctgcacctatgattggttatccaatgccaacaggatattcccaataagactttagaagtatatgtaaatgtctgtttttcataattgctctttatattgtgtgttatctgacaagatagttatttaagaaacatgggaattgcagaaatgactgcagtgcagcagtaattatggtgcactttttcgctatttaagttggatatttctctacattcctgaaacaatttttaggttttttttgtactagaaaatgcaggcagtgttttcacaaaagtaaatgtacagtgatttgaaatacaataaatgaaggcaatgcatggccttccaataaaaaatatttgaagactgaattaagtggaaattgtactttattttatataatgtcatgtaaaactttgcttaagatggtctggttttttttttgtttttgtttggttttttttttccatgaaaacaaatgactgttcctttttatttaatttgggaggcagggggaatcagaaggcccttctttataatgagctattcatattgcaggagtcagaatgaattgatacaggtgaatttttagttacaggctaaattgcataaaagctttgtcagcttccagcatcaggggagtcatttaatagcctttttccttatttgctagtatggttaaatgagaaaatagtaaaatagatacaaagtcatctatatagtgtgagaacgtgggtgactttttcaaagtttataatttaaaaagctccaaataactggctttttcaagagacttatactcatgctcttggctatactgtgaattactgaaatgttgaacaaacctgtgaaagacatacatgagccctttaagatggccaggagctaagcttgagtctcctttactgaatttcgttcttagtgcaggttacttgtagattctagtcttcacaggctccctggggctcttaactagtcacactgggagtcatgaatgtctttccaataattcagggaattctagagatcctcaaactgtaaggtctattcatactcaacacaaggaaaaaacctcattaaaattaatgactaatcaggaggcaacgtaaccaaaagcacagtgaatgaaagttttcatggtaggttcaacatgggtttattgctagaaagatccaggggatagctttaggtttaacttcggctcaccaacgtaactttctaatcatttatttcagtaatagctagaagtgggtctgaatgttttcccagagtctgatacgtgtttttttttgccagaagagaggtcttcaggagacttcatttaaattctgattattaaactgaggctttaattgatgttaatgccttatgtcaaatgtaaagttagaatttgctagggctgggatagggagtgatatttctaggacttagacattgaaaactaattcagcctgtagtaacctggatggttttcaatggcatggttagtcaaattcatggttttaaacttagaagcagctttcgggggagagggtaggttggagcatttattacatattttactgtttaatgtcttaaccgtgggccttttaatttgtaaacactgaaatgattgttgggctgtggaaaacatttacctatttaccttggaagttttaaaagacagtccactttttagcatgtgtgttgtgtccagcctgtggtcgtcttaactaataaatgtgatttttctcc

SEQ ID NO: 12717 - DNA, 317 bp, Homo sapiens
acgcgggattgtattgtgtttgtgataattgctaggagtagattttaggtgctcttaccacatacaaaaaagggggggtaactatgtgtgatgatacgttttatttgcttgactataagaaccatttcactgcatatcaaaatattatgtggtatgccttgcatacataaaataaaaatacaatagcccttttagtttaattttagtaatacaatctgataaaataaagataaaattaatatgtaagaataatagtaaactggctgagccacctcgcccagcggcatcaggctttcttaaagtgagagcacgcctgt

SEQ ID NO: 12718 - DNA, 501 bp, Homo sapiens
  misc_feature 466, 490, 491, 492, 493, 494, 495, 496, 497, 498, 499, 500,501: n = A,T,C or G
aataaaaacagaataatgcctcaaatactcaaaaggaaaatgattgccaacctagaatttgtattcagctaatttctgaatgacataaggattaaaaaacaaagataaataaaagtatttcaaaaaacacacggtttcaaaattcttccactcatacaacttgtggttcatcaaactaagggaataaatcaagaatgaagatagcatgagattcagaaattggaggattcagtgcagaagagaggcaaaggtaatcccagaacaatgaagttgaagaaagggataacacctgaataccagtcccatacagcagccagtcctgagttttggaggagaagggaggattccaggggaaggtctttcagagaaaaaagataagttgcaataatggattatcctatatgttctattgtagagagttatagaagaattaatgacaagaacacagaaaattgtgtcagttttncttgaagaggtgactcaattatannnnnnnnnnnn

SEQ ID NO: 12719 - DNA, 475 bp, Homo sapiens
  misc_feature 474, 475: n = A,T,C or G
acgcgggactgtctcttttccagagctcctgagttcatactcatagggtgacagagtgggactctgtctcaaaaaaaaaaaaaaatcagcatttccttctctgcaccagaattgaggcgcacaatgcttcagtttctaggtaactacaattatcctgccagactaatacgatgacgggagtgctagtggagacctcctggagacagctgagggtcataggtcaggattgagtttgacagcagggaaaacagcctgatacggtttggctctgtgtccccacccaaatctcatgacgaatcgtaatccccagtgttggaggaggggcccggtggaaggcgactgggtcatgggagcggattttccctttgctgttctcatgatagagttttcacaagatctggttgttaaaagtgtgtagcagctccccacactcttcctcctgctccggccacgtaagacacgctggctttcccnn

SEQ ID NO: 12720 - DNA, 999 bp, Homo sapiens
cgatctttacacgcattcttggtgttatctgaagacactctgatgccaccacccaaagcaactggcagttgactcttggcaattttaagcttgtgtggaaagcagccgccgcccggtagctcctttttatctagagacactcaggatgtgggggacaccccagcaatgccatccctcctttgacctccagagcgcgcagaattataaagttgagtaatactttatttgaaaaaatgaaaagtgcacacacacacacacacacacacttacataggcacaggataatctggaagtatgaccagcaaatgataactgattccctcaggggagaagaaactgggtggctgaaggacaggaatgagaaagaaggacagttgcaaatgtttgaagaaccattggctcccttatcaaaatgtaaataccaaggaaaatcaggaatttaagaagtctaagaattctgtaatgctgggtagaattttctgtacgtgtaaaactaaaatgtcttttgtaaatcactgagtcttcctgtttatttctggttagagatctttgggggcttggatggaggaacaggaaaagaggagccaggcttttttggaaaattggcggcagcggtggcatacgggaaactgaaatctttatctaatctcatcctttgtatattcgtcttggatttgctgaagaaaattaaaaggtaaattttgctgtgagctcactgaactcaaattgaaagggaacatatgctgtttatttttgtgaaggacattaattgggtgtgactggcagggttgagacctgaagttcctcttttagataaggaaaatttcccttggtcccgcgtacgactgtctaatatcctgctggacatttaggtaggacctacagcttgtccgagagagtaactcatttgttttctctgagacaatctgtaatttgtcttgtcctattatccttaagtaaggtaatttcgctctttcttttcccatatacagattatgt

SEQ ID NO: 12721 - DNA, 1029 bp, Homo sapiens
  misc_feature 1, 988, 1025, 1026, 1027, 1028, 1029: n = A,T,C or G
naatcctcagccagtgccagccatgctttatattggggggtgtaactccacatgtatgccctttggtctttttatctcctgattagcatgaagtcacatgtgacacaaacagtatcccatgtctcctcaggtcgggctcccgctcccggagcaagagccggagccggagccagagtcggagccggagcaagaaagagaaaagcaggagccccagcaaggacaagagccgcagccgcagccatagcgctggcaagagccgcagcaagagcaaagaccaagctgaagagaagatccaaaacaatgacaatgtcgggaaacccaagagccggagtcctagcaggcatgtaagagcgtgagcaggggcaggagccaggagaagagcctccgccagagtcggagccggagcaggagcaaagggggcagcaggagccggagcaggagccgcagcaagagcaaggacaagaggaagagcaggaagagaagcagagaggagagccgcagtcgcagtcgcagccgcagcaagagtgagaggagcagaaagcgaggcagcaagcgagacagcaaggcgggcagcagcaagaagaagaagaaggaagacactgaccgctcccagtccagatctccatcccgctccgtgtcaaaggagcgggaacatgccaagtctgaatccagccagagggaaggtcgaggagagagtgagaatactggcaccaatcaggagacccggtccaggtcgagatccaattccaaatcgaaaccaaaccttccatcagaatcacgctccagatcaaagtcagcttcaaaaacccgatctcggtccaagtctagatccaggtctgcttccagatcgccctcccgatctagatctaggtcccactcaaggtcctaactggctatggccacagctggaactacccgagaagtcttttgttacatgtttggtaggccgttagcacaagtgattgggagttaggaacatgttcactgnttgttacattttttaaacttccccttaatgggtgtgnnnnn

SEQ ID NO: 12722 - DNA, 610 bp, Homo sapiens
  misc_feature 610: n = A,T,C or G
actttgaggaaagaggctgttatttcttgttagagggatctggtcatcttttctgctctgttgtctttgtttatgctctcttgagagtcatggttccctctgcaccttgggcttggcccgctgcggggtagcccccgtttcccaagcatggtgggacccctgctgtgcctccacatctgtgttctccatctgctctggaatgccctccctgccaacgcacagagctctccagcctcggggaacttgctgctttggttgggaaattccccttgggattaagcgttcctgccttcccgcagcactttcctagctcagagcaggctcacagaccgtgtgagtgtccttgggttacagaataccacaggcaagtgagatcattctccattgcatttcttttcaactacaatttgagtgatttttcagaagtacaagatttacctgattcttacatggaggtagtgatgtattattaaatacacagaatacaaaggcaaggatgggtggggcgtgcacctgtgatcccagcactttgggaggccgaggtgggagagttgcttgaggccgggagttcgagaccagcctgggaaatatagtgagacgccatatctan

SEQ ID NO: 12723 - DNA, 1405 bp, Homo sapiens
  misc_feature 685, 699: n = A,T,C or G
caaaagtatcgaagaagtgataaaaagagcgaatagcaccgactatggactcacagcagccgtgttcacaaaaaatctcgacaaagccctgaagttggcttctgccttagagtctggaacggtctggatcaactgctacaacgccctctatgcacaggctccatttggtggctttaaaatgtcaggaaatggcagagaactaggtgaatacgctttggccgaatacacagaagtgaaaactgtcaccatcaaacttggcgacaagaacccctgaaggaaaggcggggctccttcctcaaacatcggacggcggaatgtggcagatgaaatgtgctggaggctttacatctactggagttgaatgattgctgttttcctctcactctcctgtttattcaccagactggggatgcctataggttgtctgtgaaatcgcagtcctgcctggggagggagctgttggtcatttctgtgtttccctttaaaccagatcctggagacagtgagatactcagggcgttgttaacagggagtggtatttgaagtgtccagcagttgcttgaaatgctttgccgaatctgactccagtaagaatgtgggaaaaccccctgtgtgttctgcaagcagggctcttgcaccagcggtctcctcagggtggacctgcttacagagcaagccacgcctnttttcgaggtgaangtgggaccattccttgggaaaggattcacagtaaggttttttggtttttgtttttgttttcttgtttttaaaaaaaggatttcacagtgagaaagttttggttagtgcataccgtggaagggcgccagggtctttgtggattgcatgttgacattgaccgtgagattcggcttcaaaccaatactgcctttggaatatgacagaatcaatagcccagagagcttagtcaaagacgatatcacggtctaccttaaccaaggcactttcttaagcagaaaatattgttgaggttacctttgctgctaaagatccaatcttctaacgccacaacagcatagcaaatcctaggataattcacctcctcatttgacaaatcagagctgtaattcgctttaacaaattacgcatttctatcacgttcactaacagcttatgataagtctgtgtagtcttccttttctccagttctgttacccaatttagattagtaaagcgtacacaactggaaagactgctgtaataacacagccttgttatttttaagtcctattttgatattaatttctgattagttagtaaataacacctggattctatggaggacctcggtcttatcccaagtggcctgagtatttcactggcggttgtgaatttttcttttcctcttgggggatccaaagaatgatgtgcaatttcatgttttaac

SEQ ID NO: 12724 - DNA, 1555 bp, Homo sapiens
  misc_feature 1, 2, 3, 1543, 1544, 1545, 1546, 1547, 1548, 1549, 1550,1551, 1552, 1553, 1554, 1555: n = A,T,C or G
nnnaatactcctactactactaaattccggccgcgtcaacaaagcccaagcacaatcggggcaattggcgcaagtgcaggcaggcattaccaagagaaaacctgttaactttgaactagccattgtggctcttcccaaaggaaaggcatttcgcccggcatgccaggtctctgggccttcagcccggctcctggtgctgcggccacaccaccctggggtgctcattgacagagctgccataatgaacttgaaaggacgggaatcacgagggaagctggggctcccccgcccacaggagaggatccccgttcttcaagcttctctgctcagtgtctactaacgaccgacatttgctaatgtaaataatagtaaattattgagaattctaattcttttacacagtctgtttttaatctattttaattaaataaaatctatgactccaaaaaaaaaaaaaaaaaaaaaatagcggttacgactttggctacttaatcaaaatcctaaccaactctaacttgcctgaagaagaacttgacttctttgagatccttcgattgttttttcctgtcatttatgatgtgaagtacctcatgaagagctgcaaaaatctcaaaatgttctttgaagatcatattgatgatgccaaatattgtggtcatttgtatggccttggttctggttcatcctatgtacagaatggcacagggaatgcatatgaagaggaagccaacaagcagtcatgacatgaaatagtccttttatttttatttcgagctacacacatgcttgtatataggttttatctctggttgaatccctcgaacaatagacagtacctttcccccccctttcatggcccattttattgtctgcctttcagtactaagtatgaccgttcctatctcagatcttaataaaaagaaaaaaaaaaacgcattcaggttaaattgggccttaatttaatatactgtgttagcaagcgtgtgtgacagagagtggggaaagctacatcattgaatatttgataaactttaccgacttgagttggtttatttttcccttttcctaaattaactagcactgactgtaatttatttccctgtttcacgtctctcccttccattctgcaggagtttagctatttgagatcgtggaccatcagtttgcactttagagagtgtttctgactctaaacctgttttatcagaaaattgttttcctggatcttagctggaaaaatctgccaattttacacagtatttacttggtttggacccacagaatatatgcaggtgtgcgaaactggtcggttcagcgaacttaaaaagacagacactactgggagcttaggtactggggtgctgtcggtggttgacttcccggcctctgtgctggcaggtccatggcagggtggcggccgtgctgggaattccacagttacctcggaaaccctggtgggcgcattccgggcggtcccactgggcccgttttttgaaccccgctgtgttttcccccccctttttttttccctcttctgtgcgcnnnnnnnnnnnnn

SEQ ID NO: 12725 - DNA, 518 bp, Homo sapiens
  misc_feature 1, 2, 3, 4, 5, 6: n = A,T,C or G
nnnnnncagtgcctgtagccactgtagaactggaagaaaagaggttcagaactctgcctttagtgccaagccccctacaaggcctgaccaatcaggatttacaagagggagaagattgggagcaagaagatgaggacatggaccccagattagaacacagttcctcagttcaagaagattctgaatccccaagtcctgaagatataccagactacctcctgcaatacagggccatccacagtgcagaacagcaacatgcctatgagcaggactttgagacagattatgctgaataccgcatcctgcatgcccgtgttgggactgcaagccaaaggttcatagagctgggagcagagattaaaagagttcggcgaggaactccagaatacaaggtcctggaagacaagataatccaggaatataaaaagttcaggaaggtaagacaaggtctgggaacggaagcaaggtagaatgagaatttttactttttgacatggatgctttttctctgcagcagt

SEQ ID NO: 12726 - DNA, 1189 bp, Homo sapiens
ccgggcaggtacactgcccaggcaaagcgtccgggcagcgtaggcgggcgactcagatcccagccagtggacttagcccctgtttgctcctccgataactggggtgaccttggttaatattcaccagcagcctccctcgttgcccctctggatccactacttaaatacggacgaggacagggccctgtctcctcagcttcaggcaccaccactgacctgggacagtgaatcgacaatgccgtcttctgtctcgtggggcatcctcctgctggcaggcctgtgctgcctggtccctgtctccctggctgaggatccccagggagatgctgcccagaagacagatacatcccaccatgatcaggatcacccaaccttcaacaagatcacccccaacctggctgagttcgccttcagcctataccgccagctggcacaccagtccaacagcaccaatatcttcttctccccagtgagcatcgctacagcctttgcaatgctctccctggggaccaaggctgacactcacgatgaaatcctggagggcctgaatttcaacctcacggagattccggaggctcagatccatgaaggcttccaggaactcctccgtaccctcaaccagccagacagcccagctccagctgaccaccggcaatggcctgttcctcagcgagggcctgaagcctagtggataagtttttgggggatgttaaaaagttgttaccactcagaagccttcactgtcaaccttcggggacaccgaagaggccaagaaacagatcaacgattacgtggagaagggtacctcaagggaaaattgtggatttggtcaaggagcttgacagagacacagtttttgctctggtgaattacatcttctttaaaggtaaggttgctcaaccagcctgagctgttcccatagaaacaagcaaaaatattctcaaaccatcagttcttgaactctccttggcaatgcattatgggccatagcaatgcttttcagcgtggattcttcagttttctacacacaaacacttgttttccatcattgagtaatttgaggaaataatagattaaactgtcactgtatatgtagaatatataatgcttagaactatagaacaaattgtaatacactgcatgggatagtttcatgtaacatactttacacgactctagtgtcccagtc

SEQ ID NO: 12727 - DNA, 837 bp, Homo sapiens
acgcggaagtgaggattccccctaaatgtttcagaatcatcttagtctcatcctttctttctctccagccagagaaatcttgggaaattgacctgaaacaactggaatatctaattgatgaaaagacagcttgtctcattgtcaataatccatcaaacccctgtgggtcagtgttcagcaaacgtcatcttcagaagattctggcagtggctgcacggcagtgtgtccccatcttagctgatgagatctatggagacatggtgttttcggattgcaaatatgaaccactggccaccctcagcaccgatgtccccatcctgtcctgtggagggctggccaagcgctggctggttcctggctggaggttgggctggatcctcattcatgaccgaagagacatttttggcaatgaggtgataatatggtgaaagagtatgtgtaatttagggtatatatttatttcatgagcacagtggggacaagggaggcttttttcttttctttctccttgtcagtcaagcagcatgtgtgtggcagagctgggctacgaacccagagggtctgatctaagaatgccactagacaccatcactttccaagattaaaaacctgatagaaaggtcagaacaagaaactctaagacagagatgcttaagaaaagctaaacaacatgtttcttgtgggtgtcttttagatccgagatgggctggtgaagctgagtcagcgcattttgggaccctgtacgtgcctatagtcccaactacttgggaggctgaggcaggatagcttgagccaagtgttggaggctgctgcaatgagctatgatcataccactgt

SEQ ID NO: 12728 - DNA, 414 bp, Homo sapiens
  misc_feature 410, 411, 412, 413, 414: n = A,T,C or G
actgcgtggcttcaatgataaaaaaaaaaaaaaaaaaaatgactgcatttttaaggcctagcgcttcaaaggctatattgtcttacgtgtctgactttggcatctgccctttctgacttttgaccctgcagccttcagcatgccggaagtgaatgtggactataatgccagctcagagaccttgcggtgtgaggctccccgatggttcccccagcccacagtggtctgggcatcccaagttgaccagggagccaacttctcggaagtctccaataccagctttgagctgaactctgagaatgtgaccatgaaggttgtgtctgtgctctacaatgttacgatcaacaacacatactcctgtatgattgaaaaagacattgccaaagcaacaggggatatcaaagtgacannnnn

SEQ ID NO: 12729 - DNA, 978 bp, Homo sapiens
  misc_feature 683, 689, 978: n = A,T,C or G
acgcggggagagaaaaagagagtaagggaggagggaaggatagagaagggagtgagttagcaaaatgccacactgttagttgcaaactggcacaaaggtgaatgcggttcatgaggctcgcttgattaagaagagctgaaacaggagcaaagagcaaaaggcaacctgcagcgaaagcaaggactcagggaaccggcagacacaagcagcctctgcaggtgtgcgagcaggattgcttctgcaacaaaagcctccacccagccacatcttgtgaaaagaatggccacttcttggggcacagtctttttcatgctggtggtatcctgtgtttgcagcgctgtctcccacaggaaccagcagacttggtttgagggtatcttcctgtcttccatgtgccccatcaatgtcagcgccagcaccttgtatggaattatgtttgatgcagggagcactggaactcgaattcatgtttacacctttgtgcagaaaatgccaggacagcttccaattctagaaggggaagttttgattctgtgaagccaggactttctgctttgtagatcgaactaagcagggtgctgagaccgttcaaaggctcttagaggtggcaaagactcaatcccccgaagtcactggaaaagacccagtggtcctaaaggccacagcggactacgctttactgncagaanacaaagccagggtctgtctttgagggtaaggagatcttcagggaagttacttttcctggtaccaagggcaggggttagcaccatggatgggttccgagaaaggatattaagcttgggttaccggcgaatttcctgagcgaggtcacgtggtgtgccctggccgggcgaccggtgggaccttggcccttggggcgcctccaccaaattaggttctgccccagttggaaaattcgggacaaatcctagggtaaccacattcctggaatggttaagccttttagcttatagn

SEQ ID NO: 12730 - DNA, 658 bp, Homo sapiens
  misc_feature 656, 657, 658: n = A,T,C or G
actgacaggatataaacctaatccaaccatagaagttagaccctatgattgaggcttgggagagttaaataacattgggtttttgaagctctaaacttcaaaatctctgacccatgttaagaaagcaaatttcttgaatgtccttgattagctagcaatatgtggattaatcacttaggaagaattcgttaacggtgacctggccatttgttttttgaaagtgatctttgctgtgtggatgcagcactgttatggtgtcccagttgccattctaacccaaattaggtctttacctcagtcagttagctagctggccatgtcaggattggtgaagttcaaaaattagtcttcataatgttaaaagccacaattcatcatgaacataagacagctattgatacctacctatgtatcaagttacacatctgcaattttttttttttttgatggagtcttgctctgttgcccaggctggagtgcaatggtgcaatctctctccccgcaaactctgcctcccagattcaagcaattctcctgcctccacctcccgagtggctggaactacaggcgcatgtcaccacgcctggctaattttttgtatttttagtggagacggggtttcaccgtgttagccacgatggtctcagtctcctgannn

SEQ ID NO: 12731 - DNA, 856 bp, Homo sapiens
  misc_feature 847, 848, 849, 850, 851, 852, 853, 854, 855, 856: n = A,T,C or G
ccccggcgcagtcagatccgaggacatgtgacgtcgtccgagagtcttaaaatcctgctgtggccggattccagactcgtgggggaaaggctggatcttaatgcaagtcatgaacttgaatgtgccgatgaggcctggcattcttgtccagagacagagtaaggaagtgttggccacacccttagaaaacagaagggacatggaggcagaagaggagaaccaaataaatgagaagcaagagcctgagaatgctggagaaactggtcaagaagaggatgatggtttgcagaaaatacacacatctgtcactagaactccttcagttgttgaaagccaaaaaagacctttaaaaggagtgacattttctagggaggtaattgttgtggatcttgggaatgaataccctacacctcgaagctatactcgagaacataaagagaggaaatgaagctcaaaaaagggtaagagtgaaagaaaatgtaacgtttgactaacgttgaaagactgagggtacaaatcatgttgaaaacaacaaaacaatggggaattaagcaaataaagatatattttacctttgtgcagaaaggaggtgaggcatgtgcaaaattctgtagtaaaataattagagtgatatattttttaaaattcaatctgggttcagaaatggtggttgcttaaaattttattcaacatgtctggtggtgataaggcttggtgcaaaacaaacaacaaaggcaaattggaaaaaaaaaaaagggggggggggcagaattaaacatggggggaggataaaggtgggaagcggaagggtcacaaaagggggggaaaggggtgtagcgtccttgcnnnnnnnnnn

SEQ ID NO: 12732 - DNA, 595 bp, Homo sapiens
ctgtgtctctaaaaagtaaaatgaggaaattcaaataatagtatacctacccgggttttaaaaagtaaaattggagctttcattaaaaggtttataaagtggagattttgttattagaaaagcgtccagttatcagtatttttaatgaaacaccaggaggaatattaatgttaaggaatgttaatgtttgggaattacagattgagatttcagaaatgtaacagctgttcatatataatgtattctatctgcttatagaaaaagacttatatcagtgtagagattgtaaaatgaagaaactgtctactttagccttctgaaaagcaacatgtttctgctgctgcaaattgaatttacttaatgggtatccttctcctattgcaggctgtagtgggctccattttggccattaaaagaaaagatgaacctattgatctcttcatgattttgtgatcattgacaagaaacataaatctgaaactgatacgaggtaggtggtagaagactatgaaatactaacggtggggcctggtggctcaggcatgtaatcccagcactttgggaagctgaggtgggtagatcacctgaggtcagg

SEQ ID NO: 12733 - DNA, 971 bp, Homo sapiens
  misc_feature 686, 968, 969, 970, 971: n = A,T,C or G
actctgcgttgttaccactgcttcccgggactctgcgttgttaccactgcttcccgggactctgcgttgttaccactgcttcccgggactctgcgttgttaccactgcttcccgggactctgcgttgttaccactgcttcccgggactctgcgttgttaccactgcttcccgggactctgcgttgttaccactgcttcccgggactctgcgttgttacacaagcagctgctgtactattaatgagaacgaaatacacattaggaaaatggagccatttcaatctagtggtttgggcaagatggggaagagaaggggaaacattctagtttctggattacattattatgcccctcctgaaaaggtggttgtcatttgcatttatttaaagcaggtaatatgcaggaatgtaactgaggattatcttcgggcaatcagcaagatatcctcctcatggtccctttagctctcaaaagcaatgaaatcctcctgttctcatttttactgctgtggttgtgctgctgaacaatactatcttctcaaattccatgccacaaattcagcaataacttttggattgaatttaacaactactgtaattggatgctgatgtggacaaaatatatggatttcgatttcactcccgaatgtgattgccaccagctctttatattgctgctgtggtatnttaaaccagaagcttctttaaattatgtgcaaactgatctttgttcatgttcgtggttatttctaagtgataagttgaaacacacgcttaaatgatttttttatgtggatttgggtacgttagacatacacggatcctggtgtttaacctcaaaaggcaaaaagaaaattgggggcgcggccggaagttttgacatggtgggggggcaggtaggaatgccaggtccaggagccgtcggagggggttcccaaaacgggcgggtgaaccagggggcgggtcacnnnn

SEQ ID NO: 12734 - DNA, 1364 bp, Homo sapiens
  misc_feature 1, 2, 145, 146, 147, 148, 149, 150, 151, 152, 153, 154, 155,156, 157, 158, 159, 160, 161, 162, 163, 164, 165, 166, 167,168, 169, 170, 171, 172, 173, 174, 175, 1312, 1349, 1350,1351, 1353, 1358, 1364: n = A,T,C or G
nngtcttacatctaagtactgttgatttgtcttctgtaacgttctgcttacacttacgttgttttgttgtgtgttcgaggcggctgtctcgtatttcctcttacccccccagcgagtgggtgtgtggctgcttgcgactactggnnnnnnnnnnnnnnnnnnnnnnnnnnnnnnnattgttcgccgggcaggtactcggggaacgcccgggggcagaacgatggagagctcccgcgtgaggctgctgcccctcctgggcgccgccctgctgctgatgctacctctgttgggtacccgtgcccaggaggacgccgagctccagccccgagccctggacatctactctgccgtggatgatgcctcccacgagaaggagctggtcggtattcccctcgctctcgacccccttgagctgtcgccttgtctcttctcttgcacgcctccctcctccccccacccccactcctattcccagagtcagggcgcggggagctgagcgcaacgcccaggcacccactgccatccgaagagcgtctcgagctcacgggctcctggcagtctgttgagcgaatccctcatcccggcccctctgagcaacaggggccccagcggctcagagacccgcggtcagtacctgggacagcgtccgctaagtttccacccctcgaccattccctgtggggggatcccatagttttagagcgcccgaggaacccgtgcccagaagaacgccaggttcagccaccagccctggacatctaatctgccgtggatgatgcctcccccgaaaagaagttgatcaaagcgctgcaagaagttcttaaagaagctccaagagtaaacgtgttcccttctatgagaagaagtatggccaagtcaccatttgtaacgccggtgagcagtgtgcagtaagtaaaggggcaaggatcgggaagctgtgtgactgtccccgaggaacctcctgcaattccttcctcctgaagtgcttatgaaggggcgtccattctcctccatacatccccatccctctactttccccagaggaccacaccttcctccctggagtttggcttaagcaacagataaagtttttattttcctctgaagggaaagggctcttttcctgctgtttcaaaaataaaagaacacattagatgttactgtgtgaagaataatgccttgtatggtgttgatacgtgtgtgaagtattcttattttatttgtctgacaaactcttgtgtacctgcccgggcgggcgctcgagggacacaaagggtgcagtgagcccagaaatgcgccattgaacttcagnctgggcaacgagaacgaaactctgccccatttattannntnttttnaaaggn

SEQ ID NO: 12735 - DNA, 487 bp, Homo sapiens
  misc_feature 487: n = A,T,C or G
acatttttaatttataccatttttttaaattcctgtttttccttttgtagctgtatgcaggagctattcttgaagtttgtggatgaaaattgggaaggttccctcaagtccaaggtatataaaatttactccagtaaactgttcagtcatttaaaatcaacattttatgtgaatcgttttcactatatattcccaggaataagaatttttaggattatactttcttaacaatatatgcttttttttcaatttgttttcatggaagtggtttgttaaagtaattggtgaatgctatgttactttaaaaaaaacacaatatatgaaatttagaggccaggcgtggtgggtcacactcagctcatgcctgtaatcccagcactttgggaggccaaggtgggtggatctcgaactcctgacatcaggtgatccgcctgccttggccttccaatgctgggattacaggcatgagccaccacacccagccacn

SEQ ID NO: 12736 - DNA, 794 bp, Homo sapiens
  misc_feature 1, 785, 786, 787, 788, 789, 790, 791, 792, 793, 794: n = A,T,C or G
naagccatgatcacaccactgcactccagcctgggtgacagagtaagaccctgtctcaaactttttttaaaatgaaagaatccaacctttttttactctgacctgcgagagtgcagagggtctggggaacatttgcagaagcaacaggtaccagccagtgctggaaggagctcaccctgggaggtctcgtcagcctctgtccttcatggctgtcccttgtgtcccatgtggagagcccttcctccctttccacatggtaagcactgagcccaatttcttctcaccccacagatggtccctcagagcagagatgtctaatgaaaggttcagattcagatcactaactttccatcttccactttttccagtggtggccatgttcccccgtttgccttcacaaaaaccttgtgaataatacaagccatatggactctgatttacagtttagaagatgagcagaggtgggtgtgagttgcccagtcatgttgctagttgttgaagaaactaggattgttctcaggtcttgggctcctggcccatagaccagtggctctgtgttctgatggggtattggggaggatttttacaaatgcagattcctgagattgttcctggaacatctccgagtgggtgtgggttgtggccctgcgtgtgtgattttgcctatcccagctccggggtaccaccaaccactttttgtctctgtgggtttacctactctggatatttgttcaactggcttcataccaggcctgggccggtggtccagcctgtattcctagccnnnnnnnnnn

SEQ ID NO: 12737 - DNA, 4448 bp, Homo sapiens
aacattttctcaagtttattgtaagaacatagcatataatatacagaccatacaaaacgtgttaatcaactgtgatgggtaaggcttcccatgaatagtaggctattagtgcttaagttttgaaggagtcagaagttttatgtggattttcgactgcacagcagtcgggggtcagtgtccctaacccccccactgttcaagggttagctgtactatatgatgagatgtgcaacatggttttgataagaggcagcaagggtttaggacattctgtggcatactggccacatagcgatttgcatcaggtcagatattctaagtctagaaagcctgtgggatagctctagaggaggagcagagatgaagcaacgcaaagatgcccttgttcgtctgcaaaatttagggtctctgagtgagacacagctcaagggggggactgtgagcatttggggaagggggttctgtccaaccaggcaaagcggggagtcatggctatcacagccatcttgccctcacattcaagaacttaccatcatagggacactgaagttatcttctcatatggccatataaagataggatgttatgtattgactatcccacagatgtatgcctcttctggtttatgttgatatggagagaagcgagttcatgtcattcatatcttaattgccctcagtctcacagaaggcgattatgaggccaagagcctgggagatgcagctcctgggtttccagccctcagcccccaaaaccttaggcagcagggattggagcaggtggtctgaggtcccttctagcttcagaagtgtcataatcaaataccaggaatgactctttggttacttttttaacatagtttgcacttaaacccttttcagtagtaagcatcttagagacagactgaaaatgtgatgttcttcttgaaaacaccctttcccatgtcatcagtctgtggtgtttggtgactgtccccttccccactgtgcgagtacttccctcagggctgctctggtgatgctacctggcgtgttttttcttttcagtgccgaagacgcagatgaaattcagcatccagacgatgtgccccatcgaaggcgaagggaacattgcacgtttcttgttctctctgtttggccagaagcataatgctgtcaacgcaacccttatagatagctgggtagatattgcgatttttcagttaaaagagggaagcagtaaagaaaaagccgctgttttccgctccatgaactctgctcttgggaagagcccttggctcgctgggaatgaactcaccgtagcagacgtggtgctgtggtctgtactccagcagatcggaggctgcagtgtgacagtgccagccaatgtgcagaggtggatgaggtcttgtgaaaatctggctccttttaacacggccctcaagctccttaagtgaattgccgtaactgattttaaagggtttagattttaagaatggtgctctttcatgcctattatcagtaaggggacttgtattagagtcagagtctttttatttaggccagttgtcaagtgtcaataaaagcatcatgtaatttatggttttcattttatttaaaattcagcaaaatcatacgccatctaccgtgatgactgccaactccatggcagaccctttctgggattcaaaaaccaattcatcagatcgctgcctctgagggatgtacagattggctggggagctgagtgctacaataaaggaggaagtaccggggaacagtgcagggcaaaggcaggaaagagatctgagctgcctggagatcatctggggtgcggagtacaaagctttgcaagggtgtggttttggaatgacgctaaactgaaggtggagagaacagataaaaaggttggaagttgcacactgtacactgttaagaagttgagcttttatcttagaggcagcagaaggtttggagccaaggaatgaaatgatgaggcgtccttcaggtaatgaacttcagctgcagtgtgaaaggggcaggaagactggcagctgtcaaaactggaacagtccagtgagtatgtgcaggcccgggcttgggcagtgacgagggcagggagcacacatcaatttctgcggtagaaccttctagaggaagaccagacagagggtcaacagagttgaaaggagaaaataattgaggatgaggtccaagtttttagtttcagagactaggcatatggttaatatttaggtaggaaattcaggaaaaggagcttgtggggcaggaagggaaggaacggcagcttggggcactctgacatctttaacaagtcttgtaaaggcttactaaatacaacgaagcattgtaccaactataccctaataaagattaaaaatttacattccagttaactaccttaaaagttaagtccactttcatcccacgcccccatcctttccgtcatccctcacccctttgtcttgagaaaggaggtttagctgcttctttagttctgcaatttctttttcttgctctattatcttcatctgtagggtgaggttaacatttccagaattttggaaaagttcactctgcagcagctgaatggcagatggtctctgcgatgagttccttctcgttaagtgctggatatacttggcttgcactggacaccttttacggagggattccggcaactgaccagttcttaaacctgttagaacttctgctcgctccatttctgttccaaacggctgaaagagctctagcaggaccacacccaagctgtacatatctgacttggcatcatactcagatccttccaactgttcgggtgaagcgtacagacaagtacccactctggacgtatgtgttggtgttctcttcccgtttctgttggtccagtctgtgttcttctgtaggatgtctgtgcaggccagaccaaagtctcctatttttacttgctgatcagggccatgaagaaaaatatttcttggcttcagatctcggtgcacaattcccatgttatgtatgtaaaacacaccttctaccaattcttgaaaaatttttgttgcaacattggccataacataaggacaggcagactcgtccacatactcccggccccgcttgtttctctcgactatccaatcccacagcgagagctcacacagctgcatctggatgtgcagcatcaggtggtactgtgcctctgtctgacccaaaaagttgacattttcttcggaagattcttcggtggatgtgaaactctcctctaggtgggaattacgcctgagtggcagctgctgttccacaattgaactggcagacaaaccagccaagccattttcctggagctccagggtcgactcaagttcaccagattctcttatgactaaattggtggtgtacttcaccgacttgttattctgattttcagtgtcagattctccaaagcgtttttctttttctggggtgggctcagcaaagataatggatgagctgctactttcatcatttttaacaccacattgctctctgtcctcttcctggtcggagagcacttccagagatggcaactcaatggcagctctgtctgctcgtggctgaatcacatgaacatgttctatccacgcggtgtgatagccaacaatattggggtgctgaagacctgccagcaccttcacttcccgtaggaccttcatgcaaactgttttagttgcacccttaatcaggattttttttattgcataatactgaccatctaatttattcctgaccttgtatactcttccgtatccaccttttcctaagatggcaagttcttcaaattcatttaagtaacgtgaagtttgtgcttccaaggctacttcccttgatctgattttctggatacgagaaatatcctcacaaggatcctgacgaactctctctttagcagacctcattaagtgagtaatagctctgttgtgatgtagtctcaatgagctaaactcgtcactacaagtgaaagaagacagcagccccattttgataaacgtctggcaaagtagcttaaacacctgtcttgaacgaagtgggtttggttcatgcacgtggctcaagtgctccagcaaagaaaccagcaagagttggtttgcaactgcaaaagggaaggttggctgttgtaggggttcttttaacacctggatttctgctggaacatcagattcgtcatattcggggtccgggccctcggcgggaaagtcgatggccggcggcgcagccacagccccagccccgtcgccctcctcttcgcgcttgcggaccccggagttgcccccctgcatcgccggccgcgcgcgggccgcagcccagcccgccggccagcccagcactgccacactccgatgctgcagctagcgccgtccgacccggaagtaacccctcaccagacggaaaaccagccggacgcgtgggtcgact

SEQ ID NO: 12738 - DNA, 1408 bp, Homo sapiens
  misc_feature 1, 2, 3, 4, 1407, 1408: n = A,T,C or G
nnnngataacttttcaggctgctcagcaagcatgttttggtgaatatgaacagaaacatatcaagtgtgaataaaaggaaacaacaaaaccttgtcagtgtttttgaaaaagaatactgctatacctgtgttttattttaaataaacaggttctgtcatattttatcttcttgccagcaaatgaaggacattgtttcataaagcttctaaaatgtacatgaatatttaattaaatcatatttccttgagaaaataaagttcattcgcatttatagcagacagttgtgaggagctcataattgtcataagaccagggtagccagtaccggttgcttgtggaacaaaactcctcaatttttaaaactttttttaaaaaataaacatacaatcataggtattcatttactttaaaaattctaaagatgaagaaaattattgtttatatatttaagtccttgtataaattacaaaactcaagtttatgttacagagtcccttccccataggaagcataaagcacttttgtggtacctttcaccagtaaatatttgtatcacattgaatttgagaaaccaaataaaagtcgatattctctttaagccccaagagaacattcttctaagctgtctcttgtgatgaatgcgtttcaaaagtcatttgattgctatgatttaactcaatctcaaataaagtgatataatgggaatcacagggctgacttcagtagaactctgaaacatcagtgaactgcagactcttcttgcttgaggtcaacaaacacccttaggaagacaaccaagagtagtttaagaccaggacaacaaaataaaattataacaataataataataaaataacaataatacaataaaaataacaacaaccaacaatgaggtaaactccccttaaaaaaggcaaaatgtgttgcctggactgtcaggagagagttcgattgtacctgacacctaaatgtttttcaagccagagttcagccagttgcatggttgaggcgaaagtacttgccttggatcctaagcacatcttatactgcttagggtccaagttaggatcacaatgaactggatggaaaatatgcaccactcctacttcttggcttctgaatggccttaagccagatagaatgactttattgtagagatctacatcttctagtccccagccttgtattgaggtatcaaatccacctgcacctagaagatcacttttgtaaatacaggtgatgccatatccatagtctctccaaaatccagtcttttttgagaatatgaagtaaccatcagtgggaggatttcccccgtttgttacctttgggtcatactggctaaagatgatgggatagtacacctgttgtccctgaattgtattgtctctacatcgttgcggacnn

SEQ ID NO: 12739 - DNA, 1003 bp, Homo sapiens
  misc_feature 1, 2, 3, 4, 5, 6, 7, 8, 9, 845, 961, 992, 993, 994, 995,996, 997, 998, 999, 1000, 1001, 1002, 1003: n = A,T,C or G
nnnnnnnnnagcagtcctcctgacaagtgaccccagtcagttctctccctggagcagaggggagcacccgatcccctagggaggtggctggagaacaggtggggactcgagatgaacttgctgcctgtgcatgtgtgccagggaaaggacagctgagaccctgaggccacacattgtccaattgctgtacctctaagggcccaagtcagcagaactgtttcccaactgccggtgggctggccttgcagggaaggctgtcaaaagatggccaagtgcaggcacaagccttacctccctgagagcctgctcccaccttcctctctggccttcagcttttcttaagtgaagctacccttgacctttgttgtaattaaaaccaagagtggttctagaatgggttctcaggatgtcctgtgaaggctttgacttttggccctttacagttctagttttgcagaaatgaaaatgctctggtgactacagcaggtcaattattggagccaagagtagtattgtaaagttggagggtcttagaaggtcaggaaagaaatgagtggtccatggaagtgtcccttaaatgataacagccaaaagcacagccacctatggaatattcctttgttttgctggactggtagaaagtgcagggcttgcaagagtagaaagttagagccagtctcatccaatgtcctgtgaaattctagtgtttctgttaagtgcttgccggggtcttcttgaacccctccagctggggaacttggtagaaacagccccactgattctgttttttaataaagtcctttttagttgtacaagcaaactggtagctctttaatgacgtaaanattcaaacaagacagataaagcttaaatatgcctaaaactactatttactctggatcctagccatctctcttaggagtaattactgggattagtttgttggtatcttttacccacnttcattacgtgtatgtacaaaagttctgtgnnnnnnnnnnnn

SEQ ID NO: 12740 - DNA, 1261 bp, Homo sapiens
gaaagtagggcagccagcagatggcgaagtctatccagtgtgtctcggggagaactgtaataaatgaggctccctccctgagaaatgactaaaaccacgaaaataaattcttagatgaaacagttcaattatctaatgtaattactcctaaggaaaaaatgagagaaatttatcatagctacatgaagtttccaatgtggttatatatgactgtgtatagtcaacagttattcatctggcgttctgtcaaacagagttttctataatatggtatctgtgactgtttccaatacaataaaaatgctgcaaaatcttgaaatgcttttcaaaagaagaatactttatagtattgtgtgtacagctgtagtattgagcttattttgctgtactttattaatctttcccacaacatgtaaataatgaagtttgttgcacaccacatctggatttcatgattatactgtaagacttatatagtagatggcccttcatttagggaagtagtatatacaccagaatgtgccttttctttttaagatttaaacaacggaaaaagccactgaagtatgtatagtacctgtccgccccgatacacaggaaagcatggaacatgtggatggaaggaaccgggatcatctcatccagctgagtaataagtacgtttggtgcagtgccacacaggaggccaccaacagagcccagagtagtaactaggttgcttcactcttagcctctcaagtgatgacaccaaggtgagaacttctttcactaaaaggcttaatcttttaaataactgaaccagaaagtcgtttctaacaagaatacagataaacattacaaagaacaaagaaaagatatgttcaaaatctgtcaggttccaacaagggttactttttccctgaagagagaagatgaaccattgcctagaagtaatgtgtagctgactgtcccgtggttctatgtctgagtaacacagtctcatctctcatgtgtatgtgtgcatatatacatgtatatgactatagtggtatcagcaatcatgtatattttcaagcttaaatatgatgaaattgttaaaggactatagtcctaattaaaactaatacagaatatacttaatcacacttctgttcctaacttgtccttttaggcatgatcttatctcttgattgtggccacccgtaaagaaaagcatatctctaatctcagaagcacaaggagttcataccaggaaaccaagattagtaagtatttcggacgc

SEQ ID NO: 12741 - DNA, 1296 bp, Homo sapiens
acaagggcactcaggtgtctggtgtgggcattgactatgcccgggccagcaaacaggtctgcaatgacatcgatgaatgcaacgatggcaacaatggtggctgtgacccaaactccatctgcaccaacactgtgggctctttcaagtgtggtccctgccgcctgggtttcctgggctgggaatgggaacgtgtgtgggactgacacagacatcgatggctacccagaccaagcactgccctgcatggacaacaacaaacactgcaaacaggacaactgccttttgacacccaactctgggcaggaagatgctgataatgatggtgtgggggaccagtgtgatgatgatgctgatggggatgggatcaagaatgttgaggacaaactgccggctgttccccaacaaagaccagcagaactcagatacagattcatttggtgatgcctgtgacaattgccccaacgttcccaacaatgaccagaaggacacagatggcaatggggaaggagatgcctgtgacaacgacgtggatggggatggtgcaggcctggggctgaaggggtggctgggggacctgtgagaatttggatcaggtggggatgaagcagggaagctaggaagtctctgtgaaatagggaggcaggcttgtggacgttggcctgggtgaggagagattacctgcagcagatgtcaataggaatgtgaggtagggcgtagtgttaggcagagtgtggactagagggtgagacaagaaacaggcagatttcctggccagttgtcctctgggtggggagacaaagttcgggactttcaccaacctgttcttctgattagcgatggggatgggcatcaggacaccaaggacaactgcccacagctgccaaatagctcccagctggactctgataacgatggacttggagatgagtgtgatggggatgatgacaatgatggcatcccagattatgtgcctcctggtcccgataactgccgcctggtacccaatcccaatcagaaggactcagatggtaagcctgtgggactcaggccgggcctgtccttcctctttagctgggattcaccagtgacctctccatgggtgggaactgcagccacttctctccatcacccttctcaccacggacacaagcacctatgagtgatgttggtgaagtcactcctccatgacccattttcccgtctgtaaaatgagggcattgggttagatgccctttacagttctccagaagcctccaaacccaggccaatcgtgaaggggcacatcaccggacgcgt

SEQ ID NO: 12742 - DNA, 190 bp, Homo sapiens
ccgggcaggtacactgggtgatgagggcatcaggtaatgcccactaaggcctcagtgcactgcccatcaggagggatgggagctgcagaccaacgttactgacttgacgcagacacaaagcaaaagtggaggacggtggaggaagaagtagcccaagggaggcgcggccagaccactgcctgagactcgt

SEQ ID NO: 12743 - DNA, 503 bp, Homo sapiens
  misc_feature 498, 499, 500, 501, 502, 503: n = A,T,C or G
acattccacaaaatgaggatgaactggagctgaaagtgggagatattattgatattaatgaagaggtaaggaaaaaatgtgttacaagtaaaacagtaatggtaattgatgctatggattttagaaaaattaattgtaagaatattagtcttttgtgagaactgttgtcactttttaaaaaaaatggtatagagtttctttactcatccttgttgtatttatatatgtatttgtatttcctgcctttaggaataaaaatgcccccttaaagctaaaaattaatgaaatctaagtagttaagaacgtaaacaagccttttctttgattctgaatttaccataggcaaaaagcagtgaaatagaaggaattttgccttagaaggaatacaaagcaaaatctttttaaacgctttgccttgtttgaattatcacattcaaatattaataaaaatactttcctatattttgatatcttaaaatgggattttaaaatattttnnnnnn

SEQ ID NO: 12744 - DNA, 1332 bp, Homo sapiens
  misc_feature 1, 2, 3, 1330, 1331, 1332: n = A,T,C or G
nnngtggaatatgtgtgtgtgtgcatgtgtgtgtgtctttttgcctcttttttcactacaaaaccacaaaatgagatattccataactgtgacactaaggtagaacctgatttgagtaataaaataatcaaatattactgtccattagaatacatttacagaggcaaagaaagagaaaacagatattttaagggagaaaaaagacacaagacataaaacttcccgcgtacgcgggggcggtggtgcagggtctcgggctagtcatggcgtccccgtctcggagactgcagactaaaccagtcattacttgtttcaagagcgttctgctaatctacacttttattttctggatcactggcgttatccttcttgcagttggcatttggggcaaggtgagcctggagaattacttttctcttttaaatgagaaggccaccaatgtccccttcgtgctcattgctactggtaccgtcattattcttttgggcacctttggttgtttgctacctgccgagcttctgcatggatgctaaaactgtatgcaatgtttctgactctcgtttttttggtcgaactggtcgctaccatcgtaggatttgttttcagacatgagattaagaacagctttaagaataattatgagaaggctttgaagcagtataactctacaggagattatagaagccatgcagtagacaagatccaaaatacgttgcatgttgtggtgtcaccgattatagagatggacagatactaattattactcagaaaaaggatttcctaagagttgctgtaaacttgaagattgtactccacagagagatgcagacaaagtaaacaatgaaggttgttttataaaggtgatgaccattatagagtcagaaatgggagtcgttgcaggaatttcctttggagttgcttgcttccaactgattggaatctttctcgcctactgcctctctcgtgccataacaaataaccagtatgagatagtgtaacccaatgtatctgtgggcctattcctctctaccttttaaggacatttagggtcccccctgtgaattagaaagtggttggtggagaactgaacaaatacttactgatagaccaaaaaaatacaccagtaggtcgattcaatcaagatgtattgttgactaaaataaacaatagggtgattcatcaagatccggtcgcatggtgattcatcagatgttgttgcttgtctagtcactttatccatctgttacgtgaactgttcttgaaatggaagcttatggttgagaaaaaaaaggggcattccagggcaagcgcacttgaaggccgggtaaannn

SEQ ID NO: 12745 - DNA, 1387 bp, Homo sapiens
  misc_feature 1, 2, 1369, 1370, 1371, 1372, 1373, 1374, 1375, 1376, 1377,1378, 1379, 1380, 1381, 1382, 1383, 1384, 1385, 1386, 1387: n = A,T,C or G
nnaattcagaaatttaggtgatgctggttaaaaagtctgcctggtgtggggcctcgtccatgcactgtccctgttcagctgcatcccctctgttcccctagcttcagtttgtgctgacaatcatccagaccagctgcggggtcatctggccgtgcacattccctcttggttggttgtatttccagattggatacatgatttccctgattgctctcttcacaaacttctacattcaggtaaatctcacccttctctgggacttgggaatctggggcctttaccaacaaaggccctcatctatttacttaatggggcatgtgggagcccttgctgggtgacaggctctggcctctaatggagtcactatgacaagagcagcccctgcctctggggggctcacagctcactggaagacactagaatcctgttctagagcctgggtgaggaagtcttgggattcccctgggaaatggaaaactgtgcagcaggaccctatgttgcttccctctgacctgcagcagagacgtgagaggtgatttcaatcagaaatctctcagttcactaccctgaacgtcatggccaaatgaaatttcagaagagatttttatcacagtcctcagatatggagatctgcttttttgtcccagctttcttatacattcagtcttcaggtgtgaggattcggttcattcctaagcatatgatgtggtgatgtaggtctttgctcacagaaagatccatttagggcagataatttccagtggagcctgaccacgttgcagccactgctgattctcctgccatgcgtcaccccccagatgacatgtgtcctgcctttgttgccagtgcctggtagccataaggcctgctgatctgggcaaaacacggaggtcaggagcaagggcagaggctgcaagtcccgaggctcagacatttgtcctttcttcttctgtgcccacaagcacctgtgtgtggcatgttgagtttcagtggaagtcatatacttctgggcttcatagtttatggctgcactgtgggacatacaccagctacaaggaaggtgaaaggataggacccgatgaagctgaaatcacatttattctaactacttatagcagcatagcactttgttcatgaaggctgagatagtcgctgaggcagtgaggaacttttgaagacgaacaagggatgtgggtgtcaagagagctgctgccaggtgggaaagaccaatttggccacataacccctgtcatctgccatccagatactaaaaggcaaagcaaagtgtaaattgaattttctatgtgacattttaaatagtatttctgctgcagcctgtgattcagttaacttacctcaggctaacccnnnnnnnnnnnnnnnnnnn

SEQ ID NO: 12746 - DNA, 438 bp, Homo sapiens
  misc_feature 335, 337, 347, 348, 349, 350, 432, 433, 434, 435, 436, 437,438: n = A,T,C or G
acgcgggggggtgcagggcagtcagactggaaccatggacctcagcgtcctcctcttccttgcgctcctcacaggcctcttgctactcctggttcatcgtcaccctaactcccatggcaccctcccaccaaggccccgccctctgccccttttggggaaccttctgcaaatggacagaagaggcctactcaaatcctttctgagggagtggatctgattgccgacaatcaataatacctttgaccaagggactccaatcaattcatcatgctttgcctaatgccttttgtttgtaatactgctgcgggacaatctaagactggagagagcaaaananaaaaaaaaannnntttcccccggcccgcttaaaaataaggaacccccccgcccgggggaatttaaatttaagctttttaaaccccccccccccannnnnnn

SEQ ID NO: 12747 - DNA, 732 bp, Homo sapiens
  misc_feature 1, 2, 3, 4, 5, 6, 7, 8, 9: n = A,T,C or G
nnnnnnnnncctcttatgtggtttattaatgtgttcagaaaacggggtaacttattgaatagagatgcatgcagtgtttctcaaggggagtcaggttgggaattgttttaagtagatgttagatggggtgcttattttgttccacgtaaatgcgtatagccaataaaagttcatagatcgatgtactttaaactttttgtcagctgagttccaaggaaccatgtaccactgatacctgctgcttgctcttttctggcatcagggtgactccaaatcttctagcagcacattcccaggaagcaggctatcactatctatagtgccagagcttttagagctaacaatcagtccccgcactttgagctttttgaccattgtgaatggctcagtaactcctgctcgtgctccctgggaaggcatgtattaatggctttctcttctccatccacaggctttgtggacatgtgtgtgcagcatatcccttctccaaaggtgggcgccaagcccaagattgagcacacctacaccggtggtgtggactccgacctcggcgaggctatgagtgactgtgaccctgatgtaagggcatgtggctccccggttctctggtctttttttccccttcctgtgtggggatactgatttctggtcacaggagtaatgcccactttcccacccttgcctccccatccccatgagcacagtcaggcctgaatgcaaagcctgatgttg

SEQ ID NO: 12748 - DNA, 1415 bp, Homo sapiens
  misc_feature 1, 2, 3, 1414, 1415: n = A,T,C or G
nnnctctctgcaaacccccacttcctgggttcaagcaatactcctgcctcagcctcctgagtagctgggattacaggcacctgccaccatgcctggctcatttttgtatttttggtagagatggggtttcaccatgttggccaggctggtctcgaactcctgagctcaggtgattcacccacctcggccacccaaagtgctgggattaccagcatcagtcaccgtgtttggccagtattcattatcttgttgtcttccagttgtgtctcttcaataagggagtatgcaatggagtctatagaaagcaagtgagggagttttctcagtaggtgcaagggtagtgaggcatttcattttgagtcatactctgatgaggctggcctgtcttttctcatagtgatctgcagagatgaaaaaacgcagatgatataccagcaacatcagtcatggctgcgccctgtgctcagaagcaaccgggtggaatattgctggtgcaacagtggcagggcacagtgccactcagtgcctgtcaaaagttgcagcgagccaaggtgtttcaacgggggcacctgccagcaggccctgtacttctcagatttcgtgtgccagtgccccgaaggatttgctgggaagtgctgtgaaatagataccagggccacgtgctacgaggaccaggcatcagctacaggggcacgtggagcacagcggagagtggcgccgagtgcaccaactggaacagcagcgcgttggcccagaagccctacagcgggcggaggccagacgccatcaggctgggcctggggaaccacaactactgcagaaacccagatcgagactcaaagccctggtgctacgtctttaaggcggggaagtacagctcagagttctgcagcacccctgcctgctctgagggaaacagtgactgtactttgggaatgggtcagcctaccgtggcacgcacagctcaccgagtcgggtgcctcctggcctcccgtggaattccatgatcctgataggcaaggtttacacagcacagaaccccagtgcccaggcactgggcctgggcaaacataaattactgccgaatctgatggggatgccaagccctgtttgcacgtgctgaacgaaccgcaggctgacgtgggagtactgtgatgtggcctctgtcacctggggctgagacggaagccagctcagttccgcatcaaggagggcctcgcgaaatcgctccacctgggaggtgcaatttgcaagacggagtggccggaaggggcgtgcgggacaccaaaccgcgatctcggcgccgtcagaagtcgccacgcgggtggcaaacgggcgcaacaggcataggcacaaaccaacgtacacaacaacgaaactgggaaaaacacgaagagcatagcgaacacaagann

SEQ ID NO: 12749 - DNA, 1160 bp, Homo sapiens
  misc_feature 1153, 1154, 1155, 1156, 1157, 1158, 1159, 1160: n = A,T,C or G
cgcatttatcctaaataaatatctttttggcaactgcttttccctatagtgtaatacagtaacgctatggggcatgtatacatgtgtgtgcataaggaacatccgtccatctctagctgtcatgtctgagaacattaataaaaggctcgacctcatgcgcctgcaagtgatcacaagacagttactgaagcattcaaagaagcaatgtctttgtcatctgactcattttgaaaacgcatgagaatgctttcccaaggcaatttcttacaaaatacaccgtgggacatttttcctatagtttattgttgttgatgatcatcgagaactttgtacccagagacactctacactgtgagtgtcccctgatattccctcccactcagcctgatcagtggtatctgacctccaactactcgctgcaacaacccgttctctagctgagtgggcctggactttgaacagaattaacagcctggaagtggagttctcaatctcaacagccccttacctcatgcaaatttcttttgagctgaaaagaacaaacagaatgccaccttttaaaacaaccttcttcgaaacatggggggaaagtcaggttttatataaatcagagagatagaaataaggcccataataaaaaacttgaaatagatttgggaagtttccgaaacttccaaaaactagtggtccaaagtgggcaatattttttgtgtgcaattgagaggcccttcctgtttccttgggtccatgctggtgtcttgccccgttccaggaaccctgggctcccctgtgctgagcagcccccacacctcagcccaaagcctcaccccttgcctgaccacaccccatttcttttggcacagcttcccagacttacaagatgtcttgaagtgactgaatggagttagtgttcggcaggactggctaggtaactactgggacttggtgcagaatgtagatgtagggctccttgttcaaaaattaggaagaatttcaagatagccacagcagagcattaaaacaaacccaggttggctaggtgtggtggcacactcctgaaatcctagcactttgggaggacgaggcaggcggatcgcttgagctcaggagtttgagaccagcctgggcaacatgacgaaaccccatcgctacnnnnnnnn

SEQ ID NO: 12750 - DNA, 447 bp, Homo sapiens
cgggatgttttacctaggtaaattatcctgctcataacttgtaaactttatctgttttctgtctccatttcttaatcattaaggtcaatatggattcttactctcttcttcaaattgtaatataattgacaggtttaataaatataggtcaggttcaggttcagatttgagtgtgtgtgtgtatgcgtggtggcgggcacctgtagtcccagctactcgggaggctgagccaggagaatggcgtgaacctgggaggcggagcttgcagtgagcggagattgggccagtgcactccagcctgggcaacagcgagactccatctcaaaaaaaaaggaaatgtgtatcaagaacatgattatccaggggtattttctaattcagatcatcaaactgattatatagaagagttggcttttaaaatgtttggcaaatgtcttttttttttta

SEQ ID NO: 12751 - DNA, 1371 bp, Homo sapiens
  misc_feature 1370, 1371: n = A,T,C or G
acgcgggggacaactcggtggtggccactgcgcagaccagacttcgctcgtacgcgggctttataattaatataatgtttctgattagtgttatgataggcctcattttattaaagtcttttatattcttggatgaaattttaataactttcttcataaatgtcttgcacatttcataataggcttattcctaggtgttttatagatttttagttttggttgtgagtcttttaacttacataaaaatatggagaattagcatattcacatatctattttgtgatgtttatcatacggaagttttaaaatatagtaaattcagtctttccatttttttttgtttatttaagaaccattccctagctagggtcatgaatacattcttatgaattattaatcccatatggatagctagtttccctagcacctttaaaaaatagtttattattttcctcctgatgtataaggccacctttaccaatttacatataatgtacggaaatgtttcttggctctgcattctgttaaattggtccatttatctaactttgcttagtaacccactgtttttatcattgtggtatcataattgattatcacaaatggtagaatgattgtcctcaaagtcttttctggtatatattgatataattgtatagcttttcttggtgtagtaaagtacacagttaaattttctaacattgaaatatcttttagattttcacttccagaatggcaatgtgaagggccctgtggacccactgtcctaggaattagctataactagtgaaaattgtaacaaaaaataaacaccttcctctcatacagagagacacaaacacttaatgccactggaaattgtcctaaaagcatgtagaataaagtaacgcttattcaagaaaatccaaatcttggtaagaacagtgagtcagacatttcagccacaacacactcactccctccctcccatttcagtgggtgcagccaagaaaacagagctccgtctccctcagctccctgtccagaggcatggtacctcacagggaggggcaagatgccagcatttcttatcccctccagcttcaagtggcaagagctaaattcatgaagttaaaaactataataaggaaaagatgcactaaaggggttcaatagtagatttgaactggcagaagaaatggtcagccaactggcagatagaataagagagatatgctttccaaagaacagagagaaaaaaaaatggaaaatgagcaaaacctcagagaaatgtgaagcaccattatgtgcaccattaagtatgcatgtaatgggagtacaagaagagcagaagaaaaaggacatatttaaagatacgatgactgaaaacnn

SEQ ID NO: 12752 - DNA, 643 bp, Homo sapiens
  misc_feature 1, 2, 640, 641, 642, 643: n = A,T,C or G
nncgaatatgagctccaacgcgcggggcgggccgcccgggcaggtacgcggggaggctcctggggtggagtccaaatcactcattgtttgtgaaagctgagctcacagcaaaacaagccaccatgaagctgtcggtgtgtctcctgctggtcacgctggccctctgctgctaccaggccaatgccgagttctgcccagctcttgtttctgagctgttagacttcttcttcattagtgaacctctgttcaagttaagtcttgccaaatttgatgcccctccggaagctgttgcagccaagttaggagtgaagagatgcacggatcagatgtcccttcagaaacgaagcctcattgcggaagtcctggtgaaaatattgaagaaatgtagtgtgtgacatgtaaaaactttcatcctggtttccactgtctttcaatgacaccctgatcttcactgcagaatgtaaaggtttcaacgtcttgctttaataaatcacttgctctccacgtcaaaaaaaaaaaaaaaaaaaaagtacctgcccgggcggccgcccgggcaggtactcttacttggcatgcagacatgtctgactccagagtgctggttgtagaataggagaaaacaatcccttgaagataaacnnnn

SEQ ID NO: 12753 - DNA, 892 bp, Homo sapiens
acgcgggaacatcaaactgttaatcgaatgcaggctccagggagaagcaacttcctgggcatgcgtgttaagagacaaaaaatgatgacgtttgatgaccactccaccagaaaagggaagaaagcctgaggggcctacgtggacctccctaaacacactgcgcatgctccattccaaacggtatggtgagcactgcgcatgcgggaaacccaccctgtaagggaagaatcctgggaaagaggcaagcctatgaagtcccaggatcaaggttaaagacccttttttttactgtcttcttgtgctctcttttctctcttggaccttcaggcgcctgcttgggtctctttcaagcgaattttgctttctttcctgttctaaagccttttaactaaacttccactcctgctctgaaacttgctctctttttctgccttaacgcccctcagtcgaattctttcttctgaggaggcaaggactgaagttgctgtggacccatagggattcgccattggtaactcggggtaactcggctctcttccactgctgacgtatgtagcaagtccagtcttcgggttggcaggcaccacggctgacaccacatgcgcagagagaggggaaagaccaagaagtgactcatgacatcaccctcgtctctgaaagacaagatgttggtctcctcaggtgccgtgcagtcttcagtgttggctgcagccacagcccctgcaatgcagaccaggatgagggaaagccgctggaagaggcctacagcattttttattagtaaatccagaggacgtgttatataaagtgtaagacaaccaccattgcatgcatttattcattcactcattcagtaaggaattttccatttctttataaatgagtaaaaggt

SEQ ID NO: 12754 - DNA, 579 bp, Homo sapiens
  misc_feature 579: n = A,T,C or G
acagcctgcagaaccatgagccaaataaacctcttttctttataaattacccagcctcaggtgtcttctttatagcagtgcaaaaacaaatgaacacagtcccattcagtatttcaaaaagaatcatttaccagccattgtctgctctgtgggcccaagagactttgtcccaggtcactgcgtgttctccaagtccattcatttccccgtaaaaatgttactatccctcaaattgccacatttccctcatctccaattgccttatgaaaaagggtgtataaacatttccattgggttgctgggcattcattctcctgcaattcccccgtgctatgcatgttagaataaattttgtatgcttttttttcttattaatctgtcttttgttgatattcacaaacctccagaaagtaaagggggaagctttcccttggtccctacagatgaggtgctgtgaacaggattaccgaaaccactctgctcttctggaagccagattcgagggaaccccagacctggtttgccagccaaaggggagaaattcttatcagtcactcttggtcactctttgtgaaatcn

SEQ ID NO: 12755 - DNA, 1475 bp, Homo sapiens
cgacccacgcgtccgctcgagggtcacattcacggtctggcagaggaagcaggggtgaccgccgcagtcctcctcctgctccccttgccgagtcacgtgtcacgaagagcaaactgagcaaactgagctgcgcagatgaggggagactcgtcaccaggcgtgcagtgggcactgctgggctcccccatcccgtcctaacccggaacagccccgggcaggaggcgtggaaagtcgagggggtaaaccgcgaatgtgcgttgtgtaagccacggcgcagggtggggcgcgggcgggacttgggcgggcggggtgggcttggccgagctggcctccggggcaccgaccgctacaaggccagtcggactgcgacacagcccatcccctcgaccgctcgcgtcgcatttggccgcctccctaccgctccaagcccagccctcagccatggcatgccccctggatcaggccattggcctcctcgtggccatcttccacaagtactccggcagggagggtgacaagcacaccctgagcaagaaggagctgaaggagctgatccagaaggagctcaccattggctcgaagctgcaggatgctgaaattgcaaggctgatggaagacttggaccggaacaaggaccaggaggtgaacttccaggagtatgtcaccttcctgggggccttggctttgatctacaatgaagccctcaagggctgaaaataaatagggaagatggagacaccctctgggggtcctctctgagtcaaatccagtggtgggtaattgtacaataccactaacaccaggatcaccattgcacacgaacaaacacaccaaccgcacacaaaacaccgacacacacaaaacaggcgacagcggccgccaaccacacaaccgcagaaggagaggcccccacaatctccacgcggaccaccgcaggcacacatgacccaaccgcaagagacccccaaacaaagaggcacgaaaacaacagaaagacgacagacgcacaccgagcacggcactacaacacaccgtacacgagagcgggacacccagggcaaacacggacgcgccacccacgaccccggacagccccacgaacatgcgcgaggctgcccccaccacagggacccaccccacccccacacgcccacctcccgcgcccgccagcaggaccacaccgaaacagaacaaaaacgcactcccacgcgtagcccgcaccacacacatcgagccgccgctcccacgacccaaacgggacgaaacggggcaagccaacagcaccaaaatcacaacccacgcgcgcgccacgcaaacaacaaccccacaccgaaaccgaccagcccgaagagacgccgccgccaaccacccacgaccaagcaaaagggcgcgcaagcgaccagccgccgagcgcgcaccaacaacacggcgcgcccgcagccccagcagaagcccgcgagacagacccacaccga

SEQ ID NO: 12756 - DNA, 360 bp, Homo sapiens
  misc_feature 360: n = A,T,C or G
acaagtagtcaatttccaggtgaagaccctggtggactgcatttgacttgtcatgccgcctaacattcaagggcagacccccagagagcatttctgcaagggattcacactcacccgtttctcggacccctccattctgctgccagctcaaccgcaggtccaaagaaacggagtcactcgcactaccctacttccccagcgtaagcagtctcaggccgaggccccaccagtgggcatcctgagtgcacccccatgtcaacacaggctagaggggagtcaggcagagagcacacaggactgcggcctgcagcggagttaaagggcttcaccgaagggctgccatcctttaagggggccagn

SEQ ID NO: 12757 - DNA, 529 bp, Homo sapiens
  misc_feature 1, 2, 527, 528, 529: n = A,T,C or G
nntatcttttcaacttctccatatatctataactattctaaagtaaaagtttattaatttctaaaacgaaggttactccctaaagaatacaattaagatacgtagcttgtaatcaggtgaagaaggaaaaagtcgattaaaaaaatacttagttcaagagggcaggaaaccgggcgtagtggcatgcacttgtagtcccagctgctcacggggctaagatggaaggatcacttgagaccaggagttcaaggccagcctgggcaaaatagtgagaccctgtctctaaaattaaaactttttttttaaagacaggagataagaaaaagttgtctatggggggagaggttgataagcattatatacaacacacacaaaagaaagtggcaaaaacaaagtttgcattttaaggatgcggtatctcctgtcctgttcccctaatttaatacttggctggcactctccaattcccttctcacttcaacacttctttcactcgtatcccaagccccttatcagtgatctgcaannn

SEQ ID NO: 12758 - DNA, 1603 bp, Homo sapiens
  misc_feature 1, 2, 1602, 1603: n = A,T,C or G
nngccgcgggctggggtaggcggcagtggggtccctggctttggggcactgggaagatcgcgagtgggaaggtcctcccgcggtcctccgggtcatctttcctcctgcggacctaaggagtcgcagttgtgaacaggttagagttacttgttattggtaaatagccactatggagactaaggaccagaagaaacacagaaagaaaaacagtggacccaaagctgcaaagaaaaagaagtggcatctgcaggatctccagctaggagacgaagaaaatgcccagaagagaaatgccaatgcttttgcagttcagtctgctgtgtggatgtctcgatcctttcacaggactctggatttgaagacacaaaagcatcatattccagtggttgatggaactccactagagccgccaccaatagcggtagtggtgacggggcctccaaagttggaaagagcactttgatataatgcctcattcggaacttcacctggcagaagttcaccgagatcagaggccctgtgacgatcgtgtcaggtaaaaagcgcagactcaccattattgaatgtgggtgtgacattaacatgatgattgatctggctaaagtagcagatctggtaagtgagcaggggcagcctggggtgctgatggagacttacagcattgtgataggttatttaccccgtgatgaagggaagagagttttgtgattattaaaaggatcatggtcattatcagggatatagtagatgtgattgaattgatgatgataataataatagtaataaatgttgtcatattaataatacaaatggaatgtgcacaatgaaatgtgttccaaaatctaaaagcagatcacaggatggagaaaacctttaatgaacacagctaataagagctcatttacatgcatacatatatatgtacacattttgcatagtaagtaccatttcttcttggacccttcctggcactgtgctaactgctttctacaactttagcttaccataaacccttgatacacccttgaggtgagtaggtattatctgtagtttacataagatgaaatagagcctcccagcagttaagtaacttgtgtgaagatgggacccttgttcctgatggttctagaaccttcatccttaatgataatgctaaagtaagtacatgaattgcctgaagaagtggtcagagtttatcaatagaaaatttagatagtactcagcgtgtggaaaatgtacatttatggaaatgataatgttcactatctctgatattctatgatcttttacattagcaaaaaaaaaaaaaaaaaaaaaaaaaggccagacacagtggctcatgcctgtaatcccagcactttgggagaccgaagtgggtgaatcacctgaggtcgggagttcgagaccagcctgaccaacatgcagaaaccccgtctctactaaaaatacaaaattagacgggtgaggtggtgcatgcctgtaatcccagttacttaggaggctgaggcaggagaattgcttcaacccaggagatggaggttgcggtgaggcgagatcgtgccattgcactctagcctgggcaacaagagtgaaattctgtcnn

SEQ ID NO: 12759 - DNA, 444 bp, Homo sapiens
  misc_feature 442, 443, 444: n = A,T,C or G
acaataaactgctgtcagtgctgctggaggaaggaagagtaactctgacatcactggccttcaacaggcgtggcgctgagcttctgggcctcagaagccctgacttctagaggctgggtgccagcggggcagggaggtgatctcatcatggatggccacagatcatccacctggaaatgttctcgcaaatgaaactggaatgcatgatgtcctggattcagcgggtcacagctgactgccatcaggaggtgtgacggagaaggttccatttctgtgaccctgtggtgatacaggtcgggacccaggcgaagtagctcagccatctgaattggcacctttctgcttttctcgctgaatgacgggtgccttgcagttggcttcagatgtttgtgaatgtgctgtgtttcctccagggctgctgtgaagattaaacgaatggacnnn

SEQ ID NO: 12760 - DNA, 818 bp, Homo sapiens
  misc_feature 1, 2, 3, 4, 818: n = A,T,C or G
nnnngagacagggtctcactcccatcttctgggctggagtgcagtggtacaatcacagctctctgcagcctcgacttcctgggctcaggtgattctctcacctcagcctcccgagcagccgggaccacaggtgcacacccccccgccccatgcaatttttccattttcagtagagacgggtttccatcatgccgatcaggctggtctcaaactcctgggctcaagtaatccacccgcttccataggggtgagtcactgcaccctgccaacatttttcaaaagtaaaaaataaattaaaaaaaaagtctttagtggattgctgagtcccctctgacaggaggtaccaaatgtgcttttcctgaggacaggggaagagttcactattcagccatacctttgcatattttacaaaattcacttctaccaaggatgcctctccacaaaatgaggagtagcacaaagaacacctaagaaaccaggcctgacccagggcctctgatgctggggcaggttccccgcgtgctaatatcccaggggaccctgttgcagttctctgaataccggctgtgagctttccaacttcagttgagtcccagcatcctcctcacaccacttatcctccctgcctgtccctggcgcgtttagacaactggaatctttgctgacattttaaatgggctggctacttctccagcgtggaggcacctagcacaaggtgtgatagatcagtatttgttgatgagtaacaaagttattctggcaaattggacttttcccctgaaacgttttggcttttacatttttaatgatgggtcaan

SEQ ID NO: 12761 - DNA, 603 bp, Homo sapiens
  misc_feature 603: n = A,T,C or G
tctcattccagggactgattgtttttatcaccttctgtctggtcctgagtgactcactgtgtcacccagaaaagagacctgtcaggcagaatcgagcttaattcacctgctctaaacaattgttactgacacactgcttttaggttttcttctagcaccagataaactctgaaatcaaagcatggatatgagctcagtaggaaactaaggtttgagggagaaagagtttgtcacttagacctcttggctgttaactgaaactgaacttgctcacatcatctgcttccctgtaatgaactatgagggttctttatcctagtttctatttatgaagatggttgaaaattttcaagacacaagattttgaaaactcactgaattatgggcaaaaccatgactttcattgggcagacagagtcttctaagcccacagggatccccagatggatttttcaggacaaatggctcatgtgcctgtacttattgtctctgtggtgtgtcaagaagtagctaatggtttcatctgaaagctgccatagaaattctgtgaaccaaaatgagacaaggcagcaggcatacagaagggtttgtcctgctctgggn

SEQ ID NO: 12762 - DNA, 299 bp, Homo sapiens
gagctcacccagtgggccacgggctccggactccagaactttccaagtgggggaaacttggcggcgggatgaaaagtgagccagctccagccggtggaggatggtttgaaaaaggcaccatttctgcttcctctactcaagaaccaaaggctttagattattttcctgccagcaaattaagagccagtaatcgccaatgtgtcctgccctatggtaaccccggtctgtctgaaggctgcatgtttttctgctaaatgtgaatttctgttccatcattcaacagacatgtgttggggatc

SEQ ID NO: 12763 - DNA, 2677 bp, Homo sapiens
  misc_feature 1, 2, 3, 4, 5, 2675, 2676, 2677: n = A,T,C or G
nnnnnctagaggatacggctagtacaccgagtgttctgagggaagcaaggaggcggcggcggccgcagcgagtggcgagtagtggaaacgttgcttctgaggggagcccaagatgaccggttctaacgagttcaagctgaaccagccacccgaggatggcatctcctccgtgaagttcagccccaacacctcccagttcctgcttgtctcctcctgggacacgtccgtgcgtctctacgatgtgccggccaactccatgcggctcaagtaccagcacaccggcgccgtcctggactgcgccttctacgatccaacgcatgcctggagtggaggactagatcatcaattgaaaatgcatgatttgaacactgatcaagaaaatcttgttgggacccatgatgcccctatcagatgtgttgaatactgtccagaagtgaatgtgatggtcactggaagttgggatcagacagttaaactgtgggatcccagaactccttgtaatgctgggaccttctctcagcctgaaaaggtatataccctctcagtgtctggagaccggctgattgtgggaacagcaggccgcagagtgttggtgtgggacttacggaacatgggttacgtgcagcagcgcagggagtccagcctgaaataccagactcgctgcatacgagcgtttccaaacaagcagggttatgtattaagctctattgaaggccgagtggcagttgagtatttggacccaagccctgaggtacagaagaagaagtatgccttcaaatgtcacagactaaaagaaaataatattgagcagatttacccagtcaatgccatttcttttcacaatatccacaatacatttgccacaggtggttctgatggctttgtaaatatttgggatccatttaacaaaaagcgactgtgccaattccatcggtaccccacgagcatcgcatcacttgccttcagtaatgatgggactacgcttgcaatagcgtcatcatatatgtatgaaatggatgacacagaacatcctgaagatggtatcttcattcgccaagtgacagatgcagaaacaaaacccaagtcaccatgtacttgacaagatttcatttacttaagtgccatgttgatgataataaaacaattcgtactccccaatggtggatttattactattaaagaaaccagggaaaatattaattttaatattataacaacctgaaaataatggaaaagaggtttttgaatttttttttttaaataaacaccttcttaagtgcatgagatggtttgatggtttgctgcattaaaggtatttgggcaaacaaaattggagggcaagtgactgcagttttgagaatcagttttgaccttgatgattttttgtttccactgtggaaataaatgtttgtaaataagtgtaataaaaatccctttgcattctttctggaccttaaatggtagaggaaaaggctcgtgagccatttgtttcttttgctggttatagttgctaattctaaagctgcttcagactgcttcatgaggaggttaatctacaattaaacaatatttcctcttggccgtccattattttctgaagcagatggttcatcatttcctgggctgttaaacaaagcgaggttaaggttagactcttgggaatcagctagttttcaatcttattagggtgcagaaggaaaactaataagaaaacctcctaatatcattttgtgactgtaaacaattatttattagcaaacaattgatcccagaagggcaaattgtttgagtcagtaatgagctgagaaaagacagagcatatctgtgtatttggaaaaataattgtaacgtaattgcagtgcatttagacaggcatctatttggacctgtttctatctctaaatgaatttttggaaacattaatgaggtttacatatttctctgacatttatatagttcttatgtccatttcagttgaccagccgctggtgattaaagttaaaaagaaaaaaattatagtgagaatgagattcatttcaatgtaatgcactaaagcagaacacgaacttagcttggcctattctaggtagttccaaatagtatttttgttgtcaaactttaaaatttatattaatttgcaaatgtatgtctctgagtaggacttggacctttcctgagatttattttatccgtgatgtattttttttaattcttttgatacagagaagggtctttttttttttaagtatttcagtgaaaacttggtgtaagtctgaacccatcttttgaaatgtattttcttcattgcaggtccacctaatcatcctgtgaaagtggtttctctatggaaagctttgtttgcttcctacaaatacatgcttattccttaagggatgtgttagagttactgtggatttctctgttttctgtcttacaagaaacttgtctatgtaccttaatactttgtttaggatgaggagtctttgtgtccctgtacagtagtctgacgtatttccccttctgtcccctagtaagcccagttgctgtatctgaacagtttgagctctttttgtaatatactctaaacctgttatttctgtgctaataaacgagatgcagaacccttgaaaaaaaaaaaaaaagaaacaaacttggcctgttccatttccaataannn

SEQ ID NO: 12764 - DNA, 3523 bp, Homo sapiens
  misc_feature 1, 3509, 3510, 3511, 3512, 3513, 3514, 3515, 3516, 3517,3518, 3519, 3520, 3521, 3522, 3523: n = A,T,C or G
naggaagaggtatttcttggggatgctaccaaggcacgacccacgcgtccggaagaacgttgcttgggcaaaaggagcatattctcaggagacggggcccctgcctgccacaccaagcattaggccaccaggaagacccccatctgcaagcaagcctagccttccagggagaaagaggcccctgcagctccttcatcatgaactggcacatgatcatctctgggcttattgtggtagtgcttaaagttgttggaatgaccttatttctactttatttcccacagatttttaacaaaagtaacgatggtttcaccaccaccaggagctatggaacagtctcacagatttttgggagcagttccccaagtcccaacggcttcattaccacaaggagctatggaacagtctgccccaaagactgggaattttatcaagcaagatgttttttcttatccacttctgaatcatcttggaatgaaagcagggacttttgcaaaggaaaaggatccacattggcaattgtcaacacgccagagaaactgaagtttcttcaggacataactgatgctgagaagtattttattggcttaatttaccatcgtgaagagaaaaggtggcgttggatcaacaactctgtgttcaatggcaatgttaccaatcagaatcagaatttcaactgtgcgaccattggcctaacaaagacatttgatgctgcatcatgtgacatcagctaccgcaggatctgtgagaagaatgccaaatgatcacagttccctgtgacaagaactatacttgcaactctttttgaatccatacaggtcgtctggccaatgattcttttacttacctatctgtctaccagtagcggtccttgcccatttgggaaactgagcttctttcttctgcactgggggactggatgctagccatctccaggagacaggatcagttttacggaaacaactcagttagtatagagatgaggtccgcttctgtagtactgagcatttctgactgatcaaaaaggcctagtctgttgacagggtttgttttattttagcctcagagtataccatactactagggagtaactgtagagtgagaaattataaacattatttagggattaccatggtggaagagggataaacataggtcctgtgacttcgtctctgttctcaagggaaccccattcacatgcccctcctaactccacaagcgagggtagcagaggctctcctcagtctgaactaaggcttggccttggggagggctcctagtgctgagcttggagcagcacggacagcagcattgtttatgggaatggagagaggtctgggcaggataggaaccttcttggagacccctttgaagaaaaccaggcagccaagggagccaaacacactagatttctgttcttcagcaaagccctgaagagacacttaagctaaaaattcccttgtcatatttctgaaactccattataacatatgtaactcctttgtaaccaaaatttaggtaagcaggcttcctttgctctgaaggttttgagtacctggctgtatttgttgagtatttttaaaattttggatagtctcttaggcaacaataatcacaatatattcatcccttcagttctggagaaagcctgataccaggcacagcctactgaccccaaggagcctggcactgattggcatcacattgatctagaactggtccagccgacgaagagtaggaaaagagaagggctgctcagggaaacattggctgggggcacggaataagcacatagtaaaaagggaacatcagggtcaaatggaaatcacctgagacaggaaacagggagttcatttggccacactggaagaaaggcaagaaagaggaagacaagtcttggagtaccctggctgttctccacactcacaagacatcagctatatactctgcttggtgcataagaaagagaaaagagatgccttttgtgttttgagtaagaataattaaaccataaggaagaccatgtataaaactgatggaaataatagtcaccaaagtacagcacataccattttgtgtctaataacaatgtagcacagtaatgactgtacatgtcattgtatgtataccaaacaagattgttgtaaatcatattttttattacaacactaagttctgcttctgcaaaaaaaaaaaaaaaaaaatatgaaaccttagcatggccacttacaattttttaacatgagataacacatcaggtgtcagaacttgcttgaagggaattaccagaagtaatttgtgtttgagatggggtggaaattggaattatattagtagccggtggagatacaagttctctgactgtgttgggaaaggataagtgctaccgttgagaagggaagaaaggctgagtctaggtggagaaaaatatcaacagaactctagccaaaggcaagccccagaactcagacaacagaaaggaaatcctaatccttctgttttgagaagagagaactgtagttgcttcacttcctatttcatgacagaataactgcaaacttttaagatcaggaaatgtagacatctagtgatttctttagtagacagtttaatttcccccaagattaggagacacttctgtgcaggttctaaaaggagcccaatggcctggggtgggagtggggagtagatagggaatatgtgggatttggtttaagttcatcattgggagagttcctggatccttgcaagcttagataaatgtgatctttattagatagcagtggcatgcttttaaaaaaaaaaggcaatgaaaatttagcaagccactgaatttgagttttcactttgtttctaatatgctgtgtgaatcagtacagttttcttaccctttcttggtcttaatttccttactgataaaatggggtagtaatacctatctcaaaaaattattgcacatattaaataacattcctctatgtatctcaatggcattagacattaggagaagcattttgtggaggatttgaagttgagatcttcatccaagaagtagcttttcaatttgctagaagcttaatgtaggcaagccacttcatttttcagaacttgtttactcatttataatatgggaataaaaatttgtgcaagtcagagaagggtgccttaaaaatgttgtggccaagccacatgagatcaaagacacacttttcatgacctcaaatgtgggcccagcctaggtcagccaacccccatccaacccttagactcacgaacaaatccacctgagatcagcagagccaccctagatcagctgaaactctaagcacaaaaataaaaacttatcactgtataccactggagttttctggttatctctcgtatagcaaaatctaactgatgcaatctccatctggccttcatccttctccctttattgtcctttcgtgtattgttcatccagcaaccaggatgatcttgttaaaacattaaacagattctgtcactcnnnnnnnnnnnnnnn

SEQ ID NO: 12765 - DNA, 2348 bp, Homo sapiens
  misc_feature 1, 2, 3, 4, 5, 6, 7, 8, 9, 10, 11, 12, 13, 14, 15, 16, 17,18, 19, 20, 21, 22, 23, 24, 25, 26, 27, 28, 29, 2345, 2346,2347, 2348: n = A,T,C or G
nnnnnnnnnnnnnnnnnnnnnnnnnnnnnatctacaaggcccttcctgaaggtggaattgcgccttcccttccgcaaagaccggtttttttttttggccaagacgttataacaacgagggttagaaagaaaggaccaccatttcacagaaaccggagctttcaccttaaaagaaaaggatggggcatggaggaactagtctcaaacagcggcggacctcaatggatactgaacagcaacccttaccaaatagcatctcaagtcagcacctaagccagtgttattagattttcttacaaaaagttaaagctacaaacttcacatttttaaactgtacatagcaaaaacatttaagcttttttttttccaagttggtccgagtgcaagctggtaaaagagattttttttccaaacacaaacaagaacatgtattccaaagacaatgaatataatactgataaaaacacaaacatagtgcttaagaaaagatggggtgaggtggagatgtagattgggcaggaacaattttctagtaaataaggagctgcaatctttagaggcaacatggtatgctagaaaggacactggaataagaatcagaagacctggatctgaatcatggctctgccatattctagccacatgaccttgagcaatagactttacttctctgagcctcaattttcacatctgcatgaccttgggaaggaatctttctctctgaacttatttcttcaactacaaaatggagataaagtagttaagtcacagggttattgtgaagtttagagcctacccagctcagtgcctgatatataataggtgctcaacaaatggtagctgtcatttattattccagcaagatcctcaaattgtcctctgttttccgtatccgccacatagctatttcagttgccaagccctgaagactaacaactgcctcttgcattttttaaaaacttgctttaattgcaaataacagaatctggccacagaagaggcacattccctgcctttccattgattcccaggtttcaggagcaaaagcaattatggagtcaaattacagtatcctgaggtgcaacccagtcatggctccccatctgagggaaagaggtaaagttgcaggaagatggctctatgctgtcttttgcaaagccctctgatctgcttcaggcccgaaacctgcctccatgggtgcttgtctgctatatctggtagatgttgtggagctcaaggactcgctgaaactgaatgatctggctcgtccagggaatctctttacagccaggtcatctactgaagagccaaggcaagagcaagtttctgttagcaaggttccctggaacaattaaccaagactgacacaggtctcttcccccaaagaaggggctgcatggttcggtggcctgggagtgaggaccctgaattctagtctcagctcttaacgctaacttgctttgtgattttggccattcccctctctacacctcagttttccgatcatccgtacaagagggtcagaccagatgatctctatagtcccttccagctctgacattctgtgtgttcagattgagcctcctggaaaacaaatcttagtctaatattcatttatcctttccaggctgcttagcagtaaaagagaaaagaaaacagtcacatatttgaacgtgggtcacaaaagcaatcccctctacccctgtgtgtaaggaatgtggagcaacatgccacgtgtatgatttttacatgaacaatgagagcttcaaaaacgcttttcctttgtggactgaacacagtcccgtgtttgctgagagtccctggtagagatcatgtctcctcttaaggcactgggcagtatctgtgctgtgactttaggcagttgagagagtggagatggatgaaaggcattgaaagagcaaaggccaatttgcaaagagggtgccaggcttctcctgggactcaaagagtaaacataaactctcaaagctttcccttggacatcaccaatagctccagaagccagtgatgaccacacaaggctgaaaccacggtacaagaactgtcccaaacctaatttttaaatgcagccctgcaaagggggaggttggctcctgggattcagtgaccccctaacagcctcccggtgtcctctgccctcatgttccacagtaccataatcttacagaaaagaggcaaaccgtttaaaactgtacctgtacagagatgccaccacactgcgtggggaatctatttataatttatacccatatatgcatatttatatttttttaaaagtcttccagaaagaacaattgaaagctatagcggacgcgtgggtcgtcnnnn

SEQ ID NO: 12766 - DNA, 2163 bp, Homo sapiens
  misc_feature 1, 2, 3, 4, 5, 6, 7, 8: n = A,T,C or G
nnnnnnnncgagaagggtgatgtatgttgttgggagaggtagacgagggaggggacggaggaggcgaggcacggagcggggacgagtagcgtggctgcgtcttgttgttgaggggtagggaaggtggagaggtggtgggcgtggacagcgaaccggcgagctgtgggtgagtgtggaggagatcgggagggagggggcggggagatggaagatagagttggaggtaaggttgctgggtgccgtgtggggtggtgggagggagagggggagagagggaggcggggagggagtgggcaggtggggggcggcaagggcaagggggggagggtgtcggggagggcggagtggtaggagttgctcgtgtgttgtggtgggtggagggcgcgtaggagggtgggtgttaggagcgttatgtcgatttcgttgcgggggacggggccaaggagaactgaggatcggggcaggcagagtaacgagtcgggtatgggcgaggggggggtgaggaggaaggcgattatgatacagtgtgggcgccgtggcgagcgaagggcactggatgtagcgtcggtgaggaggagagagggagggggtggcggaggagctggtgcgcgggcgagagggggggcgcgggggcgggggcgggggcgggggagaggggggggagcgggggcgggaaaggcgccaccagacatgaagggtcgcggtggtccgaggcgcggaggggccggggggggggacgacggaggaggagcgtgggtgcgacgtggggggcgtggtgggcgcggagcgggcccagcgggggctcgcaggtcgggcggggggcggctcgtagggggttgggcggcggtgagggaggagacagacagattgggcggggggagcccgaggggccagcggcggggcgggcggaggagcagcggggggggcgagggcgcgaggagggggcaggagcacagcgtaggcgggcgagagtgggaggggcaggcggtgggaaggggggaggagggaggagggtgggggggggggcagagggggggtgcaggggcgggtagtgcgggaggcgaggggggggagatgagcgagggcaggggagcgcaggcagcggccggcgggcgcgggagggaggggggggggagggggagggaggccagtggaggggcgagaggtaggtgcggagcggtggcagtgagggggagggaggtgaggagagcagaggggaggagggggcagcgggcaggagggggggccgagcagggagggcgaggagggcggtggtgcgtgcaggaggagcggggcgggagccgaggggagcgggggagcggggggggagcgcgtggagaggggaggagagaggtgggcagtgtcgtagtggggcagggcaggtgggggttgccgcgctgcagtgcggccagttagtggggagcgacaggcgtgtagaagtcgagtgtcaggcgtcggaagtcccgtgtgaggccgttagcgagtcacccaggtatcgtgcctttgacgtccgtctgagaccggtgctcgtccggtgcgtgcaggggagtgccagtgcccctgcgtgggtgagcagcgtgcgtgacagagtggactgtgaatattctgtcaagtacttgtggtcctgggtcatcaggggttgcattctacccagttacagagggtttcccatcgaggaggccagcagcatcagagaagtggcagggggcctttcctccgtgtgtagggccggccttgctaacccgaaacatttcctagaaatgtgctgcttgctaacagccgctgcttcactttcagctttcagagtccactgctgaatcccacttaatggagaaggaactggatgaactgaggatcagccggaagagaaaatgaagaccccagagacatttattggggagtaggatgtggctgagtgctttttttttggccagactagcggattcagtcctggaagagagtatcatataatgagacccacaggcactggcacccttgggttggcaatagaaggtgacatggaatggagaaaaccaagattccagatggggatagtaactagaaggtgcttcagatgcactgcctgcgggtgccagtctgaaaaccagaccgcacagaggcctggggctgctgatgagctttttggtgctctccaccggacgc

SEQ ID NO: 12767 - DNA, 438 bp, Homo sapiens
tttaagatgtaagtctggcattgtggaaagatggttccagtttctatgacctaccttggggaagaggaattcaagtttctgtggcttgccttcagggagaatgaggctgagacaggagggcaggataacatcagagaaaaactttgcttctgaggccttcactttgggttttctgagccccaacatctgctagtgttgtaaagagaacaattagggaccaagtgaggggaggaaagcatccatctctgcattctgatgctgggagactatttccttgaaatgcaattgattttgcctctgctaagaggctctgctggctacccatgtacctgcccgggcggccgcccgggcaggtacgcgggggaagcttgcttctgcctggcatctgtgagcagctgccaggctccggccaggatcccttccttctcctcattggct

SEQ ID NO: 12768 - DNA, 2753 bp, Homo sapiens
  misc_feature 1, 2, 2731, 2732, 2733, 2734, 2735, 2736, 2737, 2738, 2739,2740, 2741, 2742, 2743, 2744, 2745, 2746, 2747, 2748, 2749,2750, 2751, 2752, 2753: n = A,T,C or G
nncctgggcctctctgcctgctgtagccgtctgccgcgcccttgttcctgcagctgtccagttatcttttgactgccacatatggaccccaaaagatctcaaaaggaaagtgtcctcattacaggaggaagtggctattttggttttcgcctgggctgtgccctgaaccaaaatggagtccatgtgattctgtttgacatcagcagccctgctcaaaccattccagaaggaatcaagtttatacaaggagacatccgccacctgtctgacgtagagaaagccttccaggatgcagacgtcacttgtgtgttccatattgcctcttatggtatgtcagggcgggagcaactcaatcgaaacctgatcaaagaagtcaacgtcaggggcacagacaacatcctccaggtttgccaaaggagaagggtgcccaggttagtttacaccagcactttcaatgtcatctttggaggtcaagttatcagaaatggggatgaatctctgccctacctgcctcttcacctccaccctgatcactactctcggacaaagtcaattgcagagcagaaggtgctggaggcgaatgctacacccctggacagaggcgacggtgtcttaagaacctgcgctctgaggccagctggcatctatgggcctggagaacaaagacaccttcccaggatagtcagctacatcgagaagggtctgttcaagtttgtctacggggaccccaggagcctggttgagtttgtccacgtggataacttggtgcaggctcacattctggcctcagaagccctgagagctgacaagggccatattgcctctgggcagccctacttcatctcagatggcagacccgtgaacaactttgagttcttccggcctctggttgagggcctgggctacacattcccgtctacccgcctgccattgaccttggtctactgctttgcttttctaacagagatggttcacttcattttgggtcgactctacaacttccagcccttcctcactcgcactgaagtttacaaaactggtgtcacacattattttagcttagagaaagccaagaaagagctaggttataaggctcagccatttgacctccaggaagcagtggaatggtttaaagcccatggtcatggcagaagttctggaagtcgtgactcggagtgttttgtttgggatgggctattggtcttcctcctgattatagcagttctcatgtggctgccttcttctgtgattctgtcactgtgaaggaggggccagaaataaggtgatcacagttggctgagatggttctcaagaaacatgggttttaaaatgtgtacagtgatatctggtgccaaacattggctcttcaaattgctacttaagaataggttcttggattgaatctttatgtcttatttccttgcactaatccagatgggaatgaaaaagcagaagcagagattagtttgaaaaaaaaaaaaaaaaaagcttaggggttgggtgggtaccatagaagtcagtttggagccatagaagtaggcttagttgagttggagatgcccatcttgaatttctgagagggcaagatatacttatttccattttatgcagtctgcatctacctaaaacctctgactgatgtgggaatggcgaaacactatcaggcttgaatgcgtgtgaaaaacaccaaattggcccagatccctaacagagcaatcctcgaggggatggtggctattgctggagaggcattagctattcacagggtacgttttaggtgttaacttttgccctttatgatatcagggcattatgcctatgtgaacacatggtaatgtttgatgtttaaggcctttattctacctcataggattctttttgaggattaaattcaagcatacaaagcgctcctcaacacacatagccccctattctttttatcagaattgtcatggtacattccttatgagggctttcttcctcagtgttctctttagagggctattgctactggactttctgcaatgtcttttgggtgtgccctcagagcctgcaacaagtgtatttggatatactctatttgtaaagtttaggcctctaagaaggccacaatgaagcaactaaaaatctgatgattaagggagtcaatcaagctgatgccatttttagtttaaaaatgaagcagagctctaaactcatagatgggttttcttactgggaagaagattggctctctgaagacagcttccaatgaggaatgtattgaacaatggcagcactgtctggccacccacaaactgttacagatgatccagttacactgttgcataggaacccaagtggaaagaagacagagtccatgtctgtccatggctccagctacagaaaggatagtatgggaacattacaagggggatacattactgtggaaagttctgctagagttagtcttgagagtatctgtaaaatacaaatagatgagcaatccctgtggaatgctgcctggatattttcagaaaagctctgaacttgatgtcgtaataccaacaccgtgaatatcgtgtgtggccttaaccaaggaacagaagccctttagaacttagcttcctcacttgggagctgggactgactgcatttgccctttgtataaacccacccaccccatagggttcactgggagcataaagcaagatgtggtgaaagtacttctaatataaattgcaacatcagnnnnnnnnnnnnnnnnnnnnnnn

SEQ ID NO: 12769 - DNA, 814 bp, Homo sapiens
  misc_feature 280, 281, 282, 283, 284, 285, 286, 287, 288, 289, 290, 291,292, 293, 294, 295, 296, 297, 298, 299, 300, 301, 302, 779,780, 781, 782, 783, 784, 785, 786, 787, 788, 789, 790, 791,792, 793, 794, 795, 796, 797, 798, 799, 800, 801, 802: n = A,T,C or G
  misc_feature 803, 804, 805, 806, 807, 808, 809, 810, 811, 812, 813, 814: n = A,T,C or G
gatgtcaataatgattcttttctttctaatactatggcagaggagaaatattgaaactcctcattaaaaggatttaccggctgggcacgtggatcctgcctgtagtcacagctactagggaggctgaggcaggagaatggcgtgaacctgggaggtggagcttgcagtgagtcgagatcacgccactgcactccagcctgggcgacagaacgagactgtctcaaaaaaaatcaattgagacaaagcctcaattgattaaccttaaaataaccttcttaannnnnnnnnnnnnnnnnnnnnnnatataaatcatccataagcatattagtaaaagtacaaatcaacagatatgttttagagaagtgttaaattttttaaacgcaagtgtaatttaaatagaatgaaatacaacaatccgaagtgcatagacgatgaggtaagatttttttcatcaactttattgaagtgtaatttacatataataaaatgcaaccatatgtctacattcatgcaaataccaccttgtaagaaatgcctttcctgactaccttatctaaattagtcctgcccagagttcagagaccagcctgaccaacatggagaaaccccgtctctaccaaataatacaaaaattagtcgggcatggtggagcatgcctgcaatcccagttactcaggaggctgagtcaagagaatcgcttgaacccgggaggcggaggctgcagtgagccaagatcgtgccattgcactccagcctgggcaacaagagcaaaactccannnnnnnnnnnnnnnnnnnnnnnnnnnnnnnnnnnn

SEQ ID NO: 12770 - DNA, 968 bp, Homo sapiens
  misc_feature 966, 967, 968: n = A,T,C or G
ggcacgaggaaacacatcagttcagcaggataagtctgatgaaagtgactcctctctctcggaggtacacaggggcataatcaacccatttcctgcttcaaaaggaatcagagcttttccacttcagtgtattcacatagctgaagggcatacaaaagctgtgctctgtgtggattctactgatgatctcctcttcactggatcaaaagatcgtacgcggggcagcattcactctccctgtcttttccccttccctcagcagaaacgtgtttatcagcaagtcgtgagtcaaactgctgccttttaaaaaacccacaaaatgctgattcagttcaaaattaatgcaaatgtttcaaaactgggtttctgatatttgtaaatgtgtttctttattagataagagtgtattaccattaaaggcattagtataatattgctttcaaaaagaaatggtagacaaaactataatccagcatcttttattgcattggaaagactggcaaagtcttttggatgggttgggagatgtggctggaaagtactttggaaaatatacaatcaagatatctcatggcatattaaaagaaaaatcttaatagcagtgttggcttttatttggattttttcatctcagttttttctgtgggaatctccttcattggcattgtgattagatcagtaaacggtgccaatgctcctccccgctcccacgcctcccccccccctccccccccccgccacctccccccccacacccctccacacacgtacgagttcacgccgtaccagactctggacgctgatgcaactgatcgacgatgtagcacaccagtcacgacagccacaactcgatagcgctcctcgcacaccacctcagcaaccgcatcgcaaggtaacatcgaatcatgcgacaataagtgatgcgggaatgacactacacatacaacactgctcacaccaccatannn

SEQ ID NO: 12771 - DNA, 5210 bp, Homo sapiens
  misc_feature 5204, 5205, 5206, 5207, 5208, 5209, 5210: n = A,T,C or G
cgtccggcacgagcctcaagaccaggtgcgcgcgtcggcgtccgaggcggttggtgtcggagaatttgttaagcgggactccaggcaattatttccagtcagagaaggaaaccagtgcctggcattctcaccatctttctacctaccatgatcaagtgcttgtcagttgaagtacaagccaaattgcgttctggtttggccataagctccttgggccaatgtgttgaggaacttgccctcaacagtattgatgctgaagcaaaatgtgtggctgtcagggtgaatatggaaaccttccaagttcaagtgatagacaatggatttgggatggggagtgatgatgtagagaaagtgggaaatcgttatttcaccagtaaatgccactcggtacaggacttggagaatccaaggttttatggtttccgaggagaggccttggcaaatattgctgacatggccagtgctgtggaaatttcgtccaagaaaaacaggacaatgaaaacttttgtgaaactgtttcagagtggaaaagccctgaaagcttgtgaagctgatgtgactagagcaagcgctgggactactgtaacagtgtataacctattttaccagcttcctgtaaggaggaaatgcatggaccctagactggagtttgagaaggttaggcagagaatagaagctctctcactcatgcacccttccatttctttctctttgagaaatgatgtttctggttccatggttcttcagctccctaaaaccaaagacgtatgttcccgattttgtcaaatttatggattgggaaagtcccaaaagctaagagaaataagttttaaatataaagagtttgagcttagtggctatatcagctctgaagcacattacaacaagaatatgcagtttttgtttgtgaacaaaagactagttttaaggacaaagctacataaactcattgactttttattaaggaaagaaagtattatatgcaagccaaagaatggtcccaccagtaggcaaatgaattcaagtcttcggcaccggtctaccccagaactctatggcatatatgtaattaatgtgcagtgccaattctgtgagtatgatgtgtgcatggagccagccaaaactctgattgaatttcagaactgggacactctcttgttttgcattcaggaaggagtgaaaatgtttttaaagcaagaaaaattatttgtggaattatcaggtgaggatattaaggaatttagtgaagataatggttttagtttatttgatgctactcttcagaagcgtgtgacttccgatgagaggagcaatttccaggaagcatgtaataatattttagattcctatgagatgtttaatttgcagtcaaaagctgtgaaaagaaaaactactgcagaaaacgtaaacacacagagttctagggattcagaagctaccagaaaaaatacaaatgatgcatttttgtacatttatgaatcaggtggtccaggccatagcaaaatgacagagccatctttacaaaacaaagacagctcttgctcagaatcaaagatgttagaacaagagacaattgtagcatcagaagctggagaaaatgagaaacataaaaaatctttcctggaacatagctctttagaaaatccgtgtggaaccagtttagaaatgtttttaagcccttttcagacaccatgtcactttgaggagagtgggcaggatctagaaatatggaaagaaagtactactgttaatggcatggctgccaacatcttgaaaaataatagaattcagaatcaaccaaagagatttaaagatgctactgaagtgggatgccagcctctgccttttgcaacaacattatggggagtacatagtgctcagacagagaaagagaaaaaaaaagaatctagcaattgtggaagaagaaatgtttttagttatgggcgagttaaattatgttccactggctttataactcatgtagtacaaaatgaaaaaactaaatcaactgaaacagaacattcatttaaaaattatgttagacctggtcccacacgtgcccaagaaacatttggaaatagaacacgtcattcagttgaaactccagacatcaaagatttagccagcactttaagtaaagaatctggtcaattgcccaacaaaaaaaattgcagaacgaatataagttatgggctagagaatgaacctacagcaacttatacaatgttttctgcttttcaggaaggtagcaaaaaatcacaaacagattgcatattatctgatacatccccctctttcccctggtatagacacgtttccaatgatagtaggaaaacagataaattaattggtttctccaaaccaatcgtccgtaagaagctaagcttgagttcacagctaggatctttagagaagtttaagaggcaatatgggaaggttgaaaatcctctggatacagaagtagaggaaagtaatggagtcactaccaatctcagtcttcaagttgaacctgacattctgctgaaggacaagaaccgcttagagaactctgatgtttgtaaaatcactactatggagcatagtgattcagatagtagttgtcaaccagcaagccacatccttgactcagagaagtttccattctccaaggatgaagattgtttagaacaacagatgcctagtttgagagaaagtcctatgaccctgaaggagttatctctctttaatagaaaacctttggaccttgagaagtcatctgaatcactagcctctaaattatccagactgaagggttccgaaagagaaactcaaacaatggggatgatgagtcgttttaatgaacttccaaattcagattccagtaggaaagacagcaagttgtgcagtgtgttaacacaagatttttgtatgttatttaacaacaagcatgaaaaaacagagaatggtgtcatcccaacatcagattctgccacacaggataattcctttaataaaaatagtaaaacacattctaacagcaatacaacagagaactgtgtgatatcagaaactcctttggtattgccctataataattctaaagttaccggtaaagattcagatgttcttatcagagcctcagaacaacagataggaagtcttgactctcccagtggaatgttaatgaatccggtagaagatgccacaggtgaccaaaatggaatttgttttcagagtgaggaatctaaagcaagagcttgttctgaaactgaagagtcaaacacgtgttgttcagattggcagcggcatttcgatgtagccctgggaagaatggtttatgtcaacaaaatgactggactcagcacattcattgccccaactgaggacattcaggctgcttgtactaaagacctgacaactgtggctgtggatgttgtacttgagaatgggtctcagtacaggtgtcaaccttttagaagcgaccttgttcttcctttccttccgagagctcgagcagagaggactgtgatgagacaggataacagagatactgtggatgatactgttagtagcgaatcgcttcagtctttgttctcagaatgggacaatccagtatttgcccgttatccagaggttgctgttgatgtaagcagtggccaggctgagagcttagcagttaaaattcacaacatcttgtatccctatcgtttcaccaaaggaatgattcattcaatgcaggttctccagcaagtagataacaagtttattgcctgtttgatgagcactaagactgaagagaatggcgaggcagattcctacgagaagcaacaggcacaaggctctggtcggaaaaaattactgtcttctactctaattcctccgctagagataacagtgacagaggaacaaaggagactcttatggtgttaccacaaaaatctggaagatctgggccttgaatttgtatttccagacactagtgattctctggtccttgtgggaaaagtaccactatgttttgtggaaagagaagccaatgaacttcggagaggaagatctactgtgaccaagagtattgtggaggaatttatccgagaacaactggagctactccagaccaccggaggcatccaagggacattgccactgactgtccagaaggtgttggcatcccaagcctgccatggggccattaagtttaatgatggcctgagcttacaggaaagttgccgccttattgaagctctgtcctcatgccagctgccattccagtgtgctcacgggagaccttctatgctgccgttagctgacatagaccacttggaacaggaaaaacagattaaacccaacctcactaaacttcgcaaaatggcccaggcctggcgtctctttggaaaagcagagtgtgatacaaggcagagcctgcagcagtccatgcctccctgtgagccaccatgagaacagaatcactggtctaaaaggaacaaagggatgttcactgtatgcctctgagcagagagcagcagcagcaggtaccagcacggccctgactgaatcagcccagtgtccctgagcagcttagacagcagggctctctgtatcagtctttcttgagcagatgattcccctagttgagtagccagatgaaattcaagcctaaagacaattcattcatttgcatccatgggcacagaaggttgctatatagtatctaccttttgctacttatttaatgataaaatttaatgacagtttaaaaaaaaaaaaaaaaaaaattatttgaaggggtgggtgatttttgtttttgtacagttttttttcaagcttcacatttgcgtgtatctaattcagctgatgctcaagtccaaggggtagtctgccttcccaggctgcccccagggtttctgcactggtcccctcttttcccttcagtcttcttcacttccctatgctgctgcttcatgtgctacatctcagacttaaagagtttctctactacagtgaaaacattctctagggtctttcatcaggcctttagttattttagggataaaaactattgataaaaaggacaaggatagaacagagaaaatttaaagtcctgttccgggttttttgttatgttttctttaaaaactcagagactgatgttcaatatcccaaaccagtaaaatggtgaaaatactatgagcttgttttttaaaatatgatttttttgggtaccnnnnnnn

SEQ ID NO: 12772 - DNA, 359 bp, Homo sapiens
acttttttttttttttttttttttttaactcatacgtttttatttgagatctgccttgcttatttcacaaagagttgcaacccgaatgctgaagattttccttcatggcgagtctcagaatacaacctcagctcatttgccaaatcttgccagcctgataaacatttttcttttgggggctggcatctcgtttcctccttcttctcttgttcacatataatgttggtcatgcctgagcttatagcagcagcagccagaggaagatgaggtaattaggcagatcacagcggaacaggttgcattctcattcctttcagccttctctcctctctccccaacctgcacagttctccccgcgt

SEQ ID NO: 12773 - DNA, 2517 bp, Homo sapiens
  misc_feature 1, 2, 3, 4, 5, 6, 2400, 2517: n = A,T,C or G
nnnnnngcgcgttgctggtgtcctgtcccttagtgtgcacagtgcgctcggactgtccgtgggtcctacgggtggcgcctggacgtgttcggccgctcgggtcggtgttctgtctcggtgggcgtggtgtcgtgcctgatgcgtggtgcgtgcctccgctgagagtgttgcgtatcgctccgctgccgcgctctgcgcctctgtgcgtcgcgcctgcggtagccgtttgtccttcgccgtcggggtctgccgtccggtcgtctcgccgcgacgtcttctcgtcgtcctcctcctgctcgcgtctctcttcagccgttccgcttcacgtctcgtgtgttcgcgtgcttcctctgcccgccgctgccctttgcgctcgccctcgcccgttgttgctgcggcggtgctcgtagtgtctggttggtttcttcggtcctagtatgattcgtcgtgtgtggtgtctggtgtgttgctgtgctgtgatgctggtgatgttggtgtcgctctgccttggcgtggtgtgcactaaatatctaaattttctatcgataggtcgttcgcttcgggctccttatatacctggcacttatggggctggtcgtcctagatttccccccccccttttgttttggggggaggcgcgtttttgtcaggggtctcggggagaactctgccggtcccaaatggtgtgaaaacgggtccatgtttaaaacaaagcaaactccagtcatgagacactacatacatcatgcgaaagcaacagtctgatctccaggttatgaaaactataattaaaaagtcactacacagaaaaggtccaagtttccagcttggcaaaacttgggtgcagttacatgaaacgtttaataaactgaattgttttccccaatgtgtaaacaaaatgacaagactaaatctgtgcctggtaatttcaatctaactctgaagctacacaaaacacacagacaccttgtacatttcacctgttagtatgaccatcttttttcttcggtggtggaaggaagggcaaggtgactgtgtaaagcaaagatgtgggaagtagaaatattgtttactagacattataaagtcatggtgaaaagaaagcttcgattaatgcatagcctaagggggaaaagactacactccaacttcagaaaattaatttagaaggataggggaagagattaagtaattgcagtttaacatgaaaaatgcacatgtgatagaatggagcacaatggaggattcataaaacatgctcatcagaaaaatctgttaagtcgactttgtccagattcagaaagagtaagtttatcaacatctggcatccctcatactttgtgaagatagatcttctactgcttaattatgagaaattattttattcaaagaaaggagctcttaatcttttgataaaacaaaataaaggagtagagagctgactagatgtcaagtgcttgctagaaatgatttttaaaatgcttctacacgtaaaatgtactgacaaattttggtaaaccatttaaaaataagaattagttttaaaatcttggagaaaatgcctttttgcccacatttaaaactgaaaatcaattttactatagataggagttctgtggagtgtacaaaattccttttagagatcaaatggccatcccagatagatatcatgtttcacaggcattacttttagtcaccctcaagtttcagccatgggaccaaaatttagtgttctgtgccatgtggtcacagggtcattggtttcacatcatggcttaagaaaatactggcattttgtttcttacgaagtaagtcctaccttgtgcatacaagcaaaaagaaaaaggaagaaaacaggggagggaaaggcgcaagaagctttttttgtttgtttgttttgaagacaacagattgaaggcaaaagaacacagagctttcacaagctcaaagaaaaatatttgctggctgatcgctgatttgtatgcactataaaacaattccataaataaaaccaatatatcatttcttaatcatgaccctatcaaaaccaagttatttcctaactattctttcaatgtcaaatgtaccctagagttgacgtttcatttttaagggttacagctacctcataggaactgaactagatgtactcttaccctttctctgaagtataacagtacaccactgcacaacagtatccaatttgaagactaatggtaaagaaaattcttcaggaaaaactgaaaatccatcaagctgaaaatctaaaattaggttctactttctaatgaaaaatacactaaaagtgcatcatcagaataaggtaattcttatgcccccctttgtattggcaaaattttccaaacaatgcatcaaacttaaaccctccccccagggccnatttttgataccaaatcctcggggggggggggggggttttttttaaaagggcagcaaatttttgggaaaaaaaattaaggcccacccggggtggttttacaacaaaataataatggn

SEQ ID NO: 12774 - DNA, 387 bp, Homo sapiens
  misc_feature 1, 2, 3, 387: n = A,T,C or G
nnngagatcaaaagtgggcataaataccctccctgacatcaggaccatcttccaggttcaccctctatcttaagcagagccagttcctgttgaaaagtttccatgtcagggcccttgaaaagcaggcactgcttaattttcaatctccccaataggtgcaataccctgattatcagttgggtggttcctcttcttgacgtttttcctcagtgggctcctggacaatcacagatccaaccggctgggaagactcttggtcatttcctctttctgaggattgggatcttgctcttacaagctcactcatatttcccacggctgagtcttggtcagtttatttttttatctagatgtcccacagaacgaagacactctctctccccgcgn

SEQ ID NO: 12775 - DNA, 2799 bp, Homo sapiens
  misc_feature 2774, 2775, 2776, 2777, 2778, 2779, 2780, 2781, 2782, 2783,2784, 2785, 2786, 2787, 2788, 2789, 2790, 2791, 2792, 2793,2794, 2795, 2796, 2797, 2798, 2799: n = A,T,C or G
gtccggaaggagcaagctatggaggggaacagggatgaggctgagaaatgtgtcgagatcgcccgggaggccctgaacgccggcaaccgcgagaaggcccagcgcttcctgcagaaggccgagaagctctacccactgccctcggcccgcgcactattggaaataattatgaaaaatggaagcacggctggaaatagccctcattgccgaaaaccatcaggtagtggcgatcaaagcaagcctaattgcacaaaggacagcacatctggtagtggtgaaggtggaaaaggctataccaaagaccaagtagatggagttctcagcataaacaaatgtaaaaattactatgaagtacttggagttacgaaagatgctggtgatgaagatttgaaaaaagcttatagaaagcttgctttgaagtttcatccagacaaaaaccatgcacctggagcaacagatgcttttaaaaagattggaaatgcttatgctgttttaagtaatccagaaaagcgaaaacagtatgacctcacgggcaatgaagaacaagcatgtaaccaccaaaacaatggcagatttaatttccattgaggttgtgaagctgatataactccagaagacttgtttaatatattttttgggggtggatttccttcaggtagtgtacattctttttcaaatggaagagctggttatagccaacaacatcagcatcgacatagtggacatgaaagagaagaggaaagaggagatggaggtttttctgtgtttatccagctgatgcccataattgtattgatcctcgtgtcattattaagccagttgatggtctctaatcctccttattccttatatcccagatctggaactgggcaaactattaaaatgcaaacagaaaacttgggtgttgtttattatgtcaacaaggacttcaaaaatgaatataaaggaatgttattacaaaaggtagaaaagagtgtggaggaagattatgtgactaatattcgaaataactgctggaaagaaagacaacaaaaaacagatatgcagtatgcagcaaaagtataccgtgatgatcgactccgaaggaaggcagatgccttgagcatggacaactgtaaagaattagagcggcttaccagtctttataaaggaggatgaactggaatttttatttataccttttagcgtactctttattttttctgtaagtaagtttggtttcatcatgagggatgaaggaaaagatttgatactgaaaactaaactgaatagttggttcctgaaatcttggactgtttatgacctactggctcctttaaatagtaactgaaaactaaaatggaatattttagttaacgcttctacaagtattttcattttaaaagcttacatgattcctaactaaagtgtcatgagaaaggattatcacacctgtagcaatttccagttttagtgattctccattttttcccttgtcatgtaaatatttatggaatgatcattttgtgtacatacaggttactgcttttttatttaaattcttttagtgtttagctccatgagacacttcagtttaaattgatggaataaatgttatatgacacatttacattttccttatcaaggtgtcaaatatgtggactttaaacaatgaaactttttcaaaaagaaaaaacaaaaactttaactttgtgtaaaatcttatagtattatcagcttagagggaattgatatttttaatattgccgttatattccaaaatatatattgagataaatgaactggtgtagaatatcagtttgctatttagttttatgaattactatacatatacatgcatagaaatgaaatgctatactgataaattttaaagaaaatatgaggaaatggctataaatattaaactaaaagggtcttcaacagtaaagtgcagttatgtcatttaaaattccaatactttaaaggccaccaaattttgatgtatatgtccttgaagggctgctaaaatttatgaagaggactcacattttcccccatagaaatttgcagtttcttggtgatcatttaagcaggatccaaagaagttcctttacaaataagtaataagaaaaatgagtactaaaatacagctttgtgccttttaaccctatgccaactcctaaacatataagtagattacagtatacttatctgatcagagcatgatctgtttggccacatgcaagtgtgagcagaaatagagcagcacgtagaatagtaacttaaagcaagtcatcctttaaaaattctgagctaaaatctatttaccattgagtaattgaattaatcccataggaataagctccttgtaagtaaatccatgatatgaattagaaaaaaaaaacagctggaaattgaagtttttgatgcctgtatactggatatgaaactatttgatttctagtcttctgtgtttagcagttgtaatattttaatgattttgcttcatactcggttaatggaacataaacatatctttgatacttctttgtgagtgagagaatgctagatagggtggctttgttctttgtttaagttttttttcctgaatgtagttaatttatggcatctgttgaataaaactgctaaaatgacctcttaaaaatgttctgttgtatccccttttccaggtgaatcaatagaaatgcctgattgaattagtaggttaaactaaacaacatactgtcataggaaaactggagagcttaaccaacttgctcttagaaatgttaccnnnnnnnnnnnnnnnnnnnnnnnnnn

SEQ ID NO: 12776 - DNA, 382 bp, Homo sapiens
actttatgtgtgacaaggcaatagcagctcctccctcaagattaaaaacaattaataaaatacatagcatctgaagaatgtattttgggtaaacgagtagctattatttattaaagtgttcggcgttcctgtgttcccttgactttgaacactctttcctagtgtattatgcgtcagggtgcagcatcgcgaagtttccagaagatggcgtcgtgataacacagactttcaaggaccaaggtaaaggatgccattcatgggccttttgcttcttctttctctcgctcccttttcccccgcttctctctctgtctctcatctctgtctcttttttaataaaagctttattggatataattttacataccataacagttgccct

SEQ ID NO: 12777 - DNA, 307 bp, Homo sapiens
  misc_feature 306, 307: n = A,T,C or G
aggtaccgtgttttaagcttagttcagtctcaagtgtttgcagccacatctgaagaccaataaagcaactgctggtttatcctttgggagctgacagaatttcttctcccaaatacatacacagtaaaatcataagccttccaacatcgttactgttgcactttacgcagtcaagtgtccaactcctcagatgagcaagtggtcggccctaaaaagggcctttgggatcgaaacgtgcaaagctggagcggcggcctagcctccgaagccgtacctggtgcgcccctggcgcttgagcgcgtacann

SEQ ID NO: 12778 - DNA, 262 bp, Homo sapiens
aggtactttgagaaggcaggactcaaatgatgccctggagatgtcacagattcctggcagagccatggtcccaggcttcccaaaagtgtttgttggcaattattcccctaggctgagcctgctcatgtacgcggggtgctgagccacgaattcgtcctgcagaatcacgcggacatcgtctcctgtgtggcgatggtcttcctgctggggctcatgtttgagataacggcaaaagcttctatcatttttgttactcttcagt

SEQ ID NO: 12779 - DNA, 1204 bp, Homo sapiens
ccgggcaggtactgtttcctcagcagaggagaaaaactcaacctagttatgagaccaaccacacaacacaatgaagagctgcactaactagttcagaatgttagttaagatgatgctggtgtgaatccgcgtacgcgggagtcggacgggcgcggagacgcttctggaaggaacgccgcgatggctgcgcagggagagccccaggtccagttcaaacttgtattggttggtgatggtggtactggaaaaacgaccttcgtgaaacgtcatttgactggtgaatttgagaagaagtatgtagccaccttgggtgttgaggttcatcccctagtgttccacaccaacagaggacctattaagttcaatgtatgggacacagccggccaggagaaattcggtggactgagagatggctattatatccaagcccagtgtgccatcataatgtttgatgtaacatcgagagttacttacaagaatgtgcctaactggcatagagatctggtacgagtgtgtgaaaacatccccattgtgttgtgtggcaacaaagtggatattaaggacaggaaagtgaaggcgaaatccattgtcttccaccgaaagaagaatcttcagtactacgacatttctgccaaaagtaactacaactttgaaaagcccttcctctggcttgctaggaagctcattggagaccctaacttggaatttgttgccatgcctgctctcgccccaccagaagttgtcatggacccagctttgggcagcacagtatgagcacgacttagaggttgctcagacaactgctctcccggatgaggatgatgacctgtgagaatgaagctggagcccagcgtcagaagtctagttttatagggcagctggtcctgctgaatgtccagcgggtgccagcggtggtggttgccacctcattattaatctacgcttaaggcggaaccatgtggctcatctgtggcgatgctgaagcgagatgagtgggcttcggagtgaatgtggcagtttaaaaatataacttccttgtttggacctgcatatatagctgttttggaacccacgttgattccttgagtttatatataagactgctgcagtcacatcacaatattcagtggtgaaatcttgtttgttactgtcattcccattccttttcgtttagaatcagaataaagttgtatttcaaatatct

SEQ ID NO: 12780 - DNA, 1309 bp, Homo sapiens
  misc_feature 1: n = A,T,C or G
ngcgagcgccctaccgctttcgctttcccttcgcggtgcccactccactccttgtgcggcgctaggccccccgtcccggtcatggccatgctcagggtccagcccgaggcccaagccaaggtggatgtgtttcgtgaagacctctgtaccaagacagagaacctgctcgggagctatttccccaagaagatttctgagctggatgcatttttaaaggagccagctctcaatgaagccaacttgagcaatctgaaggccccattggacatcccagtgcctgatccagtcaaggagaaagagaaagaggagcggaagaaacagcaggagaaggaagaccaaggatgaaacagaaggaagggggaggatgaagacaaaggtcctccctgtggcccagtgaactgcaatgaaaagatcgtggtccttctgcagcgcttgaagcctgagatcaaggatgtcattgagcagctcaacctggtcaccacctggttgcagctgcagatacctcggattgaggatggtaacaattttggagtggtgtccaggagaaggtgtgagctgatgaccagctccacaccaagctagaagggttccacatcaatctctaagtattctctgagcgtggtgatgcaggactaaagcagcaggcaggccatgtgggtgatatcggagtgggcacgagcgtgagccgagaccggactccggggaggcaggatcgaaggtagcggtttggacaccgaaatcggaagcaggccggacaaaggagctgcagtgactaaagcagccaagcagccccatgtgggtgattatcggcagctggtgcacgagctggatgaggcagagtaccgggacatccggctgatggtcatggagatccgcaatgcttatgctgtgttatatgacatcatcctgaagaacttcgagaagctcaagaagcccaggggagaaacaaagggaatgatctattgagagccctctctcccattctgtgatgagtacagcagagaccttcctgctttttactggggactccagattttccccaaacttgcttctgttgagatttttccctcaccttgcctctcaggcacaataaatataggtatagaaacaaagggaatgatctattgagagccctctctcccattctgtgatgagtactcaagcacacctcagtgtgtatgcatgtaaatgggtaattcccatttactgggtatttgtgtctaatacatgtgcacattagcagggcagtggaaaggaaagggaaaaattgcaaacattcacaggaatgctctacatataaaaaattggt

SEQ ID NO: 12781 - DNA, 634 bp, Homo sapiens
acttctgcttcacaaactcatcagtgatgagcttcttcacgtccccaaagagtgaatgatgtatcccagggcgcagccccaacttgcgcagcacctcccagatgacagcctcactggaccgatttccattcatgaagatgatgctaagaagcaccatgagcagacccgcgtacgcggggggttggggtgtgagaggttttctcgctctagggagattcttcaagcaatcactatgtcaacagacacaggtgtttcccttccttcatatgaggaagatcagggatcaaaactcattcgaaaagctaaagaggcaccattcgtacccgttggaatagcgggttttgcagcaattgttgcatatggattatataaactgaagagcaggggaaatactaaaatgtccattcatctgatccacatgcgtgtgggcagcccaaggctttgttgtaggagcaatgactgttggtatgggctattccatgtatcgggaattctgggcaaaacctaagccttaggaaggaaggagatgctgtcttgggtcttgttgggagggagcttgcttttagttaggatgtctttatttatttaaagtttacccattatttgttgggaaattaaactaatttgtatgggg

SEQ ID NO: 12782 - DNA, 3499 bp, Homo sapiens
  misc_feature 1, 2, 3496, 3497, 3498, 3499: n = A,T,C or G
nnaaaattacagtgctgtctttaattaaaaaacttgttcatttctcactgtgcacaatgtagcactaacatggtcttccgaacactgctgcttggttttatataccgagaaatatttaagaccaggaataaggttatgtgtcctatgggtacatttcggaaaagaaaatacatccaacgagtatgactctagataggattttgtacaccctcaacaagtgacaaaattcaaaactaggtaaccgccctcataaggtacttgaaactaaaatttttgccacgaaaacatggcatgtgcaaaagttctctctctggccatcactcctgctaaggacactgggaaggacatggtcaacgtagcagtcgatcaaaaagattccagggaaactgcgcaacagcctggggccgagaagcgaaacttggtcttctccaccctcgtcgcactccttttccccgagacttggtactgggagataggacgggagtctcctacacgcagtcaacacttgccacgagcggctagacttaggacaggcaagttgccctgccatccttctatcgcccccacccctcctttacttaagggcgatggcagagacgtcctcctcccccttctcctcctctttggtgcctccagccaggaggcgggagcgatccacagcagctgacccagctcaggcactgcctctctcacagccctcaagacacaccatgggcccagaggcaggtttgctacacagcagcgacgacgcaggcggcggccccagcgactcgcaactgcctccctgaccacagcggccaccgcccaacacccccgagaagccatcgccaccaccggcaggagaacctagggtccataaagccatcttcgcgatcgactaaagctacgtcaacaactatggcgggcgacgggcggcgggcagaggcggtgcgggaaggatggggtgtgtacgtcacccccagggcccccatccgagagggaaggggccggctcgcccctcaaaatggcggcagcagcgatgcgcctgcgtacagaactcctccgtcgcgccagggccggcgggaagtgaggttctcggacgagccgccagaagtgtacggcgacttcgagcccctggtggccaaagaaaggtccccggtgggaaaacgaacccggctagaagagttccggtccgattctgcgaaagaggaagtgagagaaagcgcgtactaccttcggtctaggcagcggaggcagccgcgaccccaggaaaccgaggaaatgaagacgcgaaggactacccgccttcagcagcagcactcagagcagcctccgctacagccgtctcctgttacgaccaggagagggctgcgggactctcattcctctgaagaggatgaagcatcttcccaaactgatttaagccaaacgatctcaaagaaaactgtcaggagcatacaagaggctccagtgagtgaagatcttgtaatcaggttacgtcgaccccctctaagatacccaagatatgaagccaccagtgtccaacagaaggtcaatttctctgaagaaggagaaactgaagaagatgatcaagacagctctcacagcagtgtcactactgttaaggccagatccagggattctgatgaatctggagataaaaccaccagatcatctagtcaatatatagaatcattttggcagtcatcacaaagtcaaaacttcacagctcatgataagcaacgttcagtgctaagctcaggatatcaaaaaactccccaggaatgggccccacaaactgcaagaataaggaccaggatgcaaaatgacagcattctgaaatcagagcttggaaaccagtcaccatcaacctccagccgacaagtgactggacaaccccaaaatgcatcttttgtcaagaggaaccggtggtggctacttcctctgatagctgctcttgcctctgggagtttttggttctttagtactcctgaggtagaaaccactgctgttcaagagttccagaaccagatgaatcaacttaagaataagtaccaaggtcaagatgagaagctgtggaaaaggagccaaacattcctggaaaaacatcttaatagctcccatcctcggtctcagcctgctatcttactgctcactgctgcccgagatgctgaagaagcacttaggtgtctgagtgaacaaattgctgatgcctattcttcttttcgtagtgtccgtgccatccggattgatgggacagataaagctactcaagacagtgatactgtcaaactagaggtagaccaagaactgagcaatggatttaagaatggccagaatgcagctgtggtacaccgctttgagtcatttcccgcaggctctactttgatcttctacaaatattgtgaccatgaaaacgcagccttcaaagatgtagccttagtcctgactgtcttattggaggaagagacacttggaacaagtctaggcctaaaggaagttgaagaaaaagtaagagattttcttaaagtcaagttcaccaattctaacacacccaactcctacaatcatatggacccagacaaactgaatggcctctggagccgtatttctcacttagttctgcctgtgcaacctgaaaatgccctgaaaaggggcatctgcttataagaagtgagagagaagaaaaatcatgtcccaagttctgagaattgttcacactttctaaccagagacagaattcagagctctttttgaaagaactagtttctttttaaagaagttaagtgcttacataaacatggaacatataaatcattcattcaacctaattatctgtgatatgagagaatcatttcagtttccattgagagctctgttaaaggtatcttaggagtgcagattatatgcagttccttagagaatctgttttgattctgggctgagttattacagttatggtatgaccagtgagagcgatttgtgtcctttcttatgaaccttcctgattttttaacttagatttctcactaagtttcctgagttattagtaagattgctccctaaatgtaaccagggatttttccattatgttcccttttataccatttaggtgtgagttccttagcttctgcctataggaacataagtaatgaaaggtcatctaggtgtgtgttggaatttttttcttttgttttttggaaaatggaaagaacaaggcaaggaaggaaaattaatggggaagctgaagggaggaaatgttacagtaatccactgagatgtagtttagtcaaacataggtatatgactgttaatctggaggatcccggggatggttgtcaacatctccttttccttcctgagaacactctgggctgccccagatcttcagatttgccatctctatttcgtcctggatctacaaatggtcggcgggtgtaactgcgcacattaagcacttcacctgtaccctttaacaaaaaagcggggggaaaaacccacgcaggggaataacccnnnn

SEQ ID NO: 12783 - DNA, 4412 bp, Homo sapiens
  misc_feature 1, 4412: n = A,T,C or G
ngcgtccggccgacaagtgccgcggcgacggcgcacccggtggccgcccggacctgcttattgctgtcaagtcggtggcagaggacttcgagcggcgccaagccgtgcgccagacgtggggtgcggagggtcgcgtgcagggggcgcaggctcgggcggggccgacgaagttggggagggcgctcgaacccactgtcgcgccctgctgcgggccgaaagccttgcgtactcctgggtcctgctctgggccttcgacgacaccttttttaacctaacgctcaaggagatccactttctagcctgggcctcagctttctgccccgacgtgcgcttcgtttttaagggcgacgcagatgtgttcgtgaacgtgggaaatctcctggagttcctggcgccgcgggacccggcgcaagacctgcttgctggtgacgtaattgtgcatgcgcggcccatccgcacgcgggctagcaagtactacatccccgaggccgtgtacggcctgcccgcctatccggcctacgcgggcggcggtggctttgtgctttccggggccacgctgcaccgcctggctggcgcctgtgcgcaggtcgagctcttccccatcgacgacgtctttctgggcatgtgtctgcagcgcctgcggctcacgcccgagcctcaccctgccttccgcacctttggcatcccccagccttcagccgcgccgcatttgagcaccttcgacccctgcttttaccgtgagctggttgtagtgcacgggctctcggccgctgacatctggcttatgtggcgcctgctgcacgggccgcatgggccagcctgtgcgcatccacagcctgtcgctgcaggccccttccaatgggactcctagctccccactacagccccaagctcctaactcagacccagaatggagccggtttcccagattattgccgtgtatgtggttcttccctgatcaccaggtgcctgtctccacaggatcccaggggatgggggttaagcttggctcctggcggtccaccctgctggaaccagttgaaacccgtgtaatggtgaccctttgagcgagccaaggctgggtggtagatgaccatctcttgtccaacaggtcccagagcagtggatatgtctggtcctcctagtagcacagaggtgtgttctggtgtggtggcagggacttagggaatcctaccactctgctggatttggaaccccctaggctgacgcggacgtatgcagaggctctcaaggcgtggaggggctccggccgccacagcctgaattcatgaacctggcaggcactttgccatagctcatctgaaaacagatattatgcttcccacaacctctcctgggcccaggtgtggctgagcaccagggatggagccacacataagggacaaatgagtgcacggtcctacctagtctttcctcacctcctgaactcacacaacaatgccagtctcccactggaggctgtatcccctcagaggagccaaggaatgtcttcccctgagatgccaccactattaatttccccatatgcttcaaccacccccttgctcaaaaaaccaatacccacacttaccttaatacaaacatcccagcaacagcacatggcaggccattgctgagggcacaggtgctttattggagaggggatgtgggcaggggataaggaaggttcccccattccaggaggatgggaacagtcctggctgcccctgacagtggggatatgcaaggggctctggccaggccacagtccaaatgggaagacaccagtcagtcacaaaagtcgggagcgccacacaaacctggctataaggcccaggaaccatataggagcctgagacaggtcccctgcacattcatcattaaactatacaggatgaggctgtacatgagttaattacaaaagagtcatatttacaaaaatctgtacacacatttgaaaaactcacaaaattgtcatctatgtatcacaagttgctagaccaaaatattaaaaatgggataaaattatacatttttcttctcagttcttttcaaaaggattaatatttttaaagcacatatatgctactttccattagcaagacccatgaagggactgagcagcccagccttccttgagcccccagaggctttgagccatgaaatggcccagccaggggccagtgcccagggttggggcagagagccagcccacagtgcagaacagaatgctgaaacacaacaaaagtaggaagatgtctttggctaaaactttggcattaaataaaagaggcaaacaggatggaaacatgcagccctgccagccaggatggggcagagcaggggcacaggcaatcttgaaagctgactccaacaggggtgagaaccaggcctgggcatgtacctggatggtagaaagctgtgtttcaaccagtttggtgtgcccaggcagggagcgcgtgcaagaaaggaacagggaagggcaggtgggccaccctggccacagccagctcatcaagtaactaaagtggatgtagtgcaaatgtcgcaaccaagtactatggacacgctacctgcttgccttaagggtcatgtggcaatgtggagccaaaggcaggaccttgtccttatcctgggtgcctgtgtcctcagtcacagaaagagccccaagtcttcccaatgtgcatgggacaagggttgacctctcctgcctccttgttagttgagagctcctgggtccaggaatcaaggctcaaactttgtgcttctctttgcagtctgtgtcccctgctggcaccagcaggccaaagatggacagaagaatatctgggccactcagcccatggcagagcacccagcctgagcccaacctcagaacatcacaacagcccttcagcactggccaggtgtccaagaaaacccacagggtggtacagaggcccactgagcaggatgtgatgcacagttccacgggacagaggggcatgggtggtggtgtccctaggggagttccgctgttctcaggtggctaccaggcctgggggggccatacagggtcaccgaggcaatgtggttgttctgcatgacctcaaagatcattcgctgaagaccaaagcagaatgtggaaccaaatgggttggtgttgtttggggaggaagacctgtgcaggacaacaggcttctccacagggtggcccaggagctcctggatgttgtcccacttgctgtaggtcgtgcatgtttctgtctgaccatctgcgttttctttctttatggctagtgggatcttgaactcacagcgatgataaatgttgaaattataatgcccagggtaattggtgtgtagaacaaacttcttcactttgtgtgtattcgcatcaaagaggatgtccactccaagagtgaagtagttaaaaaagtagtcattacacttcgatggaacttgtttatgaggggaaggagaatgaattttcatcttgtcttctgatttatagaagactttgtgtggagagccaagcatgctaagaacatcttggcaggaatcaccaaaatacactgaacgttcaaatacccgcatcttggcatctgctaataggccaggtccacaacctgcagcaagtaggcgaagtcgtaaacctgcaggtccagttccatctcgaagaacatctacactctcagcatagacattgcccaggaaacagctcagaggcatcatgggagccttggtatcctgcaggctgttgccactgtagatgtacattcgttttacagttgctccatggggtatctggagagaagccaggccatgggcaaaattgggctcatactttggagcctcagtccatgagtctaactgaaaagagaaagacagtcctctgaagttgagatggaagagctgctcagcggagttgtacactccaggatgggttgcgccaaaagactggtcaatctgttcaatggtaggagctatggcctgagaattaaaatgcacgccacaatattttaactttactttagtcaaatcacatacttcgatcaccttaagtctctgattgaaagcatcaaacattagtttgatcccgtcctgagtcaggttaagaatgaggtcatggcttagaggagactgttcactgtagagaacctggacgtttttgatgatgcgacagtgcttctgaagaatggctactgcctgagccagaggcattcccagcgtgaattcccattgctcgttccccagagagcgttcgggcactacctccaggtccagcattggttcggctcgcctggcccgggcggcctccctgcggcagcgcagaagggacccgagctgcagtcaccgcggcagcggcggcaacgacggccccacgcgtccgcggacgcgcgctttccacctcatcccggcggcagcggcan

SEQ ID NO: 12784 - DNA, 3106 bp, Homo sapiens
  misc_feature 1, 2, 3, 4, 5, 6, 7, 8, 9, 10, 11, 12, 13, 14, 15, 16, 17,18, 19, 20, 21, 22, 23, 24, 25, 26, 27, 28, 29, 30, 31,32, 33, 34, 35, 36, 37, 38, 39, 40, 41, 42, 43, 44, 45,46, 47, 48, 49, 50, 51, 52, 53, 54, 55, 56, 57, 58, 59,60: n = A,T,C or G
  misc_feature 61, 62, 63, 64, 65, 66, 67, 68, 69, 70, 71, 72, 73, 74, 75,76, 77, 78, 79, 80, 81, 82, 83, 84, 85, 86, 87, 88, 89,90, 91, 92, 93, 94, 95, 96, 97, 98, 99, 100, 101, 102, 103,104, 105, 106, 107, 108, 109, 110, 111, 112, 113, 114: n = A,T,C or G
  misc_feature 115, 116, 117, 118, 119, 120, 121, 122, 123, 124, 125, 126,127, 128, 129, 130, 131, 132, 133, 134, 135, 136, 137, 138,139, 140, 141, 142, 143, 144, 145, 146, 147, 148, 149, 150,151, 152, 153, 154, 155, 156, 157, 158, 159, 160, 161: n = A,T,C or G
  misc_feature 162, 163, 164, 165, 166, 167, 168, 169, 170, 171, 172, 173,174, 175, 176, 177, 178, 179, 180, 181, 182, 183, 184, 185,186, 187, 188, 189, 190, 191, 192, 193, 194, 195, 196, 197,198, 199, 200, 201, 202, 203, 204, 205, 206, 207, 208: n = A,T,C or G
  misc_feature 209, 210, 211, 212, 213, 214, 215, 216, 217, 218, 219, 220,221, 222, 223, 224, 225, 226, 227, 228, 229, 230, 231, 232,233, 234, 235, 236, 237, 238, 239, 240, 241, 242, 243, 244,245, 246, 247, 248, 249, 250, 251, 252, 253, 254, 255: n = A,T,C or G
  misc_feature 256, 257, 258, 259, 260, 261, 262, 263, 264, 265, 266, 267,268, 269, 270, 271, 272, 273, 274, 275, 276, 277, 278, 279,280, 281, 282, 283, 284, 285, 286, 287, 288, 289, 290, 291,292-355, 357-359, 361-372, 374-376, 379-384, 387-391, 393-397: n = A,T,C or G
  misc_feature 404-405, 409, 414, 420-421, 427-428, 433, 435, 444,445-446, 450, 453, 455, 460, 462-464, 3089-3106: n = A,T,C or G
nnnnnnnnnnnnnnnnnnnnnnnnnnnnnnnnnnnnnnnnnnnnnnnnnnnnnnnnnnnnnnnnnnnnnnnnnnnnnnnnnnnnnnnnnnnnnnnnnnnnnnnnnnnnnnnnnnnnnnnnnnnnnnnnnnnnnnnnnnnnnnnnnnnnnnnnnnnnnnnnnnnnnnnnnnnnnnnnnnnnnnnnnnnnnnnnnnnnnnnnnnnnnnnnnnnnnnnnnnnnnnnnnnnnnnnnnnnnnnnnnnnnnnnnnnnnnnnnnnnnnnnnnnnnnnnnnnnnnnnnnnnnnnnnnnnnnnnnnnnnnnnnnnnnnnnnnnnnnnnnnnnnnnnnnnnnnnnnnnnnnnnnnnnnnnnnnnngnnngnnnnnnnnnnnntnnnagnnnnnnggnnnnncnnnnntttgccnnttancggtnaacccnnttggannccgantncccccccancnnaanctntnaaccntnnngtgagggcgggttgattttctcactttggactggtttttacttcccgacttctggactcatctttcaagaggactttagactaattgcagataattaagagaatatgccttctgcatcctgtgatacactactggatgacatcgaagatatcgtgtctcaggaagattcaaaaccacaagataggcattttgtaagaaaggatgttgtcccgaaggtacgaaggcgaaatacccaaaaatatttgcaagaggaagaaaacagtccaccaagtgacagcactattccaggcatacagaaaatttggatacgaacatggggttgttctcataataattcagatggagaatatatggctggacagctagctgcttatggctataaaattacagaaaatgcatccgatgcagatttatggctcctgaacagttgcactgtaaaaaacccagctgaagaccactttagaaactcaattaaaaaagctcaagaggagaacaagaaaatcgtactggctggatgcgttcctcaagcccagcctcgccaggactaccttaagggactgagtatcattggggttcagcagatagatcgtgtggtagaagttgtggaggagacaattaaaggtcactctgtgagactgctgggtcagaaaaaggataatggaaggcggcttgggggagcacgattggatttgccgaagattaggaagaatccactgatagaaatcatttccatcagtaccgggtgtctcaatgcttgtacctactgcaaaactaaacacgccagaggaaatttggccagttatccaattgatgaactagtagatagagccaaacaatcttttcaagagggtgtttgtgagatatggttgaccagtgaagacacgggggcttatggcagagatattggcaccaatctccccacactcctgtggaaactggttgaagtgattcctgagggagcaatgctgaggcttggcatgacaaatccgccctatattttagagcatctggaggaaatggcaaaaatccttaatcaccccagagtctacgcttttctgcacataccagtccagtctgcctccgacagcgtactcatggaaatgaaaagagaatactgtgtggctgacttcaaaagagtagtggattttctgaaagagaaagttcctggaataactattgctacagatattatctgtggttttcctggagaaacagatcaggattttcaagaaacagtgaaacttgttgaagagtacaaattcccaagcctgtttattaaccaattttacccaagaccaggaactcctgctgcaaaaatggaacaagttccagcacaagtgaaaaagcaaaggacaaaagatctttctcgggtgtttcattcttacagtccatatgatcacaagattggtgaaagacaacaagtgttagtaacagaagaatcttttgattccaagttttatgttgcacacaatcaattctatgagcaggttttagtgccaaagaaccctgcgttcatggggaagatggttgaagtggacatctatgaatcaggcaaacattttatgaaagggcagccagtatctgatgccaaagtgtacacgccctccatcagcaaaccgctagcaaagggagaagtctcgggtttgacaaaggacttcagaaatgggcttgggaaccagctgagttcaggatcccacacctctgctgcatctcagtgtgactcagcgagttccagaatggtgctgcccatgccaaggctacatcaagactgtgcgctgaggatgtccgtgggcttggctctgctgggtcttctttttgctttttttgtcaaggtctataattagaatacaactaatggaaacatctataaagaagaatacatttctaattaaaatcttcaatgaacaggaaagcgacatctccattctccaagggcaataatttgtactggtcatgctgcctccttctcagccactcttcttaatgaggctccccctgtctcacattgagttgggcccattggttatttgacctaaaacctaatcacggctaccatagcacatccttcaaattaaactgcttttggtttacttttagcaagaaatgcaagcggttgcatttttttctgtttgtttcaatctctaatctttaagtcagaacctaattgtacagtggctctggccatcttttcctcatgtggaagaattttctatctttaataaactttttctttgttttttttttccagatggagtttcgctcttgtcccccaggctggagtggtgcagtggcacgatctcaggtcactgcaacctctgcctcctgggttcaaacgattctcctacctcagcctccctaatagccaggggctacaggcatataccaccatgcccaactaattttttaattttttgtagagatgagtgtcactatgttgcccaggcttgcctggaactcctagcctcaagcagtcttcttgcctcagcctcccaaagtgctgggattacaggcgtgagccactccacccagcccagattaaatgtttttatttctacctgccatcattggtctttactaagtgaagtgacttctttctttaacaataaatggaattggtatactaannnnnnnnnnnnnnnnnn

SEQ ID NO: 12785 - DNA, 531 bp, Homo sapiens
acaaaatttcttccaaggccctgtgggaaatttttattaattcagttgacaaatatgtgttaagtgccttctttaaggacagacaatgtcagacctgactcagaggctgtcttccttggggagctatggcaaacatgagcatgaccagaattcaaggaagggcaggacgggggctctaagagagagggaggtgagttgttatgggcatgtgaagaagggtgagagaacttcgccccaggggtctccaggaagggctgggggcctttgtagaaactgagatgtgccaggagagaacatcttctaaagaatggcatgcttggctgggcgcagtggctcacacctgtaatcccagtgtgtccggaattggtgggttctcggtctcactgacttcaagaatgaagccgcggaccctcgtggtgagtgtcacagctcttaaggtggcgtgtctggagtttgtttgttcttcctggtggctcgtggtctcgctggcttcaggactgaagctgcagacttttgtggtgacccgcgtat

SEQ ID NO: 12786 - DNA, 3114 bp, Homo sapiens
  misc_feature 1, 2, 3104, 3105, 3106, 3107, 3108, 3109, 3110, 3111, 3112,3113, 3114: n = A,T,C or G
nngcctgtatcgttatagatcctcgcgaatacaagttaattatcgtgtggtcacgctgtgcgcgtgcggtccacgctttatcttgttcaccgggttgtctaggccggtcagacccgggtgggtatgaacccggtggcatgcccgcgatagggcccatactcgcggggaagctccgaggggccacgtagatctttatcttaaaggtgttactgcgatacaatgtgttaaatttcctaatatctctagatatgcaacatgtcttgcttttcaggctaaggtccagatgtgtcgtgagacagtggattttgtaggtcttctgcgaagtatagaatattttgtgtgtgtactcgctgtcgtctggatgatttatttttgtggtttttttgttttgttttataggtgtttagatgtagttcatcatgtgatgtgcgcggaattttgctggtgtggtcggtctagcggtccttttgaggttcctcttggcactggtttcgtgggtgggggccgtgtggtcactgtgtttggtttgttgcttttgaggtctgctatggtggtgttcatggtgccccgcgttttgtgtgtctcttccgtgggttggtaagtccctctgcctttatccaattatctatgttcgctagtaaattatgtttcacacggcgtgagggggttgttggcgcgctgtggtagattcccactgtactactcggaggagggctgagagcacggggaggtgtcgctctttgtacctcgggaggtgttgatggctgtccctggtggggctcgtccaggttgggctccctgtccttcttctcttcctgggcgggtctatagtgaggacctctttccgtatatatataataactataaggtaagcagtaggaaagtggaattgaaggagagggtagtaaaggtagctggaaaagagagagtttggagtatggttgagaattgagcgtgaattgtttagaatagagattagtaacagacaataaaagagaaactggtttttccaagtcaagggtaacctgaaaccgggagcttcctgctcgtgttcgctgttgagaagctacccgcggggttgtagacctcggacctcatggcagagataattcaggaacgcatagaagatcggctcccggaattggaacagctggagcgcattggactgttcagtcatgcggagattaaggctatcattaagaaggcttccgatctagagtacaaaatccagagaagaacccttttcaaggaagactttatcaattatgttcaatatgaaattaatcttttggagctgatccggagaagaagaacacgcattggatattcatttaagaaggatgagattgagaattctattgtacaccgggtacaaggtgttttccagcgtgcctcagcaaaatggaaagacgatgttcaactttggctctcctatgtggctttttgtaagaagtgggctactaaaactcgacttagcaaggtattctctgccatgttggcgattcattccaacaaaccagctttgtggattatggcagccaaatgggaaatggaagatcgattgtcttcagaaagcgcaaggcaactatttcttcgcgcactgcgctttcatccagagtgcccaaaactttataaagaatactttaggatggagctgatgcatgctgaaaaactgaggaaggagaaggaagaatttgaaaaagccagtatggatgtggagaatcctgattattctgaagaaatccttaagggcgagttggcatggatcatctacaaaaattctgtaagcataattaaaggtgcagaatttcacgtgtcactgctttcgattgcacagctatttgactttgccaaagatctacaaaaagagatttatgatgaccttcaggctctacacacagatgatcctctcacttgggattatgtggcaaggcgagaattagagattgagtcacagacagaagagcagcctacaacgaaacaagccaaagcagtggaggtcggccggaaggaggagaggtgctgtgctgtgtatgaagaggcagtgaagactctgccaacagaggccatgtggaagtgttacatcaccttttgcttggaaagatttactaagaagtcaaatagtgggttccttagagggaagaggttggaaagaaccatgactgtattcaggaaggcacatgaactgaagcttctgtcagaatgccaatacaagcagttgagtgtttcgttgctgtgttataacttcctgagggaagctctggaagtggcagtagctggaactgaattgtttagagactctgggacaatgtggcagctgaagctgcaggtgctgatcgagtcaaagagccctgacatagccatgctttttgaagaagcctttgtgcacctgaaaccccaggtttgtctgccattgtggatttcctgggcagagtggagtgaaggtgccaaaagccaagaagacactgaggcagtctttaagaaagctctcttagctgtcataggtgccgactcagtaaccctgaagaataagtacctggattgggcttatcgaagtggtggctacaaaaaggccagagctgtgtttaaaagtttacaggagagccgaccattttcagttgactttttcaggaaaatgattcagtttgaaaaggagcaagaatcctgcaatatggcgaacataagagaatattatgagagagctttgagagagtttggatccgcagattctgatctttggatggattatatgaaagaagaattgaaccacccccttggtagacctgagaactgtggacagatctactggcgagcgatgaaaatgttgcagggagagtcagcagaggcatttgtagctaaacatgctatgcatcagactggccatttatgaagatgaagaatacagtcagctttgtgaaatagtattgcaagcaagccccgtgggcaaatttgtattgagtccatctgtaatttgctcagtgatggcagacaagatggctgtctggttttgagacacactttaattttatgttaacttgttaaatctttttaaaaattaaaaaatttttatgattgactaaaaaaaaaaacctacaaaccttccnnnnnnnnnnn

SEQ ID NO: 12787 - DNA, 851 bp, Homo sapiens
  misc_feature 1, 800, 820, 848, 849, 850, 851: n = A,T,C or G
nacttactactggaccctgttttctctgagcagtttaatatggtttctttactattaatctaaatttgggctaattttatatatttttcaaaaggcattgattttctaaagagttttttaatcattaattcactctggtaatataagtaatacctttatatagtcatctaaactttccaaagcacttttacctattattctcagaacagtccaggaagtaggcaaaacagacattatcaccattttatgaggtattggatgctaaatgacttgctcagcgtctcataactggtaagtagcaggatcaggtctgaaatccatttcacctggccttagatccatctttgagggtctctttatctgataggcttctcgtcttggataggcaaaggaaggatgaactggagcagaggatgtcggccctgcaggagagcaggcgggagctgatggtccagctggaagagctgatgaagttgctgaaggtaagagcccgtggcccacgctcagtttcgcccacccatggaggcggccggccaatgcccatgccagtgcgctccacgtctgccggctccacccccacccactgtccgcaggactcgctgagcggagtcgggggagacgtgcaggaggccttcgcacaagcagaggaaggtgcagaggaagaagaagagaagatgcagaatgggaaagacagaggtaaaggcagctcagcaggactgctcgtttaaatggggagcccgagctcatggatcagcccgccccccactttggttctgcattccttcctgccaccacctttnccagagctttcggacccgangtccctgacctacttttccatctgacannnn

SEQ ID NO: 12788 - DNA, 3127 bp, Homo sapiens
tttttttttttttttcctttttttttttttttttttttttttttttctttaaatttgctcttttaatgcataaataaatccatatcatgtattactttctggaaaagggttaaactcaaatatctgaaatactttcattataccaggtcaagaaaaatgccacagccagaaaaatttattttaaaatagaaacatacattaagctttaaaacaaccaactctcaaacaaaagaggaaagagcctttgatcccagagtccatgcggaatgaattccatacgtgtttgaaattcacataaggagcacttagaaaaccacctgaaatggaaatccaacagcccccttgcctgtgagggctcccacccctgcccgcgtgaggacatggccgaaccccggacactcgtgtgccgggagccaccacagctcaaggtgaccggcagcacccagctctgtgaccaagacagatgttcacacgtgggggcatcgtaagcgctaccagctccaaatctgacgtgatgggaacttgggagatgtctgagaaatgtccgaagggattttggcaacacagaaaacgcaatgtctaggaattcctccaaatgcttccaaaaatactcattgacaattcaagttgcacttggctggcggcagcccgggcggccttcagtccgtgtggggcgcccgcgtggccttctcctcgtaggactccccaaactcgttcactctgcgtttatccacaggataaagccaccgctggtacaggtagaccagaaacaccacgtcgtcccggaagcaggccagccggtgagacgtgggcatggtgatgatgaaggcaaagacgtcatcaatgaaggtgttgaaagccttgtaggtgaaggccttccagggcagatgtgccactgacttcaacttgtagttcacaaagagctggggcagcatgaagaggaaaccaaaggcatagaccccgttgacgaagctgttgattaaccaggagtaccagctcttatatttgatattcaggagtgaatagacagcacccccgacacagagagggtacagcaggtatgacaagtacttcatggcctgagtatcgtactcctcggttttcctctcagattcgctgtaagtgccaaactgaaattcgggcatcaggcctctccaaaaaatagtcatcttcaatgccttcttcactttccacagctcaatggcggctccaacacccgccgggaccagcaccagcaggctcgtctgctcgtccagcaggaacagaaagatgaccacggtgctgaagcagcgccagagcactgccttggtggacatgccgatcatgctcttcttcttcttccagaaactgatgtcatttttaaaggccaggaaatcaaagagaagatggaacgctgcgacaaagaaggtcagcgccaggaagtataagttggtatctacaaaaattcctttcacctcatcagcatctttctctgaaaacccgaactgctgcagggagtacacggcgtcctgcatgtggatccagaagcgcagccgccccagtgagaccttgtcgtaggacacggtgaggggcagctcggtggtggagcggtttatgaccatcaggtccttcacgcggttgctgagctggtcgatgaacaggatgggcaggtaatgcacggttttccccagctggatcatcttcatgtaccgatgcacatcggcaggcagggaggacccgtcaaagacaaagttgtccgccatcacgttcagcgccagccgcggtcgccagtgggacactggctcatccagggcactcgtcggcttcttctccgcctcgatctgctgtgtatcagactccccggtgagcaggttgatttcttctggcttggggaccatgtaggtggtcagaggactgaccaggtgcacctgcttcccgtcgtgccacggcaggaccccagcgtgatggaggaagatgtaggcatacagcgtcccattgtttctcgttttctttggtacagaaacattaactgtcctttcaaatttggactccacatcaaagtcttccacattcaagaccaggtcgatgttgttctcagcacccaggtgggacctcgtcgtggtgtacacgctcagctgcagcttgggccgccgcgccaggtagggctggatgcagttggcgtcgccggagcacgggcgggtgtagacgatgccgtacatgacccagcaggtgtgcaccacgtagaccacgaacacgcccaccaccaagctggtgaaggagctgcggccgctccacatggcggccccgcgcccggcgcccccggcccgcccgcctctcagccgcgagccccgcccgcccggcgcccagcccgccgctccgggctccgccgctcactggagagccgccgcgcgccaccgccaccgccgcgggggaacgaatgcgccgcgcgccgcagaccgccggagcggtttatgaccatcaggtccttcacgcggttgctgagctggtcgatgaacaggatgggcaggtaatgcacggttttccccagctggatcatcttcatgtaccgatgcacatcggcaggcagggaggacccgtcaaagacaaagttgtccgccatcacgttcagcgccagccgcggtcgccagtgggacactggtacaggtagaccagaaacaccacgtcgtcccggaagcaggccagccggtgagacgtgggcatggtgatgatgaaggcaaagacgtcatcaatgaaggtgttgaaagccttgtaggtgaaggccttccagggcagatgtgccactgacttcaacttgtagttcacaaagagctggggcagcatgaagaggaaaccaaaggcatagaccccgttgacgaagctgttgattaaccaggagtaccagctgaaacggaaaaaaaaggagaagtcctatttcactttaacctaatcatctgtatcaaactttctaaaaatcaaatctcaggattgttccactttagagattctatgtaaaggttatataactatacttgtcaaatagcacctatctatgcatttaaaaatgcattaattatctaacataaaaattgtaatttatacacacacatacactcatacatagagagagattttcgggatgttgcaagta

SEQ ID NO: 12789 - DNA, 1145 bp, Homo sapiens
  misc_feature 1, 1143, 1144, 1145: n = A,T,C or G
nctcactccggccacctcccccaacttttttttccaaacaaattttcccccctccgtcctatccgccatcccttccctccccgtgtttttgctcccccgccccccctcttctatttatttataactagtcttaacacccgtcacccattatccattaggaatccttctgagctaggcattatcatcattctacagatgacaaatggaggttaaaagaggttgaataagctgctcatatagaggtcatatagcttttgagtggcgcagccttgacccaaattcaggtctgcctgacttgaatgctcatctctttactactaagttatatttccttaaaatcgaatataaaaatgccaagtccatgggtagagaagaggactattcaatagtctttattcttctgtcacgtgtttcaccctagggttctcatttttatcctacttttgcacccttcatgtaaaacagtccttaatgaaacaaagggtttgcggagaagtactcagaatgggaaacgttggtgtccttggggttgttagcagagccagcagtgatcctgtgaggtcagtcccagccctggaaacacaggtgtctccctgggctgagggtagtccccggctctgacggtccgatgtctttcctcaggtggagcagctcctgtacgaaagccctgagcggtactcccgctcagtgcttctcatcacccagcacctcagcctggtggagcaggctgaccacatcctctttctggaaggaggcgctatccgggaggggggaacccaccagcagctcatggagaaaaaggggtgctactgggccatggtgcaggctcctgcagatgctccagaatgaaagccttctcagacctgcgcactccatctccctcccttttcttctctctgtggtggagaaccacagctgcagagtaggcagctgcctccaggatgagttacttgaaatttgccttgagtgtgttacctcctttccaagctcctcgtgataatgcagacttcctcttactgtaacccatcgccaagtgggcttttgaaggcgcctgttcctttctcgctttcttcggaagacccttgacccatcattcccccgacccccataacgggagagcagagaagccggtccccagtgtannn

SEQ ID NO: 12790 - DNA, 1091 bp, Homo sapiens
  misc_feature 1065, 1066, 1091: n = A,T,C or G
tatagggagtcgacccacgcgtccggcctagccaatcgtcgcattaggccgaatcgcgggggccggctaaacgcgtgcgggggaggtggcttcttccggccgggccgagaggtggttacattcgttgaaggacaccagctgcggaatttgcggctttgagcagattgaaatcatggcaggtccagaaagtgatgcgcaataccagttcactggtattaaaaaatatttcaactcttatactctcacaggtagaatgaactgtgtactggccacatatggaagcattgcattgattgtcttatatttcaagttaaggtccaaaaaaactccagctgtgaaagcaacatagatggattttaaactgtctacggttcttaacctcatctgttaagttcccatgcccggaagaagaaaatgatccggtcatttacgcggggggccgggccgagaggtggttacattcgttgaaggacaccagctgcggaatttgcggctttggcagattgaaatcatggcaggtccagaaagtgatgcgcaataccagttcactggtattaaaaaatatttcaactcttatactctcacaggtagaatgaactgtgtactggccacatatggaagcattgcattgattgtcttatatttcaagttaaggtccacaaaaactccagctgtgaaagcaacataaatggattttaaactgtctacggttcttaacctcatctgttaagttcccatgcctggagaagctaatgccaactcatcatgtgataattcaatttgtacaataaattatgaacctggaaaaaaaaaaaaaaaaaaaaaaaaaaaaaacccgccgaaggccttttattgtctgcgggtgcggcggaagaaagcgagaggctatgtgaagttgggaccatagtggtctcatagctgtgtttccccgtgaaccccagctttcttttgttacagagggtggtaaaaatcgagccacgggtccccccaattaggggaagctccgtataaatttccagattaaccccgggtttaccctgcttttatgatttcgctgcgaaaacnncagaacaccaaggtacggagaatan

SEQ ID NO: 12791 - DNA, 2137 bp, Homo sapiens
  misc_feature 2136, 2137: n = A,T,C or G
caccgcggtggcggccgaggtacgcggggaagccgctcgcaagactcccgtagtccccacctctctcagcttccggctggtagtagttccgcttcctgtccgactgtggtgtctttgctgagggtcacattgagctgcaggttgaatccggggtgcctttaggattcagcaccatggcggaagacatggagaccaaaatcaagaactacaagaccgccccttttgacagccgcttccccaaccagaaccagactagaaactgctggcagaactacctggacttccaccgctgtcagaaggcaatgaccgctaaaggaggcgatatctctgtgtgcgaatggtaccagcgtgtgtaccagtccctctgccccacatcctgggtcacagactgggatgagcaacgggctgaaggcacgtttcccgggaagatctgaactggctgcatctccctttcctctgtcctccatccttctcccaggatggtgaagggggacctggtacccagtgatccccaccccaggatcctaaatcatgacttacctgctaataaaaactcattggattcaagaatattgaaagacacagcaataaagtctgcagataatcaggttcctccaccagtcagtgcagctcttcaagggattaaaagtattgtgacactttcaatggccaaaactgaggctggcgttcaaaaacagtggacagctctgattcgtagcacgcttgcttgcatcctggaatattctcaaccagaagactctgtacctacacctgatgaagtaagcatgctaacagcaattgcactcttcctgtggtctgctagtaatgaaataataggagtccagtcattacagaatggctgcatgaacagatttaaaaatgcattaaattcatgcgacccatgggttcaagccaaatgttaccagcttctcctctcagtcttccagcattccaatcgtgccctttcaactccttatattcattcattagctccaatagtggttgaaaagctaaaagctgttgaaagaaacagaccagccagtaacatagagcttttagcggttcaagaaggaataaaagttcttgaaacactggttgctcttggtgaagaacaaaacagagtccagctacttgctcttttagttcccactttgatatcttacctgctggatgaaaattcttttgcctcagcaagttcagcttccaaagatcttcatgagtttgcactccagaatttaatgcatattggacctctgtatccacatgctttcaagacagtaatgggggctgctcctgagttgaaagtgcgtctagaaactgccgttcgagcaagccaagcgagcaaagctaaagcggctgccagacaaccagcccccgccatacattctgcaccaacaattaagctaaaaacaagttttttttaatttgtaatttcatttatttgtatttatgttgtcaactagcccctaattagtgatggccactgtatcattccaggctacctatgggttctgttttatttgtatattggtattatagtgcttccaagtaggttaagtgaaataatgctcacaccacttattgatttttaaggagtgattttttttatcatgtggtgaatatgttttcattttcctcctaataatgtttctcttttgttaacttatttatttttcaaacactgagccatagtcttaaatttaaatgctaaaaacaattgtatcatgtagtcgggcagcctattgatactgtcaggggaaaaaaatgggtcagaactcagcatctgtcatgaaaaaaatcaattgaaaaacaagcagattttaaattttgaagtaatcaaaataatggaaagtgtctgttttgtggtgtatatactatgaataaaatcacagcattttctaagcaaaaaaaaaagaaaaaaaaaaaaaaaaactttgttgcggccgcttgggccctaaaagtttttaacaccttcggtggggcgcggggcccaagtgtgttgtcgaccttggccatagtgcccaaggaaatcgtgggccgaacatggggtgggtccccccaataaaagccccgggggaccggcggtcggacaacccagatgggtctggggcctcggacttcacggtccaggcgtann

SEQ ID NO: 12792 - DNA, 2477 bp, Homo sapiens
  misc_feature 2477: n = A,T,C or G
gatttgtgtctacatcgagcgattgcttcaatctgctgttctctgttcctccccgtttcccggtgtgacggatcttgtacaatttcccacttcgacagttggctgccagaatatgtgtaactttatgaaatggaaaggatatttcgctgtaggaaaaatatgcccacccgttatactcactagtcggttctatcaaaatcagttttccctgaagtaagcactgttcccagctacaagcgatcctcatttcacatggtactgtgggaccataaaatggtcctgcatcttaataatcaatagggaaaatgatgattgttccatgaccttaaggttctgctcaaatattaaaactcttaagaccagttataaatgtagaaaaaaatgcaaaaatgtttaaaaatatttagtacactgtaatttaaaacattagaaatagaattaaagtgttttatttcattgtaaaaacaaagtagtttgaatagggcttgcctttttttctggcaagtaacttaccatactgagtaagcatcttttatgttcacggcaaactgccatactccttctaagtttgggtcagcttccacccttttattgcttgtgctttcaatgttgtgaaatatttctatattcacattaaatatcttttaatgtaaagttttttttttttaaccatcacttcctctgggacgtatctgtctttattgcaaccactttgcttatttgtgttggtaagtttgccttcactaagctcctatgaatacacagcagcaagaacaacattcccatggtcagtgacttcttctacaaattcatttatgtttgattaaaatttcacttccagtgttatcatttttcattgctttgctgcactttcatctttgttgaccagttctttcgagtgttcacttctatagaatgtcaagtagatgacagagagacagcataactacatgctctgctgtacgtgaactgaattaacagatgcacagggacaaaccactggaagaatttgaaagaaataacatgactggtcacaatcatgaagcatatctgttatttacatagcgatttgtagactgaagagctagcagagaggtttgtacttcatgtaattactcagttacaatgtgctaactaaaattttaacctagattttaacaacaacagtttccttaccagttttctttccttcctggtaaggaaactggtatttaaactaaatctaggtcactgaaatttgtgcccatgggaaacatgcaaatagaggactgcctacaccctacttgtttatattgatccagacaggcttaacgctgactactgaaaaatagcctatctgaatttatatcaaatagtgaatcttaaagcacccaagatgaaaaattagggcacactgagatggttttaaaatctttgtcatatgataatcaagcttaaaatgtatcttagagtaacagatttttagaaataaagacctttaaaggctccatagtttggtaccgcagattatccagcatgtttattatgaattatttctcctccttcaatttcaatttgctcatacagccacttgcggtcacagcggcattcagctccacacttggtagaaccacaggcaggacaagcatagaaacatcctaagcagtcttcatccaggcagtcacagaggtccatcccactaaaaatcaggagaccctggctatcatagaccttactctttgctggtatcacttgtctgtctgaaccagcggttgcattttttgtaagccttcttttttctcttttaccagtttctggagcaaattcagtttgccttcctggattcgtaaattgtaatgacctcaaagctttagcagttcttccatctgactcaggtttccttttctggcggtcttcagtatcaacatccacacttccattgattatctgtgtgcattttggacaaagcttccaaccaggtacaagctgtcttccaaatttagcactcagaaaagtggcatcatctaagtcaattacatgcaaattttttttggctaatttcttgtgtatgttaaatgggtcacaacatgacttctgtaaatcctcaaatctgtcaatgtaaatttttacatgatgaaagcaaattgtattgttcccagaaagtgtcattccagttctaagttgaagtaaaagcatatcatttgatgacaattcttgcaaagtcttaaaacctgtgtgacgagtatagtaggttttatggcactcatttgtagtacgaagctggactccaactgaacatggatccatcattcttgattctagcaaattttccctgttttattttgtctggaggtttaggtcatgggctgatcacccttagcttgagctctcctccgcccggcttcgggcaagatgcgagtccacacaggccacactcgaccgaccgcttcccagccagtccccgcgcccccgcgcccgcagacgcgtgggtcgatccn

SEQ ID NO: 12793 - DNA, 1463 bp, Homo sapiens
gcccgggcaggtacgcggggattcttgtctgttctgcctcactcccgagctctactgactcccaacagagcgcccaagaagaaaatggccataagtggagtccctgtgctaggatttttcatcatagctgtgctgatgagcgctcaggaatcatgggctatcaaagaagaacgtgtgatcatccaggccgagttctatctgaatcctgaccaatcaggcgagtttatgtttgactttgatggtgatgagattttccatgtggatatggcaaagaaggagacggtctggcggcttgaagaatttggacgatttgccagctttgaggctcaaggtgcattggccaacatagctgtggacaaagccaacctggaaatcatgacaaagcgctccaactatactccgatcaccaatgacaagttcaccccagcagtggtcaatgttccgtgtttgcaaacatctgaggctgtcaccacaggagtgtcagagacagtcttcctgcccagggaagaccaccttttccgcaagttccactatctccccttcctgccctcaactgaggacgtttacgactgcagggtggagcactggggcttggatgagcctcttctcaagcactgggagtttgatgctccaagccctctcccagagactacagagaacgtggtgtgtgccctgggcctgactgtgggtctggtgggcatcattattgggaccatcttcatcatcaagggagtgcgcaaaagcaatgcagcagaacgcggggggcctctgtaaggcacatggaggtgatgatgtttcttagagagaagatcactgaagaaacttctgctttaatgactttacaaagctggcaatattacaatccttgacctcagtgaaagcagtcatcttcagcgttttccagccctatagccaccccaagtgtggttatgcctcctcgattgctccgtactctaacatctagctggcttccctgtctattgccttttcctgtatctattttcctctatttcctatctccccttcctgccctcaactgaggacgtttacgactgcagggtggagcactggggcttggatgagcctcttctcaagcactgggagtttgatgctccaagccttctcagagactacagaaacgggtgtgccctgggcctgactgtgggtctggtgggcatcattattgggaccatcttcatcatcaagggagtgcgcaaaagcaatgcggcagaacgcagggggcctctgtaaggcacatggaggtgatggtgtttcttagagagaagatcactgaagaaacttctgctttaatgactttacaaagctggcaatattacaatccttgacctcagtgaaagcagtcatcttcagcgttttccagccctatagccaccccaagtgtggttatgcctcctcgattgctccgtactctaacatcttgctcgcttccctgtctattgccc

SEQ ID NO: 12794 - DNA, 402 bp, Homo sapiens
  misc_feature 402: n = A,T,C or G
acgcctggtccccgcgtggagtctttactcaaaacagctcccgcctcaggccgagatgaggagcccttcagaatagctgctgtctctgggaggacccgggcgtccttggcagcccagctgtgacactgtggcacccagctcgacgttctgcaaggtctacacactgacccccttcctagccaataaccgagagaagcggggcctcgccttggacgggaagctcaagcacgaagacacgaacttggcctctagcaccctgttgagggaaggtgccaaccgtgagatcctggggatcattgtttcctacaaagtgaaagtgaagctggtggtgtctcggggcggcctccataacttttgttgagaaatcggccttaatcttattgatgatgactttcacatgan

SEQ ID NO: 12795 - DNA, 3999 bp, Homo sapiens
aaaaaatttaaggggcccccccttttttttttttttttttttttttttttttttttttttttttttttttttttttttttttttttttttttttttttttttttatggctgttatgcttttaatggaagcagatacaaaattcatcaatgcaaaagaatgttttacatactcattaacatagtgattaatgtaaattatattttgacttgtaaaatacagtgtgtttggcctcaagaaactacagagctgcaactcaagataactggaaaggctccttacattgtttttgcccaccacctttatataatactcctaaatgatatctggggagggaattaaaaaataatacaaagctcttttcagctgtggttcaaagaactctagtgaagctgtatggcaatgacattttgggaccatgaagtttccccagaagtatttccggtaagaggcagttaagaagcttaatagtttcaaagtctggaaagcagcaaagatatcttagagaaaacattataaaccccacttctctcctacacagacattttaaagcatggacgtaactttaaggagactgagaaaacatcagtagttttcacaaagcttcaatgaacaccccaaggcacaagtgttgaaaacggcctgttcactaaaacgtcacttttggaggtacaggtatgctgtgcttgcagtgagaggatgactttatccctacttaaaagcaccaggtgtcaagctcagcttccatttacacaggatgcaccaattatccctatgatagtgactgtttcaagtactatactacatttccaacatgtcttttgcctatttgcttagtcggtactggggttcttttaagccccgtaggtctgtagaatattttaaaaggctagaattacctcaaaaatagtcttgaaataatactgagtccttctaaagagctcactggatattttaataacatttacagaaagacaaaatttgcagtagctgagtttaagtgaagaataatgtagaactaacgtgggctaaaatgtttcataattaatgtcaaaaattgccaagattattaatatatattttggtaatcactattgaccaggttaatttttttgtgcaaaatacactatgtattaatagaacaggaaaataattatttcagaccactaacaaaagaaaacccacagcaagagaagcatctgtagggcaattaaacgttagggaagtttactagctttagaatacatcaatatacttcgataaacaagagtgttttaatgtacttttagtaacgacccaatctaaggagccttggaggcttgtgaaaaagacgtccacaaagatgctgcatttctagtgtggggtgaattaaaatacttctgtaagaaggagggaactgaatcacctcagcatgaataaacagcatttttcttttaaacagtaactcataatctgatgactcactttgctttactagttcaaaattaggcaggagaagaactaagctaattggtcagacccagaaacacaaagatttggcaagctgcagtcactcagctcatgatgtgtgataatcagcagaaaggctgctcaactcttgtccattccttcacatctgtagaggagttcgatataaccacttctctttatcaactttaagctgcatacaggcaaagagatcacaaactgcagggaggccataatggtctggggggaagttatgttcctcctgtagaggtgaattaagtaatacttcctgggccttctttcgaagcagccacttgtcttctccagaagataactggctgaggttgcccatcttctttcctggcaggacccagtcagctgtgttaaaggaacaccaggaagtattcatggggcttttaaacttctgtttgccagctctgtcttcagtaccaggcacttccttgggacttccttctttgtatgggggcctgataagccactccgacaaggggctgttctttatgacttggaaggaatcagcaattctagaaggagtcattgcctttggtgctttagtttgttctattacttcttttctaggacagagccacatattcagggaatctttatgcttctcaggctcaggtttgggttccacaggcatcccatttttatcctttccttctttcttcagaagccacttatacagagcctccttctcacaattctcatcacacacacactctgcaaagcttgtgcagggctcattggctctgcacacctcctctaccttacatgggtcctgatggttctggacaagccaatcctctgtaaccatgctgggggtggacaatggtttcttggcctccaagtggtcattcaggcacttcagattgcccaggttttcaatctccacacctttgggctggtttccctgacagttggtacaggagtcagtcttgacaagccaatcattcacattataggactggaataagagcttaaacttctcactggtttcacgactgccattctcaggcttccgcagcttatgggattcctggggagtcactagccaatctgataggtccatctcatcttgatcaggaagctcttgatctccaaccttttccatttcaatggagaaagaactagtagtggaatggctgttacacttttgataacttgatttttcactcttgaggagccagttttctaagccctttaggtttcccccgacattattgaagaaattgcaggctctggaagaagtctgactgttctccaaggtctgcttttgggtaagccagtcctgggggtcggtgctgggtatgtaaggagcttgataaccactggcaggtttgcttccaaggagccattcgctgaaagggacagctacaataccggatgctgacttctgctctggcatggagatacagcctctcttctccaggaagggcccaatatttgctgaactagcatgagccatcaagtgctcaggaatttgaatggttttgagagacccaaatgtggtgatggtctggcgcagagtaattgtgtcagcttcaaagagcaggacagttgaatcttcaggcttaagggtcaaactgcccagtctctccaggcacacagagacttgattggctagatctttgttttgggtacactccagttgatgagtaagacaattgaactggcccaataacgagtagagctgctgagcctgctgttgaagtgtctcctctttaagctgataaataaggtccacctgttcatacagccatacctcacggcttctaagacattccaggtgacggcttatgcaactgtgaatctgagctttgacctctcgcaagttatctttaatttgctgttcagcccggagaactccaccaatagcaagctccaagtccctccgtgcatcactacacctcaaaaggggttctctattactggagctgccactctggtcttggaaggtattcattctcctcactgctcctgtatcacatgggtgaaatgccggctccgatttggagagctggagcgtgatgggctgcttcactttgcacttaggccagtcatgcaagacctgtttagcagtctttcaaatgtgttacccagccttcttcacctgtgccaaatttctcacttttagcttctcaccatttgtgtggaatgccacaatgcctcacaggccaggtcaccgactcaccagctgcccggcaagcgacaggctgctttacccctgacccgagtgcgaaaggtccccgagcccgggcctcgtcccgcccacgcgtcacacggcaactccagttcgcccgggccactagcgagctggagcgctcaagccaagggcggggaggagcggaaaactccgcccattgttgccctgctcccagccagtccccgctggcgctcgcggcccccctgcagctccctccccgctgggcctccctgctagacgcctgctgcccccgcccggcccccagggtaaggccagctagaaggacctcggatggcacctggggccg

SEQ ID NO: 12796 - DNA, 315 bp, Homo sapiens
  misc_feature 314, 315: n = A,T,C or G
acctagttcttaggaagggggagggcgatggtggtggtgagtgtaaaatgcgattgagttccttcgatggctgaccctttggttgtggaagatgtcagggcttctctttgcacatgtcctcagaggcgtcgggagaaggctggaaggggcaggatcctttcagggacctgcacagccttctgatggagatccaggctctgcgcttgcaactagaaaggagcgtttaaaccagcagcactctgcagagccaagctcaaggaacaattggcaaggggggccagagaaggcacaggaaggagcccctcactctggcnn

SEQ ID NO: 12797 - DNA, 631 bp, Homo sapiens
  misc_feature 1, 619, 620, 621, 622, 623, 624, 625, 626, 627, 628, 629,630, 631: n = A,T,C or G
ngctccaccgcggaggcggccgaggtacgcgggggctgaataaagccgtgtctcatctacctgctgtctcccaagtgttcttccagctccctgcccctcatcaacccactctcctcagacctcagctggggcttgaacctgataattggtgtagtcatcaggatgagatttagaagtggtggtgcccctcttgtgacagcatttggcagtgtgcagttgggccatcaataaatccaaggtccaagggccggaattgtctgccaaattcttgggagttatttgctcagccacaggttggcatgctccaacaacattgtggactgggctcacacctatgctgaggtggccaatgtctccaactgttagatctgcaccacccttccagcagcagctgtggatggcttgccttggcatgtgcatccagcttttgtgaagaactggacatggctagaaacttggggtcccacagacaatgggcgggatgcaacatggtgagctttggatgggggtgtcacaaaacccatggcaagcctgccccctggctgactcatagcatccatgatgaatggggctggctaatgggagaaaacatggtggccccattgcaagtacgtgcccnnnnnnnnnnnnn

SEQ ID NO: 12798 - DNA, 282 bp, Homo sapiens
acgcggggttgtggtggttttcttttggcacatttgttaagttttcaaatgggcctaactctgccacatatataatatcggagatggcaaaggcttgtgacggagatatctctcttaagcctttcctgcatcagagaatggcccccactgcttcacacaagaaccacctctcccgcagttcccaaggacttgtcatttcatgttcttattttagacctgttttgtaaataaagctgtttcccaaggaaagagatcaaaaaaaaaaaaaaaaaaaaaaaaagg

SEQ ID NO: 12799 - DNA, 1590 bp, Homo sapiens
atagggagtcgacccacgcgtccgggaagcagcactggtggtgcctcagccatggcctggaccgttctcctcctcggcctcctctctcactgcacaggctctgtgacctcctatgtgttgactcagccaccctcggtgtcagtggccccaggagagacggccaagattacctgtgggggacacaacattggaagaaagagtgtgcactggtaccagcagaaggcaggccaggcccctgcattggtcgtctatgatgataaggaccggccctcagggatccctgagcgattctctggctccaactctgggaacacggccaccctgaccatcagcagggctccaggctgaggatgaggccgactattactgtcaggtgtgggatcgtagtgatgatcatccgggagtggtgttcggcggagggaccaagctgaccgtcctaggtcagcccaaggctgccccctcggtcactctgttcccgccctcctctgaggagcttcaagccaacaaggccacactggtgtgtctcataagtgacttctacccgggagccgtgacagtggcctggaaggcagatagcagccccgtcaaggcgggagtggagaccaccacaccctccaaacaaagcaacaacaagtacgcggccagcagctacctgagcctgacgcctgagcagtggaagtcccacagaagctacagctgccaggtcacgcatgaagggagcaccgtggagaagacagtggcccctacagaatgttcataggttctcaaccctcacccctcccctgggatcctgcagctctagtctcccgtggtggggggtgagggttgagaacctatgaacattctgtaggggccactgtcttctccacggtgctcccttcatgcgtgacctggcagctgtagcttttgtgggacttccactgctcaggcgtcaggctcaggtagctgctggccgcgtacttgttgttgctttgtttggagggtgtggtggtctccactcccgccttgacggggctgctatctgccttccaggccactgtcacggctcccgggtagaagtcacttatgagacacaccagtgtggccttgttggcttgaagctcctcagaggagggcgggaacagagtgaccgagggggcagccttgggctgacccaggacggtcagcttggtccctccgccgaacacccaaccattcaggctgtcatcccatgttgaacagtaataatcagcctcatcctcaggctggagcccactgatggccagggaggctgtggtcccagactttgagccagagaatcggtcagggacccctgagggccggtgatcattactatagatgaggagtttgggggcctttcctgggagctgccggtaccagtttacaggattacttccgatgttggaggtgcttccagaacaagagatggtgaccctttgcccgggggtcccagacgctgagggtggctgagtcagcacagactgggcccaggaccctgcacagtgagtgaggagggtgaggaggagagggaagctggccatgctggagattgtcctgagtcctgtcttctctacccacagctccccgcgt

SEQ ID NO: 12800 - DNA, 2550 bp, Homo sapiens
  misc_feature 2545, 2546, 2547, 2548, 2549, 2550: n = A,T,C or G
tatagggagtcgacccacgcgtccggattcattttgataagtagggagttattgatggtagagaatatttttatagactgttggagttggaagtcttcttgcttggcattaaggaagagactgataaaggtaatgggtgtgaaccactcttaaagatgtaggcaatgaaaaaatagcctggagagagaacaaggccaagtgaagtttgtcattccccacctccccccaccctccatcttccaaaccaaggagaaggagccagtggagaacaaaggagcttaaggaacattcgagtaaagttcctcaagattcagtagtagatcttaaaaatgaaatgtattaggatatattacatatggactgtttctataatatactcttcctttctcctctcagctttgacatctttatataatagcatgatattttacttacatatatctttaaaaaatcattctatagagtgtccctagttgtaacagaaactgtcgatgcaggtttatttggagaaggaattgtggagagtttgattcatgcatgggagcatttacttttacagccaaagaccaaaggtgaaagtgctaattgtgaaaagtatgggaaagttataccagcaagtgctgttatatttgggatggcagtagaatgtgcagagataagaagacatcatagagtgggtattaaggacattgctggtatccatttgccaacaaatgtgaaatttcagagtccggcttattcttctgtagatactgaagaaacaattgaaccttatacaactgaaaagatgagtcgagttcctggaggatatttggctttgacagagtgctttgaaattatgacagtagatttcaacaaccttcaggaattaaaaagtcttgcaactaaaaagcctgataagattggtattcctgttattaaagaaggcatactagatgctattatggtttggtttgtgctccagcttgatgatgaacatagtttatccacaagtcctagtgaggaaacatgttgggaacaggctgtctaccccgtacaggaccttgcagactactggataaagcctggagaccatgtgatgatggaagtatcttgtcaagactgttacttaagaatccagagtattagtgtcttgggtttggaatgtgaaatggatgttgcaaaaagttttacccagaataaagacttgttatcgttaggaaatgaggctgaactttgtagtgccctcgctaaccttcagaccagtaaaccagatgctgtagagcagacatgtatattggaatctacagaaattgctttgcttaacaacatcccatatcatgaaggctttaaaatggcaatgagcaaagttttgtcttcactgactccagagaaactgtatcagaccatggatactcactgtcagaatgagatgagctctggaactggacagagtaatactgtacagaacatccttgaacctttctacgtgttagatgtgtccgaaggcttctctgttctgcctgttattgctggcacacttgggcaggttaaaccatacagttctgtggagaaagaccagcatcgtattgctctggacctcatatctgaagccaatcactttcctaaagaaacacttgagttttggctgagacatgtggaggatgaatctgctatgttacaaaggccaaaatcagacaagttatggagcataattatattggatgtcattgagccatctgggctcattcagcaggaaataatggaaaaagctgcaatatccaggtgtttactacaatctggaggcaagatctttcctcagtatgtgctgatgtttgggttgcttgtggaatcacagacactcctagaggagaatgctgttcaaggaacagaacgtactcttggattaaatatagcaccttttattaaccagtttcaggtacctatacgtgtatttttggacctatcctcattgccctgtatacctttaagcaagccagtggaactcttaagactagatttaatgactccgtatttgaacacctctaacagagaagtaaaggtatacgtttgtaaatctggaagactgactgctattccattttggtatcatatgtaccttgatgaagagattaggttggatacttcaagtgaagcctcccactggaaacaagctgcagttgttttagataatcccatccaggttgaaatgggagaggaacttgtactcagcattcagcatcacaaaagcaatgtcagcatcacagtaaagcaatgaagagcagttttccaatgaaaactgtgtaaatagagcatcaacaagtacaaaattcttgtcttaattagtgggggtatataaaaattccttgtaatggtcaaatattttttaaaattgacattaataaagcatattttaaaagataaaaaaaaaaaaaaaaaaaaaaaaaaaactcgagggggggcccggtacccaattcgccctatagtgagtcgtattacaattcacttggccgcgttttacaacgtcgtgacttggaaaaaccctgcgttacccaacttaatcgcnnnnnn

SEQ ID NO: 12801 - DNA, 464 bp, Homo sapiens
  misc_feature 1, 2, 3, 4, 5, 6, 464: n = A,T,C or G
nnnnnncacaaatgatagtggctgagagccaaatgatgagcttctctgtgttatgtctacctagctgtgattatatcaggcacaggattgtgcgcgtgtgctctaatcccactgtgtcatgcaggatttttacctcggcctatgcctgcctggcagcaacacagccatgttccttacactccgccccctaggccaagggggtcctcttaatgggaactcgtgcacataggggagcaccctggatccataggccacagcaccaataaagagagcatcgccctcccactaatattcctgctatgctccttatgattataacagcacagtgtaggacagagcccaaaaactacccaccgtatgtacagccggtcaccagcaaggtaccccattgctaaaatattttatttcttgacccccctctgcacctcccccaatatgttatggtggttgtcagggatgaatgn

SEQ ID NO: 12802 - DNA, 1978 bp, Homo sapiens
  misc_feature 1, 2, 3, 4, 5, 6, 7, 8, 9, 10, 11: n = A,T,C or G
nnnnnnnnnnntttttttttttttttgtcagagcggtcaagttaagttgaaatctcctaagtgtaagttgggtgcttttgtctggattttcatcagctgtatgcttcttaagatcatttaaaagtaatgcaacactgggtaacctctgtactggtcggataagaagttcaacaaggctctgccgtccacattctggttttgcttggtttatcttgagaaaagcatgaaatcttggtttctgtttttcacatttaataattgtttccttgctcatttcaaagaagtttacaaagggagggtaggtttttaccaaatcttttgaatatttcagaaaaatgtcaccaatgcttttgctctcatcccaattaactataaggtcttcaagatcatcctttatcttagtgtgtacatcaaagatatctgggatgctaccaaaaatagtcttaatctcctctggtgcaaggataggtccaccacgttgtccttcctcttccaatggtacttgaaataactgaataattgttgccaatatattaacataattactttcagtttgataaagctcttttgcaacttgccaccttgctgactgctttgaaggaactggagtggagcttttagaagacttagtacaagactttggggtgtctccatagttaatgctagactctggtgtgttggagatatctaggagtgaccctatggaaagggaatgctcagctgatgggcgcttacggggtggaaatggtgacacgtctgtctctcttgaaagctgagcaagtgtttcttttaaacgacgtcgtttgcgattgctgttaggggtatttagagaaagcattgacactgatttcttgagctcaggagtatttgccttttcatataaatacatagtttctccagctcgggcatccatttgaatgcttccccagaaccactcttgcttgacaacataaagtttctttgaaggttcaaagggaagatcttttactatattctcttcaactacaaggtgagtgcatctttcatctccaagcggtaaatatttacctccttgcatttcagtcatttcttccatattggttttctcttcatctgaaaatcccaggaaacttaaaatacaatcttgaaatggaggaactttaaattcatttctaaagtcatcaactgctgcatagaaatcctgttcattccgcctttcccaagctttataaatccattctggcttcataattggagtacctagactcacagcaaccctgaatttttctccttgtgtacaatttgccaccaaatgtgtaacttttgaattaaagtcttttcgaataactccacccatgtgatggaccaatgtcaccaacctgactagttcttcttttttcctaaatccagtaaagcatagtactagattcatcatacttgtacaatacaacgggcgacatgaaaatggcaaaggctctcctttttgtgaacaatttaatacaactggtggtccaataactctacaatcagccttgtagaggtcattaaagacagaatcctgaaagtccgtgactacaaatacattttcaaattccggagaatccaaaccttcaaattcttccactgactccatctttacaaagcccactttaatgtcctttaaggcttttataagttcttcttgttttccagcttcttgaaccaatatcactcttgtttcaatctgaggcatctcttcttctacatatgaagtagatccaataagtaagttttccttggaaatctcagtaactttagaatcaaaaatggaagagtctgccaagctagtcctcccagtagtggatgttaatacactattttcagccatgatttgtattcttctaaatcagcactctcaaaaaagccctaggagttccacctcttcaaacgccgactcctctcacaaataccgccattcctcgccggcggccgccacaaccggttcaaaaactaagctgct

SEQ ID NO: 12803 - DNA, 509 bp, Homo sapiens
  misc_feature 1, 2, 3, 4, 504, 505, 506, 507, 508, 509: n = A,T,C or G
nnnngaatatgtgcttccagagtgtatttgcagggaaatgaagaatgggatcaattgcttgattaattcaaattttatatcacactttaaaactgcaatgatctgaattattgtatgttccgaagataacttattaagccattgcttttttggtttctttcttaaattgtatttaaaattggtcaaatttcaaatattaaatacaggacttacactttttaaatatactttccacaggtcatgaatgtccataaaatgctaggcattcctatttccaatattttgatggttggaaattatgcttcagatttggaactggaccccatgaaggatattctcatcctctctgcactgaggcagatgctgcgggctgcagatgattttttagaagatttgcctcttgaggaaactggtgaaaattatatattgtttcagccctgcttttccccacaagttgccttgattctgacatttggcccagcctgtacatcggccgccaccgcnnnnnn

SEQ ID NO: 12804 - DNA, 696 bp, Homo sapiens
  misc_feature 1, 2, 3, 20, 683, 684, 685, 686, 687, 688, 689, 690, 691,692, 693, 694, 695, 696: n = A,T,C or G
nnncttggaagacgacgtancagccgtgtggggggtggctttggaaaaaaaaaaattatttttttttttgcgaacttctgtgagtccatgaagctggattgtccctgacctcttttgaggaaggagagggttgcttctaactggtcctgggagatgccactgtgatgtatccgggatgaagacacaatcctggttactttatagcctgtttttcttccccagccctgacttcttaaaaagcactgcacagaggaggaggcagcaaaaccccacttcagcttgttaggactctgcacttccccagaaggaagaattaaaaatgaatatgttcaaggaagcagtgaccttcaaggacgtggctgtggcttcacggaggaggaattggggctgctgggccctgccagaggaagctgtaccgagatgtgatggtggagaactttaggaacctgctgtcagtgggtgaggacagcctccctctggaatatctttgtgcccttggagttttaaggctttgtggcccttgaaattgttccctgagtgtgggaatctgactttcctaatttttgtgggatgcagagacactggatgtttctggtctttctgaacagaatattttaggtctttttcatttgtgttttatagaagaactgtaaatgaacagaatactgctatgccttgtctannnnnnnnnnnnnn

SEQ ID NO: 12805 - DNA, 1124 bp, Homo sapiens
cccacgcgtccggtctgttctgcctcactcccgagctctactgactcccaacagagcgcccaagaagaaaatggccataagtggagtccctgtgctaggatttttcatcatagctgtgctgatgagcgctcaggaatcatgggctatcaaagaagaacatgtgatcatccaggccgagttctatctgaatcctgaccaatcaggcgagtttatgtttgactttgatggtgatgagattttccatgtggatatggcaaagaaggagacggtctggcggcttgaagaatttggacgatttgccagctttgaggctcaaggtgcattggccaacatagctgtggacaaagccaacctggaaatcatgacaaagcgctccaactatactccgatcaccaatgtacctccagaggtaactgtgctcacgaacagccctgtggaactgagagagcccaacgtcctcatctgtttcatagacaagttcaccccaccagtggtcaatgtcacgtggcttcgaaatggaaaacctgtcaccacaggagtgtcagagacagtcttcctgcccagggaagaccaccttttccgcaagttccactatctccccttcctgccctcaactgaggacgtttacgactgcagggtggagcactgggggcttggatgagcctcttctcaagcactgggagtttgatgctccaagccctctcccagagactacagagaacgtggtgtgtgccctgggcctgactgtgggtctggtgggcatcattattgggaccatcttcatcatcaagggattgcgctgtttcttagagagaagatcactgaagaaacttctgctttaatgactttacaaagctggcaatattacaatccttgacctcagtgaaagcagtcatcttcagcgttttccagccctatagccaccccaagtgtggttatgcctcctcgattgctccgtactctaacatctagctggcttccctgtctattgccttttcctgtatctattttcctctatttcctatcattttattatcaccatgcaatgcctctggaataaaacatacaggagtctgtctctgctatggaatgccccatggggcatcccttgtgtacctgcccgg

SEQ ID NO: 12806 - DNA, 622 bp, Homo sapiens
  misc_feature 107, 108, 109, 110, 111, 112, 113, 114, 115, 116, 117, 118,119, 120, 121, 122, 123, 124, 125, 126, 127, 128, 129, 130,131, 132, 133, 134, 135, 136, 137, 138, 139, 140, 141, 142,143, 144, 145, 146, 147, 148, 149, 150, 151, 152, 153: n = A,T,C or G
  misc_feature 154, 155, 156, 157, 158, 159, 160, 161, 162, 163, 164, 165,166, 167, 168, 169, 170, 171, 172, 173, 174, 175, 176, 177,178, 179, 180, 181, 182, 183, 184, 185, 186, 187, 188, 189,190, 191, 192, 193, 194, 195, 196, 197, 198, 199, 200: n = A,T,C or G
  misc_feature 201, 202, 203, 204, 205, 206, 207, 208, 209, 210, 211, 212,213, 214, 215, 216, 217, 218, 219, 220, 221, 222, 223, 224,225, 226, 227: n = A,T,C or G
ccgggcaggtacgcggggaggaactgctcagttaggacccagacggaaccatggaagccccagcgcagcttctcttcctcctgctactctggctcccagataccacnnnnnnnnnnnnnnnnnnnnnnnnnnnnnnnnnnnnnnnnnnnnnnnnnnnnnnnnnnnnnnnnnnnnnnnnnnnnnnnnnnnnnnnnnnnnnnnnnnnnnnnnnnnnnnnnnnnnnnnnncctggccaggctcccaggctcctcatctatggtgcatccaccagggccactggtatcccagccaggttcggtggcagtgggtctgggacagagttcactctcgccatcagcagcctgcagtctgaagattctgcagtttactactgtcagcagtataataactggcccccgtacacttttggtcaggggaccaagctggagatcaaacgaactgtggctgcaccatctgtcttcatcttcccgccatctgatgagcagttgaaatctggaactgcctctgttgtgtgcctgctgaataacttctatcccagagaggccaaagtacagtggaaggtggataacgccctccaatcgggtaactcccaggagagtgtcacagagcaggacagcaagga

SEQ ID NO: 12807 - DNA, 1557 bp, Homo sapiens
  misc_feature 1, 1535, 1536, 1537, 1538, 1539, 1540, 1541, 1542, 1543,1544, 1545, 1546, 1547, 1548, 1549, 1550, 1551, 1552, 1553,1554, 1555, 1556, 1557: n = A,T,C or G
ncgtacgcaatgaccttgatcatgaacaggcttcccccatcccctctccctttgtaaaccacctggctttttgcagtacaaacacctgaaatgtaaacgtgaccctcatgttaagatagaagggaaggacactgatgactggctgtgcgtggattttggtaagttattctggcgtattttacaggtaactgttggtactacgctaatcttgaattgttttcagttgcaaaaggattgagatcaaattgatgaatgtatttccaggtaagatttttgaagtgtgtttaaggtaacaaaagtttttttagttataatccaggtgctcttattcacatgtagaattttcacctaaccaaaccaaagtaccctagatgatgccctcctggaggaagatatatactacatggtgtgtatctactagccacacagatcaggaaggtggtggacaacaggataacatagtagaggcgggagagattccttagtagtggtagaggaaggtttgggggctgtggtgcataaatgagatgaggatgaggttattccaggcacaaaaaaggacaagagcagaagactagaattttgaaaagatctaacaactttgggtattaatgtgtacatagtttcaaagcacctcccaacaagataatatttacaaaggggaaacataactgtatgtcaagaactgaggagtctgagattttattctgcttgtaagctaatacattgtcccgccagttttcatggacactggtaaaagacaagactattagagggttagagacaaagaacagtttattactcacagcagtagccagcatccattttgcactggtttcctgagctctggattccatagggcaacatgggccagatgacaccagcacacacagttgtaaaactggaactcagatgagggtgtctaggttttttataactggcaggaagcaggcctacttttgctctgatggtttctcacttttgtcgctattaacgttttggaccaggtaattttgcatgtgggggaggggtgtctcttgtgcacggtacgatgtttagcagtatcctcccttctccaattgtgacaatcaaaaatgactctaaacattaccattattacctaattgagaaatgctgctgtaagcaaagctgccctttgccctggagggaggcagtatctttctgttaagaatattcacgatacaaacattcttggatagtcaaaacaaaaggcagtcagtgtttttgcacaaaagatgtgcagaagtgtgttacccatggagaattgtcaccgaagagaatcctgacaccattagtctctttgataaagttactatcaccagcaatgttatatattgacatatgcctcctgtaggtacactgagaaaggcatagcatcacttctgtggtatttttgctggggcaggagaattcaggagagaggtgaaagtgaataagatttagagggagaaatagtttccctaagttattcatcacagggcaaagtatagcaatgacaaatgagtaagaaagannnnnnnnnnnnnnnnnnnnnnn

SEQ ID NO: 12808 - DNA, 3492 bp, Homo sapiens
  misc_feature 1, 2, 3466, 3467, 3468, 3469, 3470, 3471, 3472, 3473, 3474,3475, 3476, 3477, 3478, 3479, 3480, 3481, 3482, 3483, 3484,3485, 3486, 3487, 3488, 3489, 3490, 3491, 3492: n = A,T,C or G
nnccaattggaacctccaccgcgggggcggccgaggtacgcggggggcggcggcggagagagctggctcagggcgtccgctaggctcggacgacctgctgagcctcccaaaccgcttccataaggctttgcctttccaacttcagctacagtgttagctaagtttggaaagaaggaaaaaagaaaatccctgggccccttttcttttgttctttgccaaagtcgtcgttgtagtctttttgcccaaggctgttgtgtttttagaggtgctatctccagttccttgcactcctgttaacaagcacctcagcgagagcagcagcagcgatagcagccgcagaagagccagcggggtcgcctagtgtcatgaccagggcgggagatcacaaccgccagagaggatgctgtggatccttggccgactacctgacctctgcaaaattccttctctaccttggtcattctctctctacttggggagatcggatgtggcactttgcggtgtctgtgtttctggtagagctctatggaaacagcctccttttgacagcagtctacgggctggtggtggcagggtctgttctggtcctgggagccatcatcggtgactgggtggacaagaatgctagacttaaagtggcccagacctcgctggtggtacagaatgtttcagtcatcctgtgtggaatcatcctgatgatggttttcttacataaacatgagcttctgaccatgtaccatggatgggttctcacttcctgctatatcctgatcatcactattgcaaatattgcaaatttggccagtactgctactgcaatcacaatccaaagggattggattgttgttgttgcaggagaagacagaagcaaactagcaaatatgaatgccacaatacgaaggattgaccagttaaccaacatcttagcccccatggctgttggccagattatgacatttggctccccagtcatcggctgtggctttatttcgggatggaacttggtatccatgtgcgtggagtacgtcctgctctggaaggtttaccagaaaaccccagctctagctgtgaaagctggtcttaaagaagaggaaactgaattgaaacagctgaatttacacaaagatactgagccaaaacccctggagggaactcatctaatgggtgtgaaagactctaacatccatgagcttgaacatgagcaagagcctacttgtgcctcccagatggctgagcccttccgtaccttccgagatggatgggtctcctactacaaccagcctgtgtttctggctggcatgggtcttgctttcctttatatgactgtcctgggctttgactgcatcaccacagggtacgcctacactcagggactgagtggttccatcctcagtattttgatgggagcatcagctataactggaataatgggaactgtagcttttacttggctacgtcgaaaatgtggtttggttcggacaggtctgatctcaggattggcacagctttcctgtttgatcttgtgtgtgatctctgtattcatgcctggaagccccctggacttgtccgtttctccttttgaagatatccgatcaaggttcattcaaggagagtcaattacacctaccaagatacctgaaattacaactgaaatatacatgtctaatgggtctaattctgctaatattgtcccggagacaagtcctgaatctgtgcccataatctctgtcagtctgctgtttgcaggcgtcattgctgctagaatcggtctttggtcctttgatttaactgtgacacagttgctgcaagaaaatgtaattgaatctgaaagaggcattataaatggtgtacagaactccatgaactatcttcttgatcttctgcatttcatcatggtcatcctggctccaaatcctgaagcttttggcttgctcgtattgatttcagtctcctttgtggcaatgggccacattatgtatttccgatttgcccaaaatactctgggaaacaagctctttgcttgcggtcctgatgcaaaagaagttaggaaggaaaatcaagcaaatacatctgttgtttgagacagtttaactgttgctatcctgttactagattatatagagcacatgtgcttattttgtactgcagaattccaataaatggctgggtgttttgctctgtttttaccacagctgtgccttgagaactaaaagctgtttaggaaacctaagtcagcagaaattaactgattaatttcccttatgttgaggcatggaaaaaaaattggaaaagaaaaactcagtttaaatacggagactataatgataacactgaattcccctatttctcatgagtagatacaatcttacgtaaaagagtggttagtcacgtgaattcagttatcatttgacagattcttatctgtactagaattcagatatgtcagttttctgcaaaactcactcttgttcaagactagctaatttatttttttgcatcttagttatttttaaaaacaaattcttcaagtatgaagactaaattttgataactaatattatccttattgatcctattgatcttaaggtatttacatgtatgtggaaaaacaaaacacttaactagaattctctaataaggtttatggtttagcttaaagagcacctttgtatttttattatcagatggggcaacatattgtatgaagcatatgtagcacttcacagcatggttatcatgtaagctgcaggtagaagcaaagctgtaaagtagatttatcacacaatgactgcatacagacttcaaatatgtcaatagtttggtcatagaacctagaagccaaaagccacacagaagggcaagaatcccaatttaactcatgttatcatcattagtgatctgtgttgtagaacatgagggtgtaagccttcagcctggcaagttacatgtagaaagcccacacttgtgaaggttttgttttacaaatcacttgatttaacacactcaggtagaatatttttatttttactgttttatacccagaagttatttctacattgttctacagcaagaatattcataaaagtatccctttcaaatgcctttgagaagaatagaagaaaaaaagtttgtatatattttaaaaaattgttttaaaagtcagtttgcaacatgtctgtaccaagatggtactttgccttaaccgtttatatgcactttcatggagactgcaatacgttgctatgagcactttctttatccttggagtttaatcctttgcttcatctttctacagtatgacataatgatttgctatgttgtaaaatctttgtaaaaaatttctatataaaaatattttgaaaatcttaatatttcctgaattctgttccccaattatttaacaaggctttgttacagaacatctgttttggtaactgtctttctctataaagggctacagggtcannnnnnnnnnnnnnnnnnnnnnnnnnn

SEQ ID NO: 12809 - DNA, 1539 bp, Homo sapiens
  misc_feature 1535, 1536, 1537, 1538, 1539: n = A,T,C or G
acctttgaaattttttttcatttaaaaaatatggatcttggctcaggcctgtaatcccagcaaatttggaggccaaggcaaggggatcacaaggtgaagagatcaagaccatcctggccaatacagtgaaacgctgtcactactaaaaatccaaaaaattagctaggcatggtggcagctggtgtagtcccagtgtggtgtagtcccagctacctgggaggctgagggaggacaatcgcttggacccgtgaggcagaatttgcagtgagcaaagatggcgccattgtacctgcccgggccgcccgggcaggtacgcgggggccactctgggcaggatccaacgtcgctccagctgctcttgacgactccacagataccccgaagccatggcaagcaagggcttgcaggacctgaagcaacaggtggaggggaccgcccaggaagccgtgtcagcggccggagcggcagctcagaaagtggcggaccaaggccaacagaaggcggggcacaagacaaggcctattgtgcacccaagcgtgggcccaaagaaccaacccagggaacaacccaattggaaccaaggcactgctaccccagggccttcaggaagaaccttaccaccaggcgaactgggcgagaccaaaaaatattttcggggccagtctctatagaaaaatatcgcaacaacacaagggggaaaaacaccattgggcaatatccggacaccaatccacttgaaaaacgtgtggacacaaggacagggcgaaaataaacctttgtgagttgtaccccccccacaattatccacaggtacggcaacaatagtaaagcgaccacaaattggcattgtggggcccccacaaaggaaatctcatccacgaggtgacccaaaggcgcatagccccaatgccctaccaagtcggggagtcacgtggcccccaccgtgtctcaatttaaaacacgagcttagcaaggggatacacaactaaaacgcacacaaaaaaacaaagacacaacggatagatataagaaatagaaagaaaacgcagaggggagtgcgaccgaggcaaacccgctgaggcggcgccacaagcggacgaaaggaagaggcgtcagcacaaagagaagacacggagaggaaggagaaggggggagcaagcagagagagagaaaaacagaagagggagagcaatgaaaggaaaaaaacagcacagtgagaacaagagagcgaacgagagcaaccaagaaagaggaaagaaaccaatctggagcaacacaaaaaaacaagaaggagagaaagaatagaatcacaatgtttatccccacaataaaaaaacaaacagtaggcggcccgcgagagggagacgaacaaacaaagccagggaagacaaaacaaaaacagaccgcccgaagagagaggagcgagaaacaggagaccccaagaaaacggcgggaagaataaaccgaaaagaaaggaaagaacacagagacagaccagcagcagaaataaaagaacgcgggcgacccagcgacannnnn

SEQ ID NO: 12810 - DNA, 2022 bp, Homo sapiens
agggagtcgacccacgcgtccggacggctttggaatccaccagctacatccagctccctgaggcagagttgagaatggagagaatgttacctctcctggctctggggctcttggcggctgggttctgccctgctgtcctctgccaccctaacagcccacttgacgaggagaatctgacccaggagaaccaagaccgagggacacacgtggacctcggattagcctccgccaacgtggacttcgctttcagcctgtacaagcagttagtcctgaaggcccctgataagaatgtcatcttctccccactgagcatctccaccgccttggccttcctgtctctgggggcccataataccaccctgacagagattctcaaaggcctcaagttcaacctcacggagacttctgaggcagaaattcaccagagcttccagcacctcctgcgcaccctcaatcagtccagcgatgagctgcagctgagtatgggaaatgccatgtttgtcaaagagcaactcagtctgctggacaggttcacggaggatgccaagaggctgtatggctccgaggcctttgccactgactttcaggactcagctgcagctaagaagctcatcaacgactacgtgaagaatggaactagggggaaaatcacagatctgatcaagggaccttggactcgcagaccaattgatggtccctggtgaattaacatctttctttaaaagccaacatggggagatgccctttggaaccccccaagaatactcatcaagtccagggtctacttgagccagacacagtgggtaatggtgcccatgatgagtttgcatcacctgactataccttacttccgggacgaggagctgtcctgcaccgtggtggagctgaagtacacaggcaatgccagcgcactcttcatcctccctgatcaagacaagatggaggaagtggaagccatgctgctcccagagaccctgaagcggtggagagactctctggagttcagagagataggtgagctctacctgccaaagttttccatctcgagggactataacctgaacgacatacttctccagctgggcattgaggaagccttcaccagcaaggctgacctgtcagggatcacaggggccaggaacctagcagtctcccaggtggtccataaggctgtgcttgatgtatttgaggagggcacagaagcatctgctgccacagcagtcaaaatcaccctcctttctgcattagtggagacaaggaccattgtgcgtttcaacaggcccttcctgatgatcattgtccctacagacacccagaacatcttcttcatgagcaaagtcaccaatcccaagcaagcctagagcttgccatcaagcagtggggctctcagtaaggaacttggaatgcaagctggatgcctgggtctctgggcacagcctggcccctgtgcaccgagtggccatggcatgtgtggccctgtctgcttatccttggaaggtgacagcgattccctgtgtagctctcacatgcacaggggcccatggactcttcagtctggagggtcctgggcctcctgacagcaataaataatttcgttggacacgtaaaaaaaaaaaaaaaaaggatttgccggcctgctgcgcattgcagttcgcggcgtgcggaggaaagagacgacgcgctccaggcaagcaggaacccgcccatgagtgctgcgacggagtgacacaacacgcgcccgtggcagcgtgtgcattgcgagagagcctggatctgtcgagcgcacagtctgagcaactgcacagagcgacagcggtatgctcgcgggcgttctcgcgagtgacgacgaactgaagactggcaccgtgagacaccgagaggcgcaatgccgaagtctgagaacgcccaggaagtgagagccgagactgcgaaagctcggtagcgcggtgccagcgcgcggcctccccctaaaacgcctgcgcccttacatcaccacgcgcgaacaccgtccggctccggcgc

SEQ ID NO: 12811 - DNA, 934 bp, Homo sapiens
  misc_feature 1, 930, 931, 932, 933, 934: n = A,T,C or G
natgaacacaaacaatataaaaagccaatttaaccaatccaccatgcttgttttttcttttttcctaggaattaacagtggcaggccctggaaatagatgggtaagagcaaatctgtggtcatcaactaggtgcacagtccagtgggtgtgtgagatgcatgcacagggcagacagtagagcctgcaactgtgatggaattaacagggtaggccctgcaaacagatgagtaaaagcaaatctgcggccatcactaggtgcacagtgcagtgggggtgtgtgagatgcacagggcagacagtacagcctgcaactgtgatggaattaacagggtaggccctggaagatgagtaaaagcaaatctgcggccatcactaggtgcacagtgcagtgggggtgtgtgagatgcacagggcagacagtacagcctgcaactgtggcgcaggcgcagaacaggattgaatttcgctaaaaagacaaaggaagaaaaagtatggtctctgtcctcagggcattgcaacccattaggctgaatcacatgaactgcagattatgcaggtaaaatatggccacatatccacaccttcacagggctctgcctgacacacggaggacacaatcacaagagccaaagcagggagggggcagggaaaaagtggacacaaccccacccagtccagtggtgcggatcaataaatcgagacttacggccaatctgaaatagattctattcatgaaagtccttccagaaacaacattcaggatgacggcatcagtgttagccaagtgtctgagtggtctgggtgtcacatctgtgtgtgtgcccaaatggatgaaatttatgcacaaccaataagccccacaaaagtgattgttatgctgagccgaacaaccattttttacttccctttgtctctcccatagcttctcnnnnn

SEQ ID NO: 12812 - DNA, 1879 bp, Homo sapiens
  misc_feature 1879: n = A,T,C or G
ggagtcgacccacgcgtccggcccgccgcctgccgccgccgccgccgccgccggagctctgtagtatggcatcgaggagaatggagaccaaacctgtgataacctgtctcaaaaccctcctcatcatctactccttcgtcttctggatcactggggtgatcctgctggctgttggagtctggggcaaacttactctgggcacctatatctcccttattgccgagaactccacaaatgctccctatgtgctcatcggaactggcaccactattgttgtctttggcctgtttggatgctttgctacatgtcgtggtagcccatggatgctgaaactgtatgccatgtttctgtccctggtgttcctggctgagctcgtagctggcatttcagggtttgtgtttcgtcatgagatcaaggacaccttcctgaggacttacacggacgctatgcagacttacaatggcaatgatgagaggagccgggcagtggaccatgtgcagcgcagcctgagctgctgtggtgtgcagaactacaccaactggagcaccagcccctacttcctggagcatggcatcccccccagctgctgcatgaacgaaactgattgtaatccccaggatctacacaatctgactgtggccgccaccaaagttaaccagaagggttgttatgatctggtaactagtttcatggagactaacatgggaatcatcgctggagtggcgtttggaatcgcattctcccagttaattggcatgctgctggcctgctgtctgtcccggttcatcacggccaatcagtatgagatggtgtaaggagaagtctttcaagaatgacggaataagagacctgttttaaaaaggaactgcagcaatctttgaaagacttccaaagaatgttagagcacagtacataatacacttgccctgctccctctaccccttaccccacaacgtgcaactgacactcccacccagtctctgctccacctttcagcccacgtcacgtgtagtgtccattttgtgaagccctgttgtgccacagagtgtagccaggtccccctgcagctagtcctagtgaacctcaccccgaggccctgcatgggccagcccctccatctgtacttggtccaactgcaactcatcatcggtgactggttatcacaccatcgctggcccctttgggccctgcatgtagtgtgggaggctcctgttagctcctcactgtggtaaatgccacacacctttaagtagataagcagacgatagttatctgttcttttgacttaatctcatttggtttgattttccctctactaaggctttcctaccttcttcaggctgcctaagacatgtaacgaaacacttcaataattgtccatgaggagaaaaaaagcatgtgtcatgcatgaaggaaactgaacttgaggtggcctccttgcttgttacatacctgggtatgtgtaggcagtttagtgcatctttgcctctcagttgaaacctgtataaccctgttacaaagctgtgttgttgcttcttgtgaaggccatgatattttgtttttccccaattaattgctattgtgttattttactacttctctctgtattttttcttgcattgacattatagacattgaggacctcatccaaacaatttaaaaatgagtgtgaagggggaacaagtcaaaatatttttaaaagatcttcaaaaataatgcctctgtctagcatgccaacaagaatgcattgatattgtgaacatttgtgatatatgtattaataaatagagcaattacaagcaaaaaaaaaggggcgcagaaaccagggccagaacacacacttaaaggccataggataaaacagccgaaaagagcgaan

SEQ ID NO: 12813 - DNA, 1197 bp, Homo sapiens
  misc_feature 1195, 1196, 1197: n = A,T,C or G
ccgcgtccggcacagtgtcacctgtctaggctagcccaagtgtcattggagctactgcctgcaggactgtggcccatatcctttcccactgtctcaaggatccttaagcctattacgtggttgtcctggctttggcagggatgtgggttaaagagtagtccctttggcattcactggctaaaggcaagtttacgaggtgcgtccactctgggaagttggggacctcgctttcatccgccgttctgttgataaacaaccaaggtctttctctgcagggcccaggggcggagaatagtttgctgtggtgtgggaatgtagaccaaaatccaccttggctagttcagaggggaggacttcagtggagggtttgatttcccactgagttgaagccaggcttgatttttttggcctggatagggtgatgagccttctgacaaaaggagaccaatctcttggagaccactgtgatcacaccctccctgtccccattggcatctccccaatgcccacctggagtcctcccctcaattgtctcattcaccaactgtcttcttctctcgactaggtatggttccgaccggcgtttagccgagctctctgattaccgccgtttatcagagtcgcagctttcgttccgccgctcgccgacaaagtcctcgctggattaccgtcgcctgcccgatgcccattccgattacgcacgctattcgggctcctataatgattacctgcgggcggctcagatgcactctggctaccagcgccgcatgtagggccatcctgggatggggcaccacagggagggagggagaaaagaggtgggtagggttacagatccaggttataactactctggcccatacctttcctggttgtggtttttcatgccctctaccatgtgggccttccccaggagatgatcctgttagtgttcggcagtactactttgttccttcgctcagcagcaaatctgctactggtctagatctgcggtttccctctacctgcttccgttcgccgatgggacttctttactgttaattgtccgggcccttattcgggcgcgattaggcgccggtgggaggccctgagtagcgccggccttctaatggagggcggagcgtctctttgcgggcgccggctcgtctatgggctgggggttccccacgggaggggcccccggggcccttttgcnnn

SEQ ID NO: 12814 - DNA, 344 bp, Homo sapiens
  misc_feature 1, 2, 3, 4, 5, 6, 7, 343, 344: n = A,T,C or G
nnnnnnntttttttttttttttttttttttttttaggggtgagtgatagcttaattaaagattacaatctatcttcttcagaaggctagagaatggactggcaatcactaaattttctttcaggtaactgccaaacttaaatttgttcttccaaataaaataattacccccttctgtgccgctcaaaataccatgctggaaaaaagacagggttcatgatttgccctataattcaaccctcatcttttccgttttcaagaatcggggaaaggggaatttcatttactgattatcagcaggcctcctgagagataggccggggctgctgtaaggtgaaaagcann

SEQ ID NO: 12815 - DNA, 421 bp, Homo sapiens
  misc_feature 421: n = A,T,C or G
ctaacaaggaaagcccctggagctcctgtaataagaatgtggttggaagatgcaaactgtggatgatcatcacctccattttcctaggtgtcattacagtgatcatcataggcttatgtcttgctgcagtaacttatgttgatgaagatgaaaatgaaatacttgaattatcatcaaacaaaacattcttcgtcatgctgaagattccagaggagtgtgttgctgaagaggaattgcctcacctgctcaccgaaaggaatgaagtgatggaggctggtctctgtctgaaagcagtgctctaccaagtcctggagatgaagggaattcactctgttttgcagaaaagattctgtggattaatacagaagcaccagcaacaccagaggggtggagactcctttctctcccgattctacaggcn

SEQ ID NO: 12816 - DNA, 544 bp, Homo sapiens
gaggtaccattataggtttcaaaatttgcaaaaatagaaaaattattttacttctactcccagtataattattttacatattatcttctagtctgttttataatatttattttaaattgaaatcataaaacttttttttgctcttagccaaagaatgtcggcaaactctaatggtcctcattcccactgcacagcatttcagtttgactttacatactcaggggaaaagaaggcagcttggttgagaaactgcaagatcccaagtgcctgttttttgtcttttgtttagtcttgtttttttgttttttgtttttttgaggaactaatgaataaagcacacaaaatctccgagcagtagctggcctttcaggggcacgctgcacagtagttctggagaggacagtatctccaagggtggatgagttccccattgctcaaaggaatcagccaaggggcctgcagcggaagctcccaggctgagctggaacttgaaaccaggtctgtctgcctctgcaccttcaagccaacaagggcataaggcaat

SEQ ID NO: 12817 - DNA, 1526 bp, Homo sapiens
  misc_feature 1, 2, 1522, 1523, 1524, 1525, 1526: n = A,T,C or G
nncgttcttacttcatcagaaactaatcagacacgcgactccacactttgttgtattccacccctttatgcacacctctttttcttgtcgagcacctcatatagctcttgttgctctatctcctctggcgtctataattttcttactacctctcaacagatgtgccttttgtatcaatcttttcccgagacgcactttgtacacgttggacacctaccgtgaacttgtctttacccacccactccatattaccctggggcaaacttcttgggagtttaaccttgttcccccgttggcccggcctgtcccagaaaacatttcccacaacagttgggttggttttacgctttggaatttgggtgttccagtatgaactgtcccacctcagatcatcaggcactagttagagtctcataaggagcatgcaacctagatcccgtggcatgtacagttcacaataggtttgtgctccaatgctaatctaatgccatcgttgatctgacaggaggctgagctcaggcggtaatgctttctcgctggctgctcacctcctgctgtgcggtcccattcctaacaggccatggaccagtgctgggggtttgggactcctgttctaaccaatgctccctctattaaaagggattttcacactagctgatggaaacaccaagtgttgcaagctctgtgtgagctacagagattattccttttgggaagttctttgccctgctttgcataatttcctcaaatacatgtactaataagtacttagctgaagattgaacacagatatccaaggcattctctctgtgcagcaacctattctctagtctgtcctgtgatgtctagccaccctgacttcttcaaacttactaccaggctctgcctgggtcctccttccctgctctgcagttgacaaactcaggcagcaaactggagcaatcatagggctcatctcttctattttctctctctcagggatcaatgtactgtactgcactatatccaatgttgaagctagagtttaaaatactttttccagtttcttagttgtttaaggtggaggacaaatctagtccctattactccaacttggccagaagcagaagtctccattccatctttgtggtcagaaagaacagtatgacagaaggcagcttgttagaatgggaagacccatgggctaagaatcagcattacctaggctctagtctcagcactgtatttactaactttgtgcaagtgattgatccttcttgaatttctgtttccccatttgtaaagtgggtcaaatcataattccacggctgctgtacagatcagttgaagtagtatcttaatgttcatgagtgtatttctctttcagggttatttatttttttttttttgggtcccaataaaccgtccaaatcttttggggttagttcaggcactgtatatagtagaagctggtgttagaaaagttgatttatactggaatatttttcacagaatcaaccccaatgctcactaacaaactgannnnn

SEQ ID NO: 12818 - DNA, 560 bp, Homo sapiens
aggtcggccgaggtacgcggggagtgctcatgctcgctgcaggggtcggaggtcagggcgagcgtctcgcaggccgtaggaggaagatggcggtggagtcgcgcgttacccaggaggaaattaagaaggagccagagaaaccgatcgaccgcgagaagacatgcccactgttgctacgggtcttcaccaccaataacggccgccaccaccgaatggacgagttctcccggggaaatgtaccgtccagcgagttgcagatctacacttggatggatgcaactttgaaagaactgacaagcttagtaaaagaagtctacccagaagctagaaagaagggcactcacttcaattttgcaatcgtttttacagatgttaaaagacctggctatcgagttaaggagattggcagcaccatgtctggcagaaaggggactgatgattccatgaccctgcagtcgcagaagttccagataggagttagatttggatgtgctattgtatgattacgaatagtctgtatgtttaagcccttctggtaaatatgaaggaaagtgctctta

SEQ ID NO: 12819 - DNA, 253 bp, Homo sapiens
acgcgggacatgtgtagctactgcattgttcctttcacccggggcagggacaggagtcggcctattgcctccattctagaggaagtgaagaagctttctgagcaggtgaagagttctccaggctttcttgctgtgaacatgtttgggggaggatgaggataacctttgtagttttgagcctatgctgtctctgacttattaaagtttaggaccatgcctggccagaaagaactacaattgtgtacctgcccgg

SEQ ID NO: 12820 - DNA, 2157 bp, Homo sapiens
  misc_feature 1, 2, 3, 4, 2149, 2150, 2151, 2152, 2153, 2154, 2155, 2156,2157: n = A,T,C or G
nnnnccgtccccttgcttcgtcttcgcttttctttctacttattcttatctgtgtctttcgctttgtttgcctctccgtctgttttccctcagggcccccttctttcctcgaccttttcaaatcgcaaatatggcgccggagcggctgcggagccgggcgctctccgccttcaagttgcggggcttgctgctccgtggtgaagctattaagtacctcacagaagctcttcagtctatcagtgaattagagcttgaagataaactggaaaagataattaatgcagttgagaagcaacccttgtcatcaaacatgattgaacgatctgtggtggaagcagcagtccaggaatgcagtcagtctgttgatgaaactatagagcacgttttcaatatcataggagcatttgatattccacgctttgtgtacaattcagaaagaaaaaaatttcttcctctgttaatgaccaaccaccctgcaccaaatttatttggaacaccaagagataaagcagagatgtttcgtgagcgatataccattttgcaccagaggacccacaggcatgaattatttactcctccggtgataggttctcaccctgatgaaagcggaagcaaattccagcttaaaacaatagaaaccttattgggtagtacaaccaaaatcggagatgcgattgttcttggaatgataacgcagttaaaagagggaaaattttttctggaagatcctactggaacagtccaactagaccttagtaaagctcagttccatagtggtttatacacagaggcatgctttgtcttagcagaaggttggtttgaagatcaagtgtttcatgtcaatgcctttggatttccacccactgagccctctagtactactagggcatactatggaaatattaatttttttggaggtccttctaatacatctgtgaagacttctgcaaaactaaaacagctagaagaggagaataaagatgctatgtttgtgtttttatctgatgtttggttggaccaggtggaagtattggaaaaacttcgcataatgtttgctggttattcaccagcacctccaacctgctttattctgtgtggtaatttttcatctgcaccatatggaaaaaatcaagttcaagctttgaaagattccctaaaaactttggcagatataatatgtgaatacccagatattcaccaaagtagtcgttttgtgtttgtacctggtccagaggatcctggatttggttccatcttaccaaggccaccacttgctgaaagcatcactaatgaattcagacaaagggtaccattttcagtttttactactaatccttgcagaattcagtactgtacacaggaaattactgtcttccgtgaagacttagtaaataaaatgtgcagaaactgcgtccgttttcctagcagcaatttggctattcctaatcactttgtaaagactatcttatcccaaggacatctgactcccctacctctttatgtctgcccagtgtattgggcatatgactatgctttgagagtgtatcctgtgcccgatctacttgtcattgcagacaaatatgatcctttcactacgacaaataccgaatgcctctgcataaaccctggctcttttccaagaagtggattttcattcaaagttttttatccttctaataagacagtagaagatagcaaacttcaaggcttttgagattcttaaagatcatctgaagaaaattcatcagttttctgcttaactctatatcttatgtgattctgatattacaataaaattatggtaaactttaggatgttctgcttaaatttgtattttgtgaaattttgatactaagtgataaatatgatggtatacttgagaaagttttctaggaaaaatattttctgcatagtcttttaagaaaaatatatgggggccaggcgcagtggctcacgcctgtaatcctagtgctttgggaggccaaggcgggtggatcacctgaggtcaggagttcgagaccagcctagccaaggtagcaaaaccctatctctgctaaaaaaaaaaatacaaaaattagctgggcatggtggcgggcgcctgtaatcccagcttctcgggaggctgaggcagggagaatcacttgaaccnnnnnnnnn

SEQ ID NO: 12821 - DNA, 453 bp, Homo sapiens
  misc_feature 1, 2, 269, 270, 271, 272, 273, 274, 275, 276, 277, 278, 279,280, 281, 282, 283, 284, 285, 286, 287, 288, 289, 290, 291,292, 293, 294, 295, 296, 297, 298, 299, 300, 301, 302, 303,304, 305, 306, 307, 308, 309, 310, 445, 446, 447: n = A,T,C or G
  misc_feature 448, 449, 450, 451, 452, 453: n = A,T,C or G
nnaaatatatcagttattgtttgacagttatcgtggattattgaatattaaatattctttgcttggatgcgggattgtgattatatagatgatatgaagctccaccgcggaggcggccgatgtacataagtggagtgcttggaagagagaaagaggagaagagtgaaagcctatttgaggtgcatttttgatctgcttacaactgtgggcagctgtgactcagtcccactgatcaaactttgagaattggtgtatagtacctgcccggnnnnnnnnnnnnnnnnnnnnnnnnnnnnnnnnnnnnnnnnnntggtgtatacttctctcctttcccctagttgtttaatacggatgataaatcgaataataatatttgttcactacaaattatataaataacatttatgacaaatctgagtacaaatattatatatttgtattgacnnnnnnnnn

SEQ ID NO: 12822 - DNA, 2242 bp, Homo sapiens
  misc_feature 2084, 2085, 2086, 2087, 2088, 2089, 2090, 2091, 2092, 2093,2094, 2095, 2096, 2097, 2098, 2099, 2100, 2101, 2102, 2103,2104, 2105, 2106, 2107, 2108, 2109, 2110, 2111, 2112, 2113,2114, 2115, 2116, 2117, 2118, 2119, 2120, 2121, 2122: n = A,T,C or G
  misc_feature 2123, 2124, 2125, 2126, 2127, 2128, 2129, 2130, 2131, 2132,2133, 2134, 2135, 2136, 2137, 2138, 2139, 2140, 2141, 2142,2143, 2144, 2145, 2146, 2147, 2148, 2149, 2150, 2151, 2152,2153, 2154, 2155, 2156, 2157, 2158, 2159, 2160, 2161: n = A,T,C or G
  misc_feature 2162, 2163, 2164, 2165, 2166, 2167, 2168, 2169, 2170, 2171,2172, 2173, 2227, 2228, 2229, 2230, 2231, 2232, 2233, 2234,2235, 2236, 2237, 2238, 2239, 2240, 2241, 2242: n = A,T,C or G
cgcgaatgtagatcatggaaggacctgaaaagtactgtttctcgctatcttagctttagctaagtaaccttcaaggcgcgagaaagacataggactccgattccttgcctctgaagaatgaatcctctttcaaagtttcagctaaccatgagatggcgctgtgaccaaagacgaaaggtggagaaagacaaggcgtgcacgcttcgctcctagtctttggcctggcgcgtgccgcgtattgcgcagccgcagggaagctggatggggaggggtttgggaggcgaaccggaattgagggggtggttccgcggtgcgcgcgcctcgacatccgggcaacgcctctgttctgtcctcccccttcgtcgcctgtgacaaccggaagcggaagtgaaaatgggtgtccctgctgcctcttagcaacaagaggggtcaagtgacacaaccagctgactcccgtagaggaagacactgtggaggccagttctggagctattgcagcctcggttgcccggccggggacccgagccgaaaagttatcgtcagaatgtcgggcaaagaccgaattgaaatctttccctcgcgaatggcacagaccatcatgaaggctcgtttaaagggagcacagacaggtcgaaacctcctgaagaaaaaatctgatgccttaactcttcgatttcgacagatcctaaagaagataatagagactaaaatgttgatgggcgaagtgatgagagaagctgccttttcactagctgaagccaagttcacagcaggtgacttcagcactacagttatccaaaatgtcaataaagcgcaagtgaagattcgagcgaagaaagataatgtagcaggtgttactttgccagtatttgaacattaccatgaaggaactgacagttatgaactgactggtttagccagaggtggggaacagttggctaaattaaagaggaattatgccaaagcagtggaactactggtggaactagcttctctgcagacttcttttgttactttggatgaagctattaagataaccaacaggcgtgtaaatgccattgaacatgtcatcattccccggattgaacgtactcttgcttatatcatcacagagctggatgagagagagcgagaagagttctataggttaaagaaaatacaagagaagaaaaagattctaaaggaaaaatctgagaaggacttggagcaaaggagagcagctggagaggtgttggagcctgctaatcttctggctgaagagaaggacgaggatcttctatttgaataatctttcctgttctggttctttgagaaaccctaacactggcttcattttaattcacagtgtgtaggtttgatttgtgtggctatttattttttggcctaagaatttcactggttgtaaaatttacctagatgtctatttatgggattacttttgcagaatcataatttagcaaccatttatcatggatgaaagagatctgtaaaacctgcccaggaacttacagaatttactttgcagaagcgttatcatactccatttacatctgtgttacacgtgatctgcttaccaagcatattaggaaatacctcttaggaagcattagcggtctcaggccaattactgtggagcagctttcattcctacccacttgcaaaccttggcgctgttgtctgagattgctgcagccattcttgttaccatggtacttctcaaactttgtgaaaacctgcacttttccttgcatgacaggttcctgtcttgtctgtcatgggagccattctgccaatttaaatgcgactgtggtataaacagtaaaatgatttaaaagtaagtcattccgtttttattaatttactgttaagtcatgttctcatgctcagatcagtagtgtcagccagagctttctctgcagacatgtaggaagtgggtagctatttttcccactccatgtattagagttttacaaaaaggcttacttttgagacaactgttgcattttggggtactaataaatgattgccgatgagttatgagggcattataatacttccttatttgctaattaagaaaataactnnnnnnnnnnnnnnnnnnnnnnnnnnnnnnnnnnnnnnnnnnnnnnnnnnnnnnnnnnnnnnnnnnnnnnnnnnnnnnnnnnnnnnnnnnggggggggggcggggaaacaaaccaaaaaaaaaaaccccccacccccccccaannnnnnnnnnnnnnnn

SEQ ID NO: 12823 - DNA, 488 bp, Homo sapiens
  misc_feature 487, 488: n = A,T,C or G
caccgcggtggcggccgaggtacgcgggggaagagcggaaatgtcaaacgtggaggtgagcagtctgtgggcggaggggcttcagggaaagcttgggccggaccctttgggtttagggctttgctgggcgggcctagtctccgctgcgagtaggcccagcgccgtcggttcaagaggtaggaccacaggccaggaatactcctttactgttaaaaaagccagggaaagaaaggatttcctcaatagatatttattttacacctgtcttataccaggcatgcacgggaaaaggtattatccaaaacaattccgtgaggcaaatagtggtagttccattttgtagatgtaaaaacggaggaagttaaatgatgggttcaagggcacacggctagtaggtggtaaaattaatactgcatccaggtcttctgactacggactgggtggtttccctccaacacagcaggaatagaatcaccgcctaacacann

SEQ ID NO: 12824 - DNA, 727 bp, Homo sapiens
  misc_feature 722, 723, 724, 725, 726, 727: n = A,T,C or G
tttgaaaaatcttccaaacaaaatacgcaagtgaccagtaagtgcatgaaaagatgctcaaggtcattaatcaccagtgacttagtcaccaatgactaatgcatcagtcacttgaaatgcacatcagaacccctgagagctgccaggccacacccagtgggatgactgtaatcagaaagacgggcggcgccagtgaggatgcagggagactggagcctcgtacacatcgccaggggaacaaaaacagtgcagctgctgtgcggaaatgggaaggcagttcctgaaagtgggacgtagagctaccatgtgacccagcatttccaccctgaggggacactcagaagacagggcagatccccagtgacatctctttcccgttggggtttgcttttgtcacagtctccaatagaggtcatcattcctggtgccagaccagctacgatattaccatgcgtgtagcgttttacgtgagttacggagtacctgtgtgttttgtttggtttttccatagctctttgaagtcatagaacagtattattatttgtctccgttttcagatgaggaaaacgagaccttgagagacttttgtttgaggtcatgcacgtagggaatgataaaagtcatagacctgcttagagcagctcacaggcagttataaaacagggtttgatattttaaaattgtatttttacattattttaagtgtttctatatggacacannnnnn

SEQ ID NO: 12825 - DNA, 1071 bp, Homo sapiens
  misc_feature 1070, 1071: n = A,T,C or G
ggggtaggatgggaagccgtggggcaagggaggttgcaggaagcccatccttcccctcctgcggcatgtacctgcccgggcggtcgcccgggcaggtacgcggggagaggaattcagagttaaaccttgagtgcctgcgtccgtgagaattcagcatggaatgtctctactatttcctgggatttctgctcctggctgcaagattgccacttgatgccgccaaacgatttcatgatgtgctgggcaatgaaagaccttctgcttacatgagggagcacaatcaattaaatggctggtcttctgatgaaaatgactggaatgaaaaactctacccagtgtggaagcggggagacatgaggtggaaaaactcctggaagggaggccgtgtgcaggcggtcctgaccagtgactcaccagccctcgtgggctcaaatataacatttgcggtgaacctgatattccctagatgccaaaaggaagatgccaatggcaacatagtctatgagaagaactgcagaaatgaggctggtttatctgctgatccatatgtttacaactggacagcatggtcagaggacagtgatggggaaaatggcaccggccaaagccatcataacgtcttccctgatgggaaaccttttcctcaccaccccggatggagaagatggaatttcatctacgtcttccacacacttggtcagtatgtccagaaattgggacgatgttcagtgagagtttctgtgaacacagccaatgtgacacttgggctcaactcatgggaagtgactgtcttacagaagaaccattggacggggcattatggttccgatcgcacaaagtgaaagatgtgtcggtggtaaccgatcgatcctggtgtttgtgactttggttccacgaagaacgatcaaaattcatccgacgaaacttctcaagatccccatatgttgaagccggtcagatccagccctctcatatttcctaatcaaagggcgggaaacggcgtgatcaccaggacaacagtgcagagagtacacggagaacacccttccacccacaaccctctactatann

SEQ ID NO: 12826 - DNA, 1452 bp, Homo sapiens
ccacgcgtccgcagaggtcccggtctgagagtgatgtgagcagtgttgaacaggacagcttcatcgagccctataccaccctggttgttggatataaagtacctgtcaccattgttgctggcttatgaagatatgatgaaagagaaggacgagctcaatgccaccctcaaggaggaaatgagaatgtttaggatgcgagcccaagaagtggtgaaagaaaatgaagaattgcaccaagagttaaataagagtagtgctgttaccagtgaggaatggcgtcagcttcagactcaagcaaaactggttttagaggaaaacaagttgttgctggagcagttggagattcagcaaaggaaagccaaggacagccaccaggagcgcctccaagaagtttctaagctgactaaacaactaatgctcctggaggcaaaaacccacggccaggaaaaggagctggcggagaacagggaacagctggagattttacgtgccaaatgccaagaactcaaaacacactcggatggcaaaatcgcagtggaagttcataaatcaattgtgaatgaattaaaaagccaattacagaaggaagaagagaaagaaagggctgagatggaggagttgatggagaagctgacagtcctgcaagcgcagaagaagagcctgctgttagagaagaacagtttgacagagcaaaacaaagcactggaagccgaacttgaacgagcacagaaaatcaataggaaatctcaaaagaaaattgaggtcctcaaaaagcaggtggaaaaagccatggggaacgaaatgtctgctcatcagtacctggcaaaccttgttggcctggcagaaaatataacccaggaacgtgacagtcttatgtgtttggcaaaatgtttagaaagtgagaaggatggagtgcttaataaagtcataaaaagcaacattcgcctgggaaagttagaggaaaaagtcaagggctacaagaagcaggcagcactgaagctgggggacatcagtcaccgtctgctggagcagcaggaggacttcgccggcaagacagcccagtaccggcaggagatgcggcacctgcaccaggtgctgaaggacaagccaggaggtgctggaccaggcgctgcagcagaacagagaaatggaaggtgaacttgaagttatttgggaatctaccttcagggaaaaccgaagaatccgagaacttctccaggacacactccacgaggacaggcgtgcaggacaaccccagagctctggtggcccccagcctcaatggcgtctctcaggcagacctgctggacggctgcgatgtctgctcctctggcctgaaaggtctgcctcacacaggccttccctgcagggcagcccatggtggcagccggaggtgcgtaagcccactgaacgctgcagggcagggaagaaataaatggtctcatagtttaa

SEQ ID NO: 12827 - DNA, 605 bp, Homo sapiens
attaattaacgcgggggctgattttagccgtgtctcatctacctgctgtctcccagtgttcttccagctccctgcccctcatcaacccactctcctcagacctcagctggggcttgaacctgataattggtgtagtcatcaggatgaggtgagtgggtcttcagcccctgatgtcttcagctgtacccttcatcacgaatttgatggactgcttgacaatggaactggaagagtaccactttgtggtggacttagctaatgcagtcttctccattgacattgctccagagagccaggagaagtttgtcttcacgtgggaaggatgacaatggactttcaccatgctgccacagggctgtgtgcatagccccaccatttgtcctggtcttgttgccatggatttagctgcctggaaatgcccaaaaggggtctgcctgtttcattacattgatgatatgttaacctctgatcctctcacagatttagaagtggtggtgcccctcttgtgacagcatttggcagtgtgcagttgggccatcaataaatccaaggtccaagggccggaaaaaaaaaaatggaaaaaaaaaaaaaaaaaaaaaaaaagt

SEQ ID NO: 12828 - DNA, 1033 bp, Homo sapiens
  misc_feature 1033: n = A,T,C or G
gcacgaggcaaagactggatgcatttcctgagaacaaccatcactgtaaagcactttacaaatccaaagacaacccccggcaaaaactcaaaatgaaactccctctcgcagagcacaattccaattcgctctaaaaacattacaagttagttcatgtcatgccagatagctgaaggcagctcacaagttcttaaggccaggaatgccatgtgtctgctatgcacagctggccctggccctgagcctgaatgacagcaaaggtgacgcagatgtgggtgccctgctcctgcccagcagcagtgcttggtggaggctgaggccctgcacaggcaccctcactgctgaccttgagcctctctctcctctagagtggaaaagacaaggatgccgtggataaattgctcaaggacctggacgccaatggagatgcccaggtggacttcagtgagttcatcgtgttcgtggctgcaatcacgtctgcctgtcacaagtactttgagaaggcaggactcaaatgatgccctggagatgtcacagattcctggcagagccatggtcccaggcttcccaaaagtgtttgttggcaattattcccctaggctgagcctgctcatgtacctctgattaataaatgcttatgaaactgaccacacctcagagaaactggttatttccttaaaacctcagtgtcctctccccacaaaacagaattcactaattaaacttgtcatttcattactcattgcctgcctgcagtggtgagacagatgaagaagacaaggcagtcgataaaaatccatttgttggccatcttctgagtgcccactgagacacagtcccacctttggccgtgtgaatgccaccatgtcctggacccaagggaggctcgggtacacacatccatgtatttattcatctacttcgtaattcatttagtcggtcacgtagccactcattgaacctgggcccctccatctctccaacagcatgttttcttcaagtaacatactgtttggagagtctccgtcgaacn

SEQ ID NO: 12829 - DNA, 1163 bp, Homo sapiens
  misc_feature 1162, 1163: n = A,T,C or G
actgtggcatggcgcagtgggtgacagatggccacatagcggtcaaaagccatggccagcagcactgtggattccatgccagataaggagtggatggcaaacatctgtagcagacaagcatcaaactggatggtagtggaattgaaccagaagatggccagcattgtgggcatggatgaggggttacttcctggagacttcaggtgtggtagccggcgccgcgcccatagccggacggggatctgagctggcaggatgaatgtgggggtggcacacagcgaagtaaaccccaacacccgagtgatgaatagccgaggcatctggctggcctacatcatcttggtaggattgctgcatatggttctactcagcatccccttcttcagcattcctgttgtctggaccctgaccaacgtcatccataacctggctacgtatgtcttccttcatacggtgaaagggacaccctttgagactcctgaccaaggaaaggctcggctactgacacactgggagcaaatggactatgggctccagtttacctcttcccgcaagttcctcagcatctctcctattgtgctctatctcctggccagcttctataccaagtatgatgctgcgcacttcctcatcaacacagcctcattgctaagtgtactgctgccgaagttgccccagttccatggggttcgtgtctttggcatcaacaaatactgagggatgggttttgggacagctccatgggcatggggaaggcactgaaacagaggactataaaacatccttctcttattctccaaaatgtcttctacacaaaaaaaaaaaaacatttaaaaaaaaaaaactgtgttgtgggggggcgcgggcgcagaaagttttcaaccaccttggtgggcgcgggccgccgaggtgtaataagcaggtcaagcggcgcccagagcaccgtgccagcagggtggtggttccacaaaaaaaccgggcgacgggggtttgacaccaaggggtctgggctccggtcacacggccccgcgatccccccggcggcggcgcctgggaaagagcgagaggagcagagaagagaatgagcgagaagcgaacagcaacgatagcagcgaggccgagtagacgacgagagcacgaacgacacgaaccaactacgtcnn

SEQ ID NO: 12830 - DNA, 1390 bp, Homo sapiens
  misc_feature 1, 2, 28, 29, 1381, 1382, 1383, 1384, 1385, 1386, 1387, 1388,1389, 1390: n = A,T,C or G
nncgcaaccccaataccccccatcgacnncccattgtagggaaccccgccagagtgtccccacgcgggggagcccgggacttccactcgtgcgtgaggcgagaggagccggagacgagaccagaggccgaactcgggttctgacaagatggccgggctgccccgcaggatcatcaaggaaacccagcgtttgctggcagaaccagttcctggcatcaaagccgaaccagatgagagcaacgcccgttattttcatgtggtcattgctggccctcaggattccccctttgagggagggacttttaaacttgaactattccttccagaagaatacccaatggcagcccctaaagtacgtttcatgaccaaaatttatcatcctaatgtagacaagttgggaagaatatgtttagatattttgaaagataagtggtccccagcactgcagatccgcacagttctgctatcgatccaggccttgttaagtgctcccaatccagatgatccattagcaaatgatgtagcggagcagtggaagaccaacgaagcccaagccatagaaacagctagagcatggactaggctatatgccatgaataatatttaaattgatacgatcatcaagtgtgcatcacttctcctgttctgccaagacttcctcctctttgtttgcatttaatggacacagtcttagaaacattacagaataaaaaagcccagacatcttcagtcctttggtgattaaatgcacattagcaaatctatgtcttgtcctgattcactgtcataaagcatgagcagaggctagaagtatcatctggattgttgtgaaacgtttaaaagcagtggcccctccctgcttttattcatttcccccatcctggtttaagtataaagcactgtgaatgaaggtagttgtcaggttagctgcaggggtgtgggtgtttttattttattttattttattttatttttgaggggggaggtagtttaattttatgggctcctttcccccttttttggtgatctaattgcattggttaaaagcagctaaccaggtctttagaatatgctctagccaagtctaactttatttagacgctgtagatggacaagcttgattgttggaaccaaaatgggaacattaaacaaacatcacagccctcactaataacattgctgtcaagtgtagattccccccttcaaaaaaagcttgtgaccattttgtatggcttgtctggaaacttctgtaaatcttatgttttagtaaaatattttttgttattctactttgcctttgtacagtatgtttaacgccacagcacactctacacacaggcaaaccctattgggggtcttattccccgcccccaggggccggnnnnnnnnnn

SEQ ID NO: 12831 - DNA, 2849 bp, Homo sapiens
  misc_feature 1, 2, 3, 4, 5, 6, 7, 8, 9, 10, 11, 2845, 2846, 2847, 2848,2849: n = A,T,C or G
nnnnnnnnnnnaaaaggatattaaaacctgggtattttaaactcagccttaaccagataaacctgctccagcatttgtccagtgttgaaataaataggaagaaaaatacaatttccttaaacatgccagcttagtagtaggaatgacctatcaatcaatcaatcaatcaatcattcagcaagaagttagttgttggttccccatggccccaaggtctacagggctggattgtccacttttcctcctcaccaccagcactgcctgctgctactgagaaaggcacagtggactcatgtgtgtgtcatgactttaatggttagctacagtatgcatacacatacaagaagtaggggagctgaagcccaggaaaaggctacaaaatacaacacagggaccaatacatttgcaaaacattcaaaatccttataaaaggggctgtattggtcctttcaactttgtcattattcagcttagcctgtatggccattcattcagtggggtaatgggggagaacaattaattaatgagatttggttccctttcctatattcccactgtttttaagtttcaggagaggattgtgggggtgagggtagggggtgggctttaggcctggtctggtttccctttatataaagagctgacccccatctcaggcggctgaggtgtataatccccaaaagaaataagatggtacaaatgcagtcagctttggaatacgtttgggtagagacaaaatggaaactcatgggattccaatagtgagcccttcccatgttcctggacatatccaattctagcacatccacatttttaataacttagtgattttcaaggtcccctgtccacattaaaaaaataagttacataatattcaaactggctttttgctattctttgggacaccaggaatgtcagaagacatggagctatgccctcagacaagtgcatggcatcagctgcctcttcattacaaggtaccagtttatgtacttgccttggacacagcttgcacaaagccaagaagttccagacaaaggttttctctttcatgtatttacacaagttcaaaatgatattcacagcatcttctaaattttggccaagagtcaaaaaaatgcatttaaactttggaacgtgcccacataagacaggaggctgatcccaacagtagttggggcagatacccacaaaccaaagggctgggaaagtcaggaagagctgaaaggattcttcagtcagtttatgaactcggtgcagtgagacctctagactgacacgtacaacagagatgcagtttcgtctaactggcacctgtcccttccattacttgctgggcctgcttctgtcccatgcagcactgtgcgaccgactggaataacttttcgatttctggggcacagtgtacaaattcatggttccagaacttaaacgctgggtttttaatcagctcaatgaaggtaataagaagaccccaaggatgtggcctatttacaatcaaccgttccaagagaactcttgtgatctgttcttggatggcttccgtattggcctctgcaaaaaggtacagcatggtgcaactgaagtagtgagtgtggctatttgggtaccggagctgatttgcaattgcattcaaaaagagatagcgaccctcagtgtccaagtccacagccaaattctggaagatatccatgtgtgctgagtgagtgatggtgctcattgaaggtgtgctgcccttgttgtggatgtgcgcaatggcctgagtcccgacatagagcaccagtgcattgatgagctggaggttgtagcgattcccaggttcattggatacctgtaggttgctgcgcagatcagacaggaaagtgactggtgatcgagttttaagataggaatccaaatcctttttgaactgaggtggcattactccagtgaaattggtgagaatccggggagcaatgttaatttcactcaacatgtccacctttagattaggagtgaatgggtcggggagcctcatgtttcttggaaaggcactcaggatcaaatttcttaactggatacaattaggtgggatcacatcacagaacccataatggtaatcacaaaggaactctgggaaatcatgcaaaagaaccagcagcactcttaaagtgcccttgtagaggatttgcataggtttggtgagttccacatttctaaggaaaggcgctaaatatttgaataaatcaatcagtagctgtgcatacataggccaccccttctgctgtggcgtatgtgccagcattcttgcaataaatatccgatgggaaatcagttcaagccaggcatatacaaagccaggagctttggtaggcctcaagatgtggaatgtattgcagaaagctgtaagtgtctggaaattaatggtttccaacacatgctcaggtgcattgagttccaagagaagcatgataaaaattcgatggtagggaagttgctgaaattcactctgacgaacatcatgatcctgaaggagaactcccactactataccaaggaccttgttcagcagattaatctttgtgacagtgttggtggcctcccctgagtgtttcacgagcagtgcaatgagtcgaacaaaggcatccaggttgtgataacacttggctcggatcatgtgggattggcagcaggattgtgctgctgctcagcctgagcacggtaactgatttcaacacacatttcagtacacagacgaaagaaccttgttatgagatcatcggtcttcagcattccttgctggtgcatctttctttcctaaagctctacctgtccaacaaatgcagagaaagctttgtacgtctcnnnnn

SEQ ID NO: 12832 - DNA, 916 bp, Homo sapiens
  misc_feature 899, 910, 911, 912, 913, 914, 915, 916: n = A,T,C or G
gaggctgatcagcggtttaaactgaagccagatggtgcagccacagttcgtttgatctccagcttggtcccctggccaaaagtgggaggccagtgtgtaccttgcatgcagtaataaaccccaacatcctcagcctccaccctgctgattttcagtgtgaaatcagtgcctgacccactgccgctgaatctgtctgggaccccagagtcccggttagaaaccttataaattaggcgccttggagattggcctggcctctgctgaaaccaattcaagtaggtgtttccatcactatatacgaggctttgactagacctgcaggagatggaggccggctgtccaagggtgacgggcagggagagtggagactgagtcatcacaacatccccactggatcctgggacccagagcattagcagccccaggagctgagcagggagcctcattgtgagaaggtgaactgaggagtcctgatcccccgcgtacctcggccgccaccgcgcgcacaaaaatatacggcagtgtcccagtctttaggctcgtgatctccagatatgccgtgctgacagaggtgtccaaggagaagacaaaccgtcctgtgaagccctgggcatacgttgggttcccagtgttggtgttgatccatcccatccactcaagcccttgtccaggggcctgtcgcacccaattcatgggataggcagtcgaaggtgtatccagaagaccttgcaggaaaccttcactgaggccccgggcttcctcaacgcagacccagattgcaccagctgcacctgggagtgggcacctgttgctgctgccaccaagaagaggagcctccaggtccagtccatggtgtggagctgtggtctaggggcttcttcttaggagggttgtgttgnggtactacgcnnnnnnn

SEQ ID NO: 12833 - DNA, 1360 bp, Homo sapiens
  misc_feature 1: n = A,T,C or G
nctggtcacacccagtgtgaacttgggtgtggtgttgctgttcgcgggggtgcccagtatggtgtataaagcatgcccgtgtaatggggtggaaaatacaatctttgtcgtggggtgatgtttctattggtccgctgccataatccatacctatgttcgggggtacaaattgtgtagatgttgttggcgcgctgcttttgtaccacgttgtgctgagaaagtttccacttgtgttagaatttcccctattgccattatggccgtgtaaaggggttggtaaacttcgtagcctgatatgataccctgtgttacatgtaagtgggtccgttcccagggaaggttcgttgtttacgcaagccaagtcaggttacgaggttctggtcccggtgaaggccagaagtgggatgtggtatccccttttgagttgaatgagagattttgaaatcggattatgtgaatatttgcgaagcactcgtggctattatgtttgtgggagtttagtaaactaccgttaaaatatatatatatataagacataatggagcctctcgggaggcgggtaacgttatagtatttgtcagaagttggggtctccgtgggcattgtgatccgtcccaggcagtggattaggaggccagaaggagatcccttccacggtgctaggctgagatggatcctctcagggcccaacagctggctgcggagctggaggtggagatgatggccgatatgtacaacagaatgaccagtgcctgccaccggaagtgtgtgcctcctcactacaaggaagcagagctctccaagggcgagtctgtgtgcctggaccgatgtgtctctaagtacctggacatccatgagcggatgggcaaaaagttgacagagttgtctatgcaggatgaagagctgatgaagagggtgcagcagagctctgggcctgcatgaggtccctgtcagtatacaccctggggtgtaccccaccccttcccactttaataaacgtgctccctgttgggtgtcatctgtgaagactgccaggcctaggctctctgtagagagtcttcaagatcccggagtggtagcgctgtctcctggtgaaggagtatttgtcacactggaatgtgactgtgtgtgtatgtatgtgtatatatatatatatatatatatataaacaagtttgttgacacctataacaaaaaaatataaaaccactacaacaaaaaaaacgcggcgcttcatttccggggcgcgaaacaaagggttttgaaagggccctcggtccaaggtgtatcggaacccccttttttgacaaaggtgaactgggcgggcccaatagaggggcgaaaatcgaaaacggtactta

SEQ ID NO: 12834 - DNA, 1442 bp, Homo sapiens
  misc_feature 1, 2, 3, 4, 1442: n = A,T,C or G
nnnnaggtgacactatagaagagctatgacgtcgcatgcacgcgtacgtaagctcgtccgggcaggcaggcggcgggatttccgctgagtgacccttacaagtccttcttgatcctgaactgggttaggtgccgctgttgctgctcgtgttgaatctagaaccgtagccagacatgggactggaggacgagcaaaagatgcttaccgaatccggagatcctgaggaggaggaagaggaagaggaggaattagtggatcccctaacaacagtgagagagcaatgcgagcagttggagaaatgtgtaaaggcccgggagcggctagagctctgtgatgagcgtgtatcctctcgatcacatacagaagaggattgcacggaggagctctttgacttcttgcatgcgagggaccattgcgtggcccacaaactctttaacaacttgaaataaatgtgtggacttaattcaccccagtcttcatcatctgggcatcagaatatttccttatggttttggatgtaccatttgtttcttatttgtgtaactgtaagttcacatgaacctcatgggtttggcttaggctggtagcttctatgtaattcgcaatgattccatctaaataaaagttctatgatctacaagaacaaacaacacaaacagaaaaactttgggcgcggctgggcctcggaaagcttttaaccattgttggggcggggccatttttgcattggcatcgggcccaggaacaccggcagcttgttggttccccaaaaaacccgggccgggttgaaaaccagagtggtcgggcacgtctaacagcgccggctacaccccctggcggggaaaaaacaccactcacaaacaccgtaaatgagcataaactgaacaaaaaaaagcaaaagagaaacaaacacacaaacagcaagagacacaacgacacgaaacgaaagaaacaacagcaaaagagaaagaaaaaacaagaaaaagagagaagatagagaggaagagagagaagacgagggagacgcggacagagagggaggggaggggaggcgtgaaagaaggggaacagggagacaggagaagaaggggcagggaagggaaggaagaaaggaagaggggagagagggaggacagagcgcggacgagacagaagggtaagaagaggggagaagcggaggagagggaggaacagaaaggggcaaagaggcacggagggcgagaaaggagaagagaaggcaggacaaggagcgcggccacggggcgacaagagcaggagccgaagaggcggagaacgagacgaagagaaggaggaggaagagagcgagggaggcgacaaaggagagggcgaggacgacgagaggaaggaagaagagagcagaaagaacaaaccaagaggaaggagtggagagacagacagaaggaagagagagccaagagacn

SEQ ID NO: 12835 - DNA, 550 bp, Homo sapiens
ctatacatctgcatttattatgagcagcaggtgggacacttccagcaacagtaaaaaaaagtaatttacaaaagcaggtttcagtgaagccatctggttgttacccttgggtgctcacacgtagatgccaacccagagcagcaggaagaggactccaaagcccatgaagagtgaggccactaaggagatgaggagctctttatagatatcacgagtgtacttggtagaggtgacctcgtaactgggcacagcagttaaggcaaagcgaaggggtggactgtggagtgcagagagcccagcccacggcaatctagcgtggtttctccctgagcttcccacatcactaatgctggtcctctggctgctcagtgaaaggatacacgaagaaccaggcggtgaagaacatgccaatggccaaaagcaccacggtcagatgggggaagacagctgggttcactgggctggtatatctgctcatggcctcgagctccattttgccccgcgaaggataatccgcctcgtgccgaattcttggcctcgagggccaaat

SEQ ID NO: 12836 - DNA, 529 bp, Homo sapiens
  misc_feature 1, 528, 529: n = A,T,C or G
naatctgacagctcctcacttagtggcaggcgaagtaccatggtcggaactccatactggatggcgccagaggtggttacacggaaagcttatggccctaaagtcgacatatggtctctgggtatcatggctattgagatggtagaaggagagcctccatacctcaatgaaaatcccttgagggccttgtacttttcatatcttttaccagttgttatctggagcaagagaacacctaaagtctgatttgcttctcgaaggatttaataactacaggtttctctccaatggctatatttcctattccgggacagcaaggacaaagataatttccaggagaccatggaagcaatgcacataatgggcttctcccatgaagaagattctgtcaatgcttaaagtagtatctttcagtgctacagtttggaaatatttctttcaaaaagggaagagaaatactgatcaaggcttccatgccagaaaaaacaagttgcgcagaagctctgtcatttttcttgggatgaatgnn

SEQ ID NO: 12837 - DNA, 398 bp, Homo sapiens
  misc_feature 398: n = A,T,C or G
acgcgggtgaataaaaagacatacttctcagctgcagatattatggagaattggggcacccacaggaatgaagagagaaagcagctccctaacttcaaaaccattttggtaccactctttggatgtgatagcattcctgctggcctgcgtggcaactatgatatttatgatcacaaaatgttgcctgttttgtttccgaaagcttgccaaaacaggaaagaagaagaaaagggattagttatatcaaaagcctgaagtggaatgaccaaaagatgggactcctcctttattccagcatggagggttttaaatggaggatttcctttttcctgcgacaaaacgtcttttcacaacttaccctgttaagtcaaaatttattttccaggaatttaatatgn

SEQ ID NO: 12838 - DNA, 895 bp, Homo sapiens
tttttttttttttttttttcgttgacgatgaggatatttattgagaagggctggatgacttgggatgggggcagagacccctcccctgggaacctgcagctccaggcccctgtgggtggggtgagggtcgggggcctaagagcattctgcaggggccactgtcttctccacggtgctcccttcatgcgtgacccggcagctgtagcttctgtgggacttccactgctcgggcgtcaggctcaggtagctgctggccgcatacttgttgttgctttgtttggagggtgtggtggtctccactcccgccttgacggggctgctatctgccttccaggccactgtcacggctcccgggtagaagtcacttatgagacacaccagtgtggccttgttggcttgaagctcctcagaggagggcgggaacagagtgaccgagggggcagccttgggctgacctaggacggtcagcttggtccctccgccgaataccagatggttaccactgctgtcccgggagttacagtaatagtcagcctcatcttccgcctgagccccagtgatggtcaaggaagctgtgtttcctgacctggagccagagaatcggtctgggatccctgagggccggttgttgttaccatagatgacaagtgcaggggcctgtcctggcttctgctggtaccagcttgcataataacttctgaggctgtctccttggcatgtgatcctgactgtctgtcccaagaccacagacacagcagggtcctgagtcagctcagaagaaaccacagaacctatgcaaagagtgaggagagtgagccagagaggggtccaggccatggtggagacaccccagaactctgcttctgagcccacagctccccgcgtacctgcccgg

SEQ ID NO: 12839 - DNA, 449 bp, Homo sapiens
gtggtcgcggccgaggtacccaaagtctcgcttctgccgaggtgtccctgatgccaagattcgcatttttgacctggggcggaaaaaggcaaaagtggatgagtttccgctttgtggccacatggtgtcagatgaatatgagcagctgtcctctgaagccctggaggctgcccgaatttgtgccaataagtacaggccatgcttgtcacagttggggatgtgcagggagtagaggtgctccagagggccccgctcatccggaaggcgcatggtggagatccgctccaggacctggtccagttcctgttggcagggagtcctggcagggggtggtcgcagcttcttgggctcctccaggccaaggtgatgcttgccgcccttgcccatctgccggtgctgctcagtgaccttctcccggaacacggccagctccttcataccccccgcgt

SEQ ID NO: 12840 - DNA, 2019 bp, Homo sapiens
  misc_feature 2005, 2006, 2007, 2008, 2009, 2010, 2011, 2012, 2013, 2014,2015, 2016, 2017, 2018, 2019: n = A,T,C or G
caagggtgtcgccccgcgtccgcactggacttgtaaacgaaaagcttcataagtccctctttgcttagtacttttctcgtcctttccccagggtgcacgtaaccctcaagcactaggaccgtgcggaatccaggctgcgatggcaccttcatttaccgcccgcattcagttgttcctcttgcgggcgctaggctttctcataggcttagtaggccgagcagctttagtcttagggggtccaaagtttgcctcaaagacccctcggccggtgactgaaccattgcttctgctttcggggatgcagctggccaagctgatccgacagagaaaggtgaaatgtatagatgttgttcaggcttatatcaacagaatcaaggacgtgaacccaatgatcaatggaattgtcaagtacaggtttgaggaagcgatgaaggaggctcatgctgtagatcaaaagcttgcagagaagcaggaagatgaagccaccctggaaaataaatggcccttccttggggttcctttgacagtcaaggaagctttccagctacaaggaatgcccaattcttctggactcatgaaccgtcgtgatgccattgccaaaacagatgccactgtggtggcattactgaagggagctggtgccattcctcttggcataaccaactgtagtgagttgtgtatgtggtatgaatccagtaacaagatctatggccgatcaaacaacccatatgatttacagcatattgtaggtggaagttctggtggtgagggctgcacactggcagctgcctgctcagttattggtgtgggctctgatattggtggtagcattcgaatgcctgctttcttcaatggtatatttggacacaagccttctccaggtgtggttcccaacaaaggtcagtttcccttggctgtgggagcccaggagttgtttctgtgcactggtcctatgtgccgctatgctgaagacctggcccccatgttgaaggtcatggcaggacctgggatcaaaaggttaaaactagacacaaaggtacatttaaaagacttaaaattttactggatggaacatgatggaggctcatttttaatgtccaaagtggaccaagatctcattatgactcagaaaaaggttgtggttcaccttgaaactattctaggagcctcagttcaacatgttaaactgaagaaaatgaagtactcttttcagttgtggatcgcaatgatgtcagcaaagggacatgatgggaaggaacctgtgaaatttgtagatttgcttggtgaccatgggaaacatgtcagtcctctgtgggagttgatcaaatggtgcctgggtctgtcagtgtacaccatcccttccattggactggctttgttggaagaaaagctcagatatagcaatgagaaataccaaaagtttaaggcagtggaagaaagcctgcgtaaagagctggtggatatgctaggtgatgatggtgtgttcttatatccctcacatcccacagtggcacctaagcatcatgtccctctaacacggcccttcaactttgcttacacaggtgtcttcagtgccctgggtttgcctgtgacccaatgcccactgggactgaatgccaaaggactccctttaggcatccaggttgtggctggaccctttaatgatcatctgaccctggctgtggcccagtacttggagaaaacttttgggggctgggtctgtccaggaaagttttaggaggaccttctgcaaggttaatgtgtgtgtgtgtttgtgttcgtgtggtggtgtttctattaattgggtgaaaccaagcaccagcagacaagcagagaaacaactggggaatttattgactcatttagttattctttctacttttatttccttctctaactgttggtcttactaaaatggtaatatttgcttcttgcttttatgttactggaaaattaggacatgtaaatggataagtgcaataaagtttcctaaatgcttgaaaannnnnnnnnnnnnnn

SEQ ID NO: 12841 - DNA, 720 bp, Homo sapiens
  misc_feature 1, 657, 700, 701, 702, 703, 704, 705, 706, 707, 708, 709,710, 711, 712, 713, 714, 715, 716, 717, 718, 719, 720: n = A,T,C or G
nagctgtttcctgtgtgaaaaagaacggccagtaacactgggccatcgttgtttcttgtgataaaaaaaaacacaattctccctgtcagcggccgtcccggcaggtaaaaaaaagaaaaatttcttttttctttttttggtcatcagctatcgtcagtgtattttatgtgtggcccaagacaattcttcttccagtgtggcccagggaaatcaaaagattgaacactcctgtgctacggggtgagaaaatccaggcacgacctagcagactccctaagttctggggagatcaagatggctagagttctcagggcagaatcctggtgaggaaacagatatatagagagaacttgtgacatctacagaggctgtctctcaagtttttcagcagaatactgacaatcacattcatgtgaggaatctttctgagactggagaaggaactgcttgaaaggagtgaaaggaacaatactcagagtgcacataagcctgtaaatactgccttcctctctaaccagattagagggtcacataattggtggggtattggttagagtactcagaatagtgttgcctcaatagtggagaacaattaactatagactaaatgctgctctggctgtggagaataaattttaaaagtaacagctaaaaggntcaaacatctatctagaaagtttaagaatatttataagaatannnnnnnnnnnnnnnnnnnnn

SEQ ID NO: 12842 - DNA, 216 bp, Homo sapiens
tccacctcggtggcggccgaggtacgcgggagagacaaaaacagaagaggggaaacatgtttcctactgacgacaggtgattacacgtgtgcttctgatggagggatcaggaaagataactgcaaagaggttgtcattactggttacacgcaagccgaggccagatctcttacttaatgacttggggaaggcacaaaacatgagagaaagtgttgt

SEQ ID NO: 12843 - DNA, 1677 bp, Homo sapiens
cgaaagtcttctagaattaattaacgcgggggatagtcaaccctctgtaaacactcaatgtgttctcaccttgttatcattcccaatgatgtcgaatgcgtggttgccctctccagtataaaagtttgatgcagcttttcctggatgtacctgtctataaggagtcctgcttatcacaatgaatgttctcctgggcagcgttgtgatctttgccaccttcgtgactttatgcaatgcatcatgctatttcatacctaatgagggagttccaggagattcaaccaggaaatgcatggatctcaaaggaaacaaacacccaataaactcggagtggcagactgacaactgtgagacatgcacttgctacgaaacagaaatttcatgttgcacccttgtttctacacctgtgggttatgacaaagacaactgccaaagaatcttcaagaaggaggactgcaagtatatcgtggtggagaagaaggacccaaaaaagacctgttctgtcagtgaatggataatctaatgtgcttctagtaggcacagggctcccaggccaggcctcattctcctctggcctctaatagtcaatgattgtgtagccatgcctatcagtaaaaagatttttgagcaaaacacttgaagaggaagccctgaacctttgacttccttctggggaccaatggccctatgacatctttgacaccgctttgtgtggcactgaccctcaaataagcgacacatgtaccgacgcgtccccgggagaacgcgtactaacctgtggcgagacccccccaaaaaaagcccgcgaaacaagttgcaacaccactgggttcagagcaccggatcacaagggaccacggccaaacaacagaacgacggacaccacagacgcggacagcacaccacacagcacacaagtcagggcgccgcggagcttccagagcccgcgaaggcgattcgaggacgcaagcgtcacggcgcacccgccgggcgctggacgagtgggcgtggggaggaggtacggcgctgagcgaccggccacaggcggcgcccccgcgtacgatcacggagccgcgcgccagagcgtcggagaaccatgcgcgccggaccgcaactgcgagaccgcagaggacagggagcgtgagcggggtgaatacagagggtgggcgcagcgaggcggcggtggggcggggccgagcagcgcgacagcgtaggggcagggcgggcggcaggaggaggcgcggcggcggaggggggagggcgcggcccgggcggagcagcgaagcgctgactcggcgccagcagcacggacgcggcagcctcgcgcgcagcgagggcggcgggagggggacggcgggtgagagaggcgagcgcagggttgccgcggacactctagggcccgtcaaggcgcgagaccgactacgccgaggcggagccgcggattgggcgaaggaggccgcgccgaagacggacggcagtagtagagaggtgcaacgtgagatgagccgcagcgccgcagtgagcgctgaaggtccgggtcgtgcttccgcagcgctggaaagaagatgcacagagcgagcagcaacgccaccagccggaagagtagcggtagaacaaagcagagagcaaacgaaagaggaggcacaccaaaagcgaggatggacataaggctcatac

SEQ ID NO: 12844 - DNA, 678 bp, Homo sapiens
  misc_feature 102, 103, 104, 105, 106, 107, 108, 109, 110, 111, 112, 113,114, 115, 116, 117, 118, 119, 120, 121, 122, 123, 124, 125,126, 127, 128, 129, 130, 131, 132, 133, 134, 135, 136, 137,138, 139, 140, 141, 142, 143, 144, 145, 146, 147, 148: n = A,T,C or G
  misc_feature 149, 150, 151, 152, 153, 154, 155, 156, 157, 158, 159, 160,161, 162, 163, 164, 165, 166, 167, 168, 169, 170, 171, 172,173, 174, 175, 176, 177, 178, 179, 180, 181, 182, 183, 184,185, 186, 187, 188, 189, 190, 191, 192, 193, 194, 195: n = A,T,C or G
  misc_feature 196, 197, 198, 199, 200, 201, 202, 203, 204, 205, 206, 207,208, 209, 210, 211, 212, 213, 214, 215, 216, 217, 274, 275,276, 277, 278, 279, 280, 281, 282, 283, 284, 285, 286, 287,288, 289, 290, 291, 292, 293, 294, 295, 296, 297, 298: n = A,T,C or G
  misc_feature 299, 300, 301, 302, 303, 304, 305, 306, 307, 308, 309, 310,311, 312, 313, 314, 315, 316, 317, 318, 319, 320, 321, 322,323, 324, 325, 326, 327, 328, 329, 330, 331, 332, 333, 334,335, 336, 337, 338, 339, 340, 341, 342, 343, 344, 345: n = A,T,C or G
  misc_feature 346, 347, 348, 349, 350, 351, 352, 353, 354, 355, 356, 357,358, 359, 360, 361, 362, 363, 364, 365, 366: n = A,T,C or G
acgcgggggaggaactgctcagttaggacccagagggaaccatggaagccccagctcagcttctcttcctcctgctactctggctcccagataccaccggannnnnnnnnnnnnnnnnnnnnnnnnnnnnnnnnnnnnnnnnnnnnnnnnnnnnnnnnnnnnnnnnnnnnnnnnnnnnnnnnnnnnnnnnnnnnnnnnnnnnnnnnnnnnnnnnnnnacctggccaggctcccagtctcctcatctatgatgcatccgacagggccactggcannnnnnnnnnnnnnnnnnnnnnnnnnnnnnnnnnnnnnnnnnnnnnnnnnnnnnnnnnnnnnnnnnnnnnnnnnnnnnnnnnnnnnnnnnnnnagcaacgtggcaactggcctccggaccttcggccaagggacacgactggagatcaaacgaactgtggctgcaccatctgtcttcatcttcccgccatctgatgagcagttgaaatctggaactgcctctgttgtgtgcctgctgaataacttctatcccagagaggccaaagtacagtggaaggtggataacgccctccaatcgggtaactcccaggagagtgtcacagagcaggacagcaaggacagcacctacagcctcagcagcaccctgacgctgagcaaagcagactacgagaaacacaaagtctac

SEQ ID NO: 12845 - DNA, 412 bp, Homo sapiens
ctgggtgcttgtggtgcagcaggatcagcttgcccaggatgagcagcagccctgggtgtttggacatctcaaagtcattgcctggcacaaatgacaggcttcgaatggtattggacacacagacgcagcgcttggcaagagaatcctgccagtccagaagggtacaagaggagagtgaagaggaagaggtcgatgaaacaggtgtagaagttaaggacatagaattggtcatgtcacaagcaaatgtgtcgagagcaaaggcagtccgagccctgaagaacaacagtaatgatattgtaaatgcgattatggaattaacaatgtaaccatatggaagcaactttttttggtgtctcaaaggagtaactgcagcttggtttgaaatttgtacctgcccgggcggccgctcgaa

SEQ ID NO: 12846 - DNA, 985 bp, Homo sapiens
acgcggggtctcagaagcttggaccgcatcctagccgccgactcacacaaggcaggtgggtgaggaaatccagagttgccatggagaaaattccagtgtcagcattcttgctccttgtggccctctcctacactctggccagagataccacagtcaaacctggagccaaaaaggacacaaaggactctcgacccaaactgccccagaccctctccagaggttggggtgaccaactcatctggactcagacatatgaagaagctctatataaatccaagacaagcaacaaacccttgatgattattcatcacttggatgagtgcccacacagtcaagctttaaagaaagtgtttgctgaaaataaagaaatccagaaattggcagagcagtttgtcctcctcaatctggtttatgaaacaactgacaaacacctttctcctgatggccagtatgtccccaggattatgtttgttgacccatctctgacagttagagccgatatcactggaagatattcaaaccgtctctatgcttacgaacctgcagatacagctctgttgcttgacaacatgaagaaagctctcaagttgctgaagactgaattgtaaagaaaaaaaatctccaagcccttctgtctgtcaggccttgagacttgaaaccagaagaagtgtgagaagactggctagtgtggaagcatagtgaacacactgattaggttatggtttaatgttacaacaactattttttaagaaaaacaagttttagaaatttggtttcaagtgtaccagagaggatcagagtgagagggaaggggcacttggaagaaaccaggttaaaagaagggtcaaatagagggaggaaactagaacatatgccctgctgctgttgccttagtcagttctaggcctttcaactggcagcactttctgtgagtcggctttttgcgactgaaacacttctttcttcggggaccttgtgcttttgt

SEQ ID NO: 12847 - DNA, 1685 bp, Homo sapiens
  misc_feature 1, 2, 3, 4, 5, 6, 7, 1662, 1663, 1664, 1665, 1666, 1667,1668, 1669, 1670, 1671, 1672, 1673, 1674, 1675, 1676, 1677,1678, 1679, 1680, 1681, 1682, 1683, 1684, 1685: n = A,T,C or G
nnnnnnncctaacacctccggcagtgagccaggctttgagtggctgcgtctaaacacttctttccctgaggactggaagacattagaataagctccagacaattcaaacattgagattcctgggaactaccagatagtagcatcagttcaccaagaaatgaagctggtgaggcagtgaaaatccagggcctagaaagctgggaatgccatgacgtgggcacattgaaagacaagaggcaggcatgatcagccttgaactttaggaagatcccaggaagctgatggaagacaagatgtggagtgaatgtgaaggtccagaaatgtccttggtgtgtctgacagactttcaggcccatgcgcgagagcagctgtctaagtcaactcgggattttattgaaggtggagcagatgacagcatcacgcgggatgacaacattgcagcatttaaaagaattcgcctccgtccgcggtacctgagagatgtgtctgaggtggacaccagaaccacaatccaaggggaggagatcagtgcccctatttgtatcgcacccacagggttccactgccttgtctggcctgatggggaaatgagcacagcaagagctgcccaagcggctggtatctgctacatcaccagcacatttgccagctgtagccttgaagacattgtcattgcagctcccgaaggcctccgatggttccaactctatgtgcatccagacctgcagctgaacaaacagttgatccagagggtagaatccctaggtttcaaagctttggtaataactttggatacacctgtatgtggcaacaggcgacatgacattcgaaaccagttgaggaggaacttaacactaacagatcttcaatcacctaaaaagggaaatgcaataccttatttccagatgactcctatcagcacttctctctgctggaatgatctctcctggtttcagagcataactcgattgcccatcatcctgaaagggattttgacaaaagaggatgcagagttagctgtgaagcacaatgtccagggtatcattgtttccaaccatggtgggaggcagcttgatgaggttcttgcttcaattgatgctttgacagaagtggtggctgctgtaaaggggaaaattgaagtctacctggatggcggggtccgaactggcaatgatgtgctgaaggctctggcccttggagctaagtgcatttttcttgggagaccaatcctatggggccttgcctgcaagggtgaacatggtgttaaggaagttttgaacattttaacaaatgagttccacacttccatggcccttacaggctgccggtcggtcgctgagatcaatcgaaacttggtccagttttccaggctgtaagaaaaaagggccaataaccagactgctgaggttgcccacaggaggatcacaaactcacagcacagtgtgtgatgctgtccttcctggaccccattctgtccggaggctcatggcccatatttcccacatttctaataccaccacccctgtgcttcaggccctccaaacccctgtgttccccaaatgttccatgcccttctttgtatcactgactattatatgttgctctcttgcctaaatcttcctctgaagtaaaagatctcaaaaggacagatcattaatgacnnnnnnnnnnnnnnnnnnnnnnnn

SEQ ID NO: 12848 - DNA, 1171 bp, Homo sapiens
  misc_feature 1170, 1171: n = A,T,C or G
accctagggctttggttctttgtcgccgtccccgttggagttttttctttgcctttcagaagcccgtgcactctctttagagtgcagggctgacgggcggtccagccctggccaagtcatggagcgacatttagtttgagacggtgctgagataggatcatgaaggaagaggtgaagggaattcctgtaagagtggcgctgcgttgtcgccctctggtccccaaagagattagcgagggctgccagatgtgcctttccttcgtgcccggagagcctcaggtggtggttggtacagataaatccttcacctacgattttgtatttgatccctctactgaacaggaagaagtcttcaatacagcagtagcgccactcataaaaggtgtatttaaaggatataatgcaacggtcctggcctatgggcagactggctctggaaaaacctattcaatgggaggtgcatatactgcagagcaagagaatgaaccaacagttggggttattcctagggtaatacaactgctcttcaaagaaattgataaaaagagtgactttgaatttactctgaaagtgtcttacttagagatttacaatgaagaaatttggatcttctatgcccatctcgtgagaaagctcaaataaatatacgagaggatcctaaggaaggcataaagattgtgggactcactgagaagactgtcttggttgccttggatactgtttcctgtttggaacagggcacaaatctaggactgtgggctccacggctatgaactcccagtcgtccgatctcatgccatctttacattctccttagagcaaggaagaaagtgccagaatagcagttccgctccagctgcatctggtagactcgcgtggtccgacacgacggtgaaaccaggtgacagggaccgcaaacagggtgaaattaccccgagcctcccatgcaggggaaaccgtgccacggctcggccaagcaacaacgggggtctgagcccacaagaaatcacgatgctacacaggcacgaacctcagagagagcacaacactcgtgcgaaccagagaacccgggataaggcacgaagaacctggaaaacgcgacaggacattgatcgcggcacataactccaggacggcactcacaccatgcatagtatcaacagcagcgcnn

SEQ ID NO: 12849 - DNA, 4086 bp, Homo sapiens
aaagtctggcagaggacaggactcttacaggtgactggcttggaggggaacctaccagtccttcttccaacttgctgctgaaatcccagtgttcttgaagacagggttatgatcctcttcaccaggtctggcgggggtggggctcagaaggtggccaacccaccctctgagcccaaatattgttcccagaatgctcaccttgacctcaccctgtggctcgcctagacccagggttggctgtgcaaaatcatgcttagggaagggttgcagagaaacctttgcaccagtttcctgggtcttcatcccagccagtcaatgtcatcgtcatcatcatcatctccaaaaaggggcgttgggggcgggcgtcccttcatgctcacctcgtcttcatcctcctcctcaggctgtgctttgggcctcagagctttcagagttgcccctttaaacagttcatcctcttcatccccagagagactggaacgctgggaatgatggctgggtctgagggctgctcctgcaactgtggaacctgcctctgtgcttgacagctccttgtggggaccggtggagctagtgacatcatctttcttgagctgtggaggctgaggctctcctgggctttcaggccctaaggccagtgggtccccctcctcggggtctgaagtcagggacagtcttgtggagctttcttgtagtgggccatctggtgctacttccctgacacagacctttcctgatgggttgtcgggcttagctgccattgggctggcagcaagtgactcctcacactcagagtccatggatacagggcctaggggctcaggtggaattgaagtcgggggccctagaactctgtgggatgggatgcaagacagttcgggtggaagggaaccatcttttatctctgagagtgcctcagcttctgagtcccctttccttctgtgtccatcctgggaagtggtgagggcctgaggaggcaacgggacagcttcctcgaccacctgctctgagggcaccatgggggactctggcctctccctattcaggggtgcttgaggctgcccagaactggctgaggctgactgctcctgggaaggtcttcgtggccgctcttctgctttttcttcttcttcttcactgctgctctcttccttctcttgctcctgttggtttaacagctgaagagtcaccatcttgatcgtattcatgatggttcccagaatggtcctgccattgtaagattcctccagctcaaactctctccgtaaggactggaacacctggttcatgatcttcttgaccttctctgaggggtcagatgcagcagcttcaaccccagacatctgggacttgttcttctctagttccttgatgtgctgttcattttgcttggtgagagctgtgatttgggcctggagggctaaacacttttcctgaagttgtaccagcttctgctggtaggcatctctctgtgcgcacacctcctggtactgctgcaggtgctcatccttggcggaggccaacaaatgttcacattttgcttcccactgggtctgtagctcagcctgtactaaagacagctgctctgcagctgcttggtctgtggacactcgagtctttttcaagagctgtcgaagtttgtccaattcctcctggtatgacttgcgaatttcatctatctcctcctcggcctgagaacgctcttgagctgacttctttttcctttctgagaggttcttttccaaggactccttctcaactcgaaggtcagtcagttcctcctccagggatgtcaccttgagttccagttgtttccggttctgcttttcacttttgaatttggactgtgcttgctcagaggtttcttggagctctgagagctttgcctgcactttggtgagctggcccctgagaagatctgtctccttcaggctttctgtcagctgcatctgcagctctgtttcctttttttggtgagcagtcattttcagctgcagatgagagacctgtgcagtggccgctgctaactcctctgtcaccttggccttctcttgttcagcatgcaatactcttgcctgtgtgttttctgtggctgtctgaagtgagttgttcctcttctccatcatcaggttactctgctcaacatacctctgatttcgttcaattagttcactaatcttgtcattctgttcttctatccgattgctcttttcaaggatctcttgcttcaatctttcattttcctgaatgattcgctggatgttgctcataatcatgcttgtttccattgtaactgacatgctaggaataagcatggaattgccagcactatgtttctgtaactcttcaaccttagtcatgagatgatccattttatcagccactttgctgactgccattcgaatttcagtgttatgttgccgggcttcagtcatgagaaatgaagccatatcacctgatccttggaaatggggaggctgagagagcggtgctgggtacaaaggccgaacgggctgcagctgggaggtgacggcagatgcctggggataagcgtaggcttgcatacctgcatagggctgagaaactgaaaggattgggcatttccagatacagctgagtgggaatcgagagatgacacttgcattaaggcagcagaaggtgcctggagcccagtaacagatggctgaggtgcctgtgaggtcatctgtggtaacgctggatgggccggctgaagagagggctggacggacggagtcaccacaggctgcccacctccttgcagagtgttcacatcttcgatttctgaatcattggaatccagctgtggtggaaggatgggcagcatgggctggcccattttagccatccgagagatcaacttggctttgactgcatcgggacttgtatttattgcaagttgttcactgagggagttagatttggtacgaagagctggctcccctgatttgaaaggtattgatgtgggtggtgacacaacaggatcagcagagaggttgtcagcaccagggatgggagacggagctgcagaatcgcgggaactaacactgtgaccatcagagccagaatctctggcaaacttcacccgcctaacctccacctcgaacaccaggatcgagtccgttgcttgagtccagcctattaccccttctgagccaacagcacaggctggagggacaataagcaatcgctttcctccttttttcatgcccagcattccatcctcccagcccttgatgacttttcctgatcctaacttcaagcgaagcaacttatctttgttagcagtggagtcgaaaacctggcccagcacatgattctgaaagagccagccggtataggccacttccaaagaatctccaacttctacagcagggccgtctgcccacaatgaggtcctgggagagcattgcatccagggaagaggtactgttgcacttagcaatgcacacctgcttattgaactccacagcagccttttccgactcaaacatgatggaccagttctgtctctggtcatcataaaaggtgctatagttattgggccgaaccattagctcaaagttcacatgaatcctagcaaccgtaactggctgttgttgactgatataaagaagaatcctatactctctggctgtgtggttccccagaactgcagcaccaaatttgccctgctttacatattgaccatttgtgtatcgatatgcatggactgctgttgcgaccagtattgtgggagtgctcatggtggctggtgctgtttttggtgttgcctgatttcctgttgctgccgttccctggcctttcttaggctgttttggggctgtgtactggaaaaattcatttccatggccagcagctgcctgatccagtccaaaaagtgaggccaatctggcactgttagtagaaaatgaaaaatgaaatttcactgatatatcccaaacctggaattattataaaagctggtcatctccaaccttgaacaaatacctccttgactacatcccaccattcaatactaggaacacttcaagctaggaaagctgatttaaaaattaaaaaaaaaaa

SEQ ID NO: 12850 - DNA, 378 bp, Homo sapiens
caccgcggtggcggccgaggtacttattttttttttttttttttttttttttttttaaggggctttagtcagggccttttgttttacaaggaaatggcaattacgactggttttgataaggatgctctgacagaatctttttcttcatgggactgcttttcatgatgcagcaccttgcagtatttctctttctttgaaatcactggtattgccctttattaaaatccacttgccttattcttatttaggaattactatgttaccaaagtttcaaaatcttccagactgaaagagccatgaatgaactttttgtctgactccaaatgcaccaatttctttattctccttctacactggcctcgttgttggcagcccaaa

SEQ ID NO: 12851 - DNA, 1296 bp, Homo sapiens
  misc_feature 1289, 1290, 1291, 1292, 1293, 1294, 1295, 1296: n = A,T,C or G
accaggccaacgggctcggtttctatggttttctggggagacggctgagggaaggtcggcttccggcgtcgcgctgcaaacgtctcgctgaggtcatcgcttggacggcaggcgtccgcgtcgctagctagtcgttctgaagcggcggccagagaagagtcaagggcacgagcatcggccatgcctttcttggacatccagaaaaggttcggccttaacatagatcgatggttgacaatccagagtggtgaacagccctacaagatggctggtcgatgccatgcttttgaaaaagaatggatagaatgtgcacatggaatcggttatactcgggcagagaaagagtgcaagatagaatatgatgatttcgtagagtgtttgcttcggcagaaaacgatgagacgtgcaggtaccatcaggaagcagcgggataagctgataaaggaaggaaagtacacccctccacctcaccacattggcaagggggagcctcggccctgaacagagcagctgctgatgtctggaggctgattttcctgttctctgttctccactggaaaggttgtttacgacaaacctccttgtcaaagtgtgtaaaaataaaggattgctccatcctaaaaaaaaaaaaaaaaaaacacaaaaacaaaacaaactgcaggagaccacaacacaggaacacgcgcccacagtgtgaagaacagaagagagccggtttacaacggcggaagggccagggcgcacaagagagaaccgggacccacaggtgtgctcccaggcgggacccactcacaaagaggatgagacgccccaacacgagagagggcgaaaaaactccggaaagacaccgggtgtgccggacatagaaacagcgcacgcaacaacacaaacgacacaagcacgcacacaaacagaggcgacgccacacagcgccgggaaccaaccacgacgaaccacccacaaaaacagcacggggggagagagaaacacgaacccccgaacgagaacgcagcaaaccgcaacaccaccacagacgcaacgagacagcagagtagcacaacgagagccagaacacgacgaaggcgacgcgagaaggcgggaagagaagaaaagagagacacacacgcagccggacgcgagagatggagacagacagaaggaccgacagacgccgagaggcggagacacaaccacatggcgccacacgacgaggctccgacagaacgaggagaagtgaagagcaagaaaccacaagagaagcagcgaaaggaacaccgaacggagcggannnnnnnn

SEQ ID NO: 12852 - DNA, 914 bp, Homo sapiens
tatagggagtcgacccacgcgtccgcagagttcacagcatatattggtggattcttgtccatagtgcatctgctttaagaattaacgaaagcagtgtcaagacagtaaggattcaaaccatttgccaaaaatgagtctaagtgcatttactctcttcctggcattgattggtggtaccagtggccagtactatgattatgattttcccctatcaatttatgggcaatcatcaccaaactgtgcaccagaatgtaactgccctgaaagctacccaagtgccatgtactgtgatgagctgaaattgaaaagtgtaccaatggtgcctcctggaatcaagtatctttaccttaggaataaccagattgaccatattgatgaaaaggcctttgagaatgtaactgatctgcagtggctcattctagatcacaaccttctagaaaactccaagataaaagggagagttttctctaaattgaaacaactgaagaagctgcatataaaccacaacaacctgacagagtctgtgggcccacttcccaaatctctggaggatctgcagcttactcataacaagatcacaaagctgggctcttttgaaggattggtaaacctgaccttcatccatctccagcacaatcggctgaaagaggatgctgtttcagctgcttttaaaggtcttaaatcactcgaatacttgacttgagcttcaatcagagaaaggcagagttggcttctggtttccctggttttcttttaaatctctattagaaacaataagataggaattcggtgggattaagaggtatggtggggatgcttattcaagaagggggggagggagtaagggagccgggggggggcaaagaaaacaggggatgcattggggagtagagagggttcaaatgggggccagc

SEQ ID NO: 12853 - DNA, 902 bp, Homo sapiens
  misc_feature 889, 890, 891, 892, 893, 894, 895, 896, 897, 898, 899, 900,901, 902: n = A,T,C or G
cgtccgcggacgcgtgggtcgctgccccgccgcgggcgcagagctggcgctctagcccacggagttggttaactcctctcaccggcccctggaaagggttccaagtcctttagtacccgacgctgtctgggaattccgggcgtttcggctccttggtcgcagaggcaggaggcacccgaccgcatgtctgtcatggacctcgccaatacttgctccagctttcagtcggacctggatttctgttcagattgcggctcggtcctgcctctgcccggggctcaggatacggtcacctgtattcgctgtggcttcaacatcaacgttcgggactttgaggggaaggttgtgaagacttcggttgtgttccaccaactggggacagccatgcctatgtcggtggaggaagggcctgagtgccagggacctgtggttgacaggcgctgccctcgatgtggtcatgaaggaatggcataccacaccagacagatgcgttcagccgatgaagggcaaactgtcttctacacctgtaccaactgcaagtccaggagaaggaagaatcttgaccctttttcctgggcaactctacagtcctccctctttcggaaggtgaaggatactgcgtttagatgcctgtcatcctgtctgttggcattgttggctccagagagatcagttcctcatgtggggggttacattgtctggagtactctaccttagttgattctattaagtatatttcataaaaaaaagaaaaaaaaaaaaattggcggggcgggccgagaattaacaattttgggcgccaagagaatgcacgtccagaccgcccaagggggtccccaaaccgggacggtgaacaggttggcttgtcagcccctccccacgcgcagcnnnnnnnnnnnnnn

SEQ ID NO: 12854 - DNA, 358 bp, Homo sapiens
  misc_feature 1, 358: n = A,T,C or G
ncttttttttttttttttttttttttttttttagaatgattgaaacattttattaattctaatatttctgagaacccactgtgttctaggaacacatagttacacagatgatgtaatgaatgagacaaaatctgtatcttctagttgcgccaaaagcagtaatttctaaggtatgtgtggtggggaaagggtgctctgaggagagggagatggggaacagaatcacttgagagtgaggatttgtttccaattaattaacatgcccacaagaatctgccatatcccacatcaagaatcattgctttaatatagattgatgaattgatgacgttaatgagttgatgactgtctcccaggn

SEQ ID NO: 12855 - DNA, 1156 bp, Homo sapiens
cgttcgcggacgcgtgggttgaaatcccatcctgcttttcctgtacactacccctcacaaaccacaagctgcagcaacatggatgcccagcctggagcagcagcagccaggatgacctggagccaggggggccttcggaacagatgcacacccttcctgggtgatggtaagagttttcggctttgtgagaaaccttaccatcaaacacgatggccagcaacgttaccaacaagacagatcctcgctccatgaactcccgtgtattcattgggaatctcaacactcttgtggtcaagaaatctgatgtggaggcaatcttttcgaagtatggcaaaattgtgggctgctctgttcataagggctttgccttcgttcagtatgttaatgagagaaatgcccgggctgctgtagcaggagaggatggcagaatgattgctggccaggttttagatattaacctggctgcagagccaaaagtgaaccgaggaaaagcaggtgtgaaacgatctgcagcggagatgtacggctcctcttttgacttggactatgactttcaacgggactattatgataggatgtacagttacccagataaaacaaaaagtggattctctcctggaaaacctggaaaaaattgaaaaggaacagagcaaacaagcagtagagatgaagaatgataagtcagaagaggagcagagcagcagctccgtgaagaaagatgagactaatgtgacgatggagtctgaggggggtgcagttgactctgctggggagggggacctactggatgatgatgataatgacgatcggggggatgacagtggagttgatcaaggtgctgaaagagagggtgaggaggagaggatgacttgagacatgggcaaggggagatgactctgagcgcatagtggggttagaaatcttatccataatttttactaggcggtggtaagacaagtgttagcagatgcttcctagtttttgggaatgtccggttccatctggcttcagtctatgaatgacggcaggcataatctgaacaagagttggggcccaatgggatagactgataccaaggcggtacggcaacactcggggggcaaaaagggcaccagctagagaagttttgccatcccacccacttggtaagctacac

SEQ ID NO: 12856 - DNA, 764 bp, Homo sapiens
acttttttttttttttttttttgctgcacagctttaaaaagttgaagtctattggaaaccttcttataagaaaccttcctagtcagagaattcaactttcttcttttcttcattcatgaaaatgcagatccactgagaaagggaataaggtaaaagtatcattttcctttgggaatcaggtttttctgtcagaggaataaaggcctttctttccaggtcaattcctgttgtgctgaaggctgggaatcatcacgcccttttggtgtgggccccagctttgagcctctgtgatgatggtagaatctggaagtcagaagcccatatcctagatcagctgctttgctgggctgaccttcagtgtgatcctgcatcccaaactcctgacctctccagagaacttggggtgttctcccaagatgctgggcctctgggaagcatctccttaggtgaacagccccagatgcctccttcttaagttggtctaagttactccatgctgactatcaacccccaagtgtgaaagatcacgtttattcctgagggaaacacggagttgttcctaactctactttgccttcttagaacacgtttgcttctggttgaaatgaaaattttcagtaaagtgttttggttttttttctgtattatttttatttttttatttccttaaacctctgttttgggtgaagcactacagcagaagtctagtgtcatacaaaagtacctgcccgggcggccgctcggccaccgcggtggagctccaa

SEQ ID NO: 12857 - DNA, 826 bp, Homo sapiens
  misc_feature 1, 2, 3, 826: n = A,T,C or G
nnngacctcatgatccgcccgcctcggcctcccaaagtgctgggattacaggcgtgagccaccgcacccggccaatgtacattctctaaagtcacctgtcaataacacactaggcctgcctcctgcctgctataaatatcctcaacaggttataaacagcagcaggctacctgtgttcattgcaagtaaattactcatcatttgtaggttaaaagcataggcccgacttcttaaataaacatagggaatttgctgcagcagcaggccagaaaccactgtttcaaatctgcaagattttcctatcaggtgggaagacagagataagaaatatggtaaggcctgaaaaattgcaaaagtagaagcaagtcaggtttgctgatctaagagctaagtttgatcccaaatgcactgaagaagttagaggagcttaaagaagtctcaggaagcattttttaaaatgtgaaaacatcaggctcactatagcttccaaagaacaacataaacgagcatcagcagtcatacaatgacagtatcagaaatggcactcaagtgcatccccccagtacaatgcattgcacacaacacaataagacatagtaaaaaacattaacacaaaacaggaattctacagcaaagatgcaaaactgaattctaaaatacaggaacaaatacttttctaaatgaaaagttttccatacttttcttaaaaaaaaaaaaaaaaaagtcataagatgccccatatgggaaagtcaagaaaagaataaatagagctgaagggaagagggaaaagggagaaacaggtgggcagagtgccaatttacaggan

SEQ ID NO: 12858 - DNA, 503 bp, Homo sapiens
  misc_feature 503: n = A,T,C or G
ggtggcggccgcccgggcaggtacgcggggacctgctgtgctcttgcttgcacagtgtcctggagctggacctggctctgggtttccaggaagcagtttgactaaaggcagcaagctgcttcctctgctgcctgagataccagaaccatacagaaagacatgcaaagcacaccaaattgtctacagcttaagatcaacaaaaatcctttttcattaattataaattcacagagaatataaacaatgatccttattatcccctttactggctcacacagggagagagaagccaaaagcccaactgattcccaatggcgaagattgagaaaaacgctcccacgatggaaaaaaagccagaactgtttaacatcatggaagtagatggagtccctacgttgatattatcaaaagaatggtgggaaaaagtatgtaatttccaagccaagcctgatgatcttattctggcaacttacccaaagtcaggtacaaaggccgccaccgcn

SEQ ID NO: 12859 - DNA, 826 bp, Homo sapiens
  misc_feature 1, 2, 3, 4, 5, 6, 7, 8, 9, 10, 11, 12, 13, 14, 15, 16, 17,18, 19, 824, 825, 826: n = A,T,C or G
nnnnnnnnnnnnnnnnnnncctttaaactgcaatttattgtgaatagggaggcgctggaaagtaaaatccacatagttctgtagaatagtaagatttgagtgttcttgtccggctagcctgtttggagaagagatgaggaaatacaaccttgagttatgagggaggaatcttatctttagagctcctatcctacctaatataacaaagcatgaagagtgcacggagtcttagaacctcagtgattttcttgcaattcttagttgactcacattgctgaattacttttaaagtagaataaaggtgtctccataaaccatgacctacagatttgacccacaatgaccagcatgtcccttatggacattttctaggtccagtggcactgcaggtcccggatgattgcgggtgccaatttctacattgtggggagggaccctgcaggaatgccccatcctgaaaccaagaaggatctgtatgaacccactcatgggggcaaggtcttgagcatggcccctggcctcacctctgtggaaatcattccattccgagtggctgcctacaacaaagccaaaaaagccatggacttctatgatccagcaaggtaggttttcagaggaaaattcttttatcaacatctgtataaaagaaatgatgaggcagaatttgggccctttgaaaaactctccagtgcattgccacatgctcccaagtggactgagtcccttgagagtcaagacgtggtcttataaattttatgtcccctaaaattgtactacagtcttctgcatatagtagatggtccataaatatttatggacaccgnnn

SEQ ID NO: 12860 - DNA, 1277 bp, Homo sapiens
  misc_feature 1277: n = A,T,C or G
tggctgcgacaggctcagtgtcatcctctggaacccaggaccaggaacacagtgcacgcgccgtctccccgcttcccccgcgtacatggctctgaagcaataccgagaagctgcccagactgccatcatcattgccagagaagagcagtctgcaggcaactaccggaatgcacacgatgttctcttcagtatgtatgcagaactgaaatcccagaagatcaaaattccctccgagatggccaccaacctcatgattctgcacagctatatactagtaaagattcatgttaaaaatggagatcacatgaaaggggctcgcatgctcattcgggtggccaacaacatcagcaaatttccatcaccagctccatgaagtggtatgtcagggccccaagaccactcccaggtttgatgactcttcactgggaggatttacaagagtcaacacacagtagtaccaaagccgagatttatcacagcaaaaggatctgaggcaaaatgagcagaaggattcacgcaaaggcgagcaggtgcaggcacggacctccaagagtcccttcccagtggagcacacaggacgcaagttccgtaactcctccacgactgacttgtacaacatggtgaaacgtagagtgccaagaagctcattagagactcagcagccaggagttttattggggtgtggtcacataggtgccccctgcgtggcatgtgcccagttttccaggctcccagagagcaggtgttcggcataaaccacgttgtttgtacaaagattttaggcacggtgagccactcatcagttctggaaacggtgggaaccgtctccaaatctatgttccagatgcgagccgagggttagctgttcaagcctttccaaggatgacagtctcaggcctgcacacacaagtacttttctgaacaaactgggacaaaagaaataacatttgcccaagatcacattgtcagctaataatagcctgactctgtgttcacaagcacggtaggacgttgcctctgaaaaggcctcactattccaaaagacatgtcatgataacattcttaagtgattaaatactgtcacattacatgacagggatcagcaaactttttctgtaaaggaccagatgttaaatattttagacttcgtgagacatgtggcctctgtcacaactgctcaactctgccatcttctcatgaataatacgtaaacgaatgggatgacttgtgtttcaatagagctttatgtttggacacaaaatgttaaccacatacan

SEQ ID NO: 12861 - DNA, 3462 bp, Homo sapiens
  misc_feature 1, 2, 3, 4, 3425, 3462: n = A,T,C or G
nnnnatgcaggtagcattgcagacagactgacagagctttgtgttctgcttggccaattagcttagcttctctgagcccagtttcctcatggatccgtctatctgtgctgcctgggagtgtcaagaggccgtgtccttcattcacctcgcgcgtgggcgcgctgccctgaagatgctcccgggctcagtgcagacggctcagcgttctctcgcgttcaacgaaccgccagaaacgtcagatggtacggaggaaaacactttacactttaacagtatttttacgtttatttgcagcaaatgttgttggctttgtatttaaagtatttatgactcactataaagtgtaggatccaagaaaacgcgctagtttcacttggcccccgtggctgtcccggggagctctccaaggaaggactggttcctgaagttcctggggtgctgcaccaccacggaagaaccaagctccacagagaagccagaagccgcgaccgcggggacgctctctgccaggcctccaccgcctcagcggccctttacagccaccgcattctccatgcccccagttatttctagcttcgcacagcgcccggcccaccgagcgacctcaaacctcgcgacactcgcaactcccgaggcccttcctgctactggcctcagagggaagagacatcgggaagattgctccgcccacagaaaggaagatttcgttctcgcgagatcccaatgacaattcgggagcccgttctcgcgggattttccaagaccgggttggaatttgcgggggttaggagacggaagtcagagcctaggaagatttgggggtcgccttgccggcctcctgtcctcctccggcggcggcggagcccgagagaactaggtgaacaccgctttgccagcctcacacagcgtcccctggctctgccgccgctccggacgtcgccctcccgttctgcttgggtccccttagtcgctacctttgctgggatccccctcctccatcctgtggcttcgggttgccgaagagcgatgctcggagggcggccggaagtggcgttggccgccattggcctgccggccagccaccttgctgtcctccgccgccttccgggtgttacatgcagccgggctcggcccctccccctggccggatggatccgtcggcgccacagccccgcgcggaaacctcaggcaaagacatatggcatccaggagaaagatgtcttgccccttctccagataatggaaaactttgtgaagcaagcataaaatctatcacagtggatgaaaatggcaagtcatttgcagtcgtcttatatgcagattttcaagaaaggaaaatacctcttaaacagcttcaagaagtgaaatttgttaaagattgccctaggaatcttatatttgatgatgaagatttagaaaaaccttatttcccaaaccgaaaatttccatcatcttctgttgcttttaaattatctgacaatggagactctattccttataccatcaataggtatttgagagactaccaaagagaaggaacccggtttctttatggacactacatccatggaggagggtgcattctgggtgatgacatgggacttggaaaaacagtacaggttatttcatttctggctgcagttttgcataaaaagggaactcgtgaggatattgaaaataacatgccagagtttttactaagaagtatgaaaaaggaacccctttcttctacagcaaaaaaggatgaattggacacctggggatatttcagagtcactgttttaccatggaaacagaaaagataatgaattaattcgtgtaaagccagaggaattgtgaaattgcctctaacaaccttatgaaacacctacgcttatgccctggatgaacttaacagtttggaatggtcagctgtcattgtggatgaagctcatagaatcaagaatccaaaagctagagtaccagaagttatgcaagctttgaaatgtaatgtccgcattggcctcactggaaccatccttcagaacaacatgaaggaactgtggtgtgttatggactgggctgtgccaggccttttagggagtgggacctacttcaagaagcagttttctgacccagtagaacatggtcagagacacacggcaacaaagagagaactagccactggccgaaaggccatgcaaagacttgccaaaaagatgtctggctggtttctcaggcgcaccaagactcttatcaaggatcagttgcctaagaaggaagaccggatggtgtattgttctttgacagatttccagaaagctgtctatcaaacagtgttagaaacagaggacgtgactttgatacttcaatcttctgagccttgtacctgtaggagtggccaaaaaaggagaaattgttgttataagaccaattctcatggtgaaacagtgaaaaccttgtatctcagttaccttacagtccttcagaaggtagctaaccatgtcgcgctactgcaagctgctagtacttccaaacaacaggaaacacttatcaaaaggatatgtgatcaggtattttccagattcccagattttgtgcagaaaagcaaagatgcagcctttgaaacactttctgaccctaaatacagtggaaaaatgaaggtccttcagcagcttttaaatcattgcaggaaaaacagagataaagttcttctcttttctttttccaccaagttgcttgacgtgctacagcagtactgtatggcgtctgggcttgattaccgacgacttgatggaagtacaaaatcagaggaaagactcaagattgtaaaagagttcaacagtacacaagatgttaacatttgccttgcctctacaattagagacgggtttcaccgtgttagccaggatggtctcgatctcctgacctcgtgatccgcccgcctcggcctcccaaagtgctgggattacaagcgtgagccaccgcgcccggccttttttatatatttttaaaggcaatatagatttgaacacttgggcatgaaatcgtttttagtatactcccatatttttctgatctttgaattctctttagcattgccctattttccattcctaatgtttatttgagtcttttctctatttttcttgattcatctcaccagtggtttgcctacttcattaatcttttcaaagaatcaacttttggcttcgttgataatttctattgtattttttaaaattactctttaacttctgtttattttttccttttattctagtttctttaggattagcttgttgtccttttttaaagttggaagcacaattaattttcagcttttcttctttttcaatatgagcattttttacactttagcaatttcccacaaactttgatatgcagtatgattattcagttctaatggcccgcgttaattaatnctagaagtatttccgaggggggggcccggtaccccan

SEQ ID NO: 12862 - DNA, 1461 bp, Homo sapiens
ggacgcggggatgagatctggttgtttgaaagtgtgtagcacctccaccttctctctctccctccctctccctctcctgccagccaagtgaagacatgcttacttccccttcaccttccttcatgatgttaccattggaatgacatactgcatcctatagttataccatccactctgaaatcaatgtgactttaacttcagttccatacagaaacttcttttccacaggtaagaaacggttgaactggatgcaatttttatcacagcttgtgtaagactgcctctgtccctcctctcacatgccattggttaaccagcagacagtgtgctcaggggcgttgccagctcattgctcttatagcctgtgagggaggaagaaacatttgctaaccaggccagtgacagaaatggattcgaaataccagtgtgtgaagctgaatgatggtcacttcatgcctgtcctgggatttggcacctatgcgcctgcagaggttcctaaaagtaaagctctagaggccgtcaaattggcaatagaagccgggttccaccatattgattctgcacatgtttacaataatgaggagcaggttggactggccatccgaagcaagattgcagatggcagtgtgaagagagaagacatattctacacttcaaagctttggagcaattcccatcgaccagagttggtccgaccagccttggaaaggtcactgaaaaatcttcaattggactatgttgacctctatcttattcattttccagtgtctgtaaaggccatggagaagtgtaaagatgcaggattggccaagtccatcggggtgtccaacttcaaccacaggctgctggagatgatcctcaacaagccagggctcaagtacaagcctgtctgcaaccaggtggaatgtcatccttacttcaaccagagaaaactgctggatttctgcaagtcaaaagacattgttctggttgcctatagtgctctgggatcccatcgagaagaaccatgggtggacccgaactccccggtgctcttggaggacccaagtcctttgtgccttgcgcaagggttgtggtcctggccaagagctacaatgagcagcgcatcagacagaacgtgcaggtgtttgaattccagttgacttcagaggagatgaaagccatagatggcctaaacagaaatgtgcgatatttgacccttgatatttttgctggcccccctaattatccattttctgatgaatattaacatggagggcattgcatgaggtctgccagaaggccctgcgtgtggatggtgacacagaggatggctctatgctggtgactggacacatcgcctctggttaaatctctcctgcttggcgacttcagtaagctacagctaagcccatcggccggaaaagaaagacaataattttgtttttcattttgaaaaaattaaatgctctctcctaaaga

SEQ ID NO: 12863 - DNA, 1291 bp, Homo sapiens
  misc_feature 1: n = A,T,C or G
ngagatatggtctagctccgtcgaccatggtggagtgcactgatgctgtcttggctcacggcaacctccacctccagggctcaagccatcttcccacctcagcctcccaagtagctggaactacaggcatttgtcaccatgcatagctcatttttgtattttttgtagaaacaggattccaccatgttgcccaggatggtctgaaactcctgagctcaagcgatccacctgccatgactttccaaaatgatgggattacaggcatgagccatcatgctggccttggatgtacttttcttttcttctttttttttttttaaccatctcagcaaatacatggttcttaaaaacatacatgtccatttctatgtctcccacaaaacatctgagtaattacctccagacaatgtgtgctaaacttcgagttttgaatattgctttaaattattgctaccacttgtatatgactttattgtttaccaagcacttgtatatattacctagtatgtacaacaacacggtaaagtatgtatttatcagaaaaaataaccaagattcagaaaaactacgagaattaaataaggtcactcaccttgtaaacgatatagccaggttttacaacgaggtgcgctcaatcacaaagtatatgcttttccccaatatcttctttaactataaacatttatttaatgcccactaattgccaagaattgtgctagaaactttcaaattttgtcttactctggtaattttcatgaggattacgtatgtatcatgcttgatagtttattttcaaagtttagcagccaaggctttatttactctaatgttcctgccagcttggcccacattcaatgcttataaataaataatctcatttcggctcaagtatgatgagtatcctttccatactgaccacagttctaattaaagtgaggtcaactacaacaataacaaagttaatataggaactatactactcaataaagaaggcaaaaatgttcccaatttaaacaatttctgaatttttccatgaagacaggcagttccaactgtcaaaactgtcccatataattaatatttattattaatgcagacactttactgacagagacaagtatttattcagagctactaagcactagtctaactttacatctaacagggaaaagagttgttcaaggcctgtccctggctgacaatggtcaccggggcagaggcttcagctactctctgatttagtattcttcagttgttcaaaattaaaaaaaaaaaacaaaaaaaaaaaagt

SEQ ID NO: 12864 - DNA, 565 bp, Homo sapiens
  misc_feature 564, 565: n = A,T,C or G
acttttaggcagctcacagagctgatctcaactttgagcaccatgggaggtaaagacctcagggcagttggcctcttgtgcagctgaagtgtttagaaagccagaacgaagtgaaaggaagaccctagagtgggtcagctttctgccaaagatagagaatatagctatagaatgctcccagcctacagtatagagctgttgttgggaagtggctgctcagccagtgcctgtatgccctagcctctcacacagttggactacatgactagttctggccaatggagtgtgagtagaaatgacgtcagccacttctagaactgtcccataaaaacctcctactatccccctgcctgccagctggatgtcaatactcaaaggcatattaaagccatgtttttaaagggtatgtcagcttggatcactgaatacctgtataaagcagagccctactgtagattggatgttaagtgagcaaggaatatatttctgggttatgttaggtcattgaaatttgacctattatttgtttcagcagttagcataaccttatttggaacagatgann

SEQ ID NO: 12865 - DNA, 421 bp, Homo sapiens
  misc_feature 420, 421: n = A,T,C or G
gctcgagcggccgcccgggcaggtactgggattacaagcataggccaccgggcatggccccaattctgagcattaatttatttattggtgagatgaaagtggtaatttctgttcttctacctttctaggttttgagactcaaaattaataatacatgaattttttgtgataaagccctaaataaatataaggcattgatatgaatcactccatgtattcccaccctggaccttggcttcaacctgatattatgcaatagaatagtattaggatagctcaacttgcatatgcttaaatttagcatgttcaaaaatatcccctgcccattctcgatcctttatttctcagcttccctgtttatttcgaggcatcttcatttttatagttcccagggtagaaaccttatattctatgatgatnn

SEQ ID NO: 12866 - DNA, 2231 bp, Homo sapiens
  misc_feature 1, 2, 2231: n = A,T,C or G
nnccacagccacccagctgaggtcctgggtctctgagcaaaggagcatgcttgggcgttgtggcctcttaggcagcctgtttcaagtgccatgtggacctggtgcagctgggaagcttgggactctcgtctgcactgcgtgtcctctgaagcagtgaagtctgtgcctatgccgagcgcgctaagaagtctcccttccagctgttccattctctccaccaccagcgtaactggcaagttaccaaggttgttcctgaaacagcagtgatcatgacttctcctttccagagttttgggtccttctgaattaatggtccttttcgaacaccggcttgcctttacagtgaactgtgattctctcgaagccaatgctttcctgtctgtatttgatgcaggattaaacacttcccagagaggattctagtctggtaaataaccacagtgtaggaactatctaactggcatttgtgtttcttgcgagtattttgaagaaacaggccgttgaccccatctttggaagtagccctttaccatgcatggtcagtttcttagggatttactatttgtgtgaggtggcatctaagggaagaatgggttttcttccccaaaacatcagcatttctaaaatagtcctaaagcttgaaagtaagttgcttccatgagcatggattacccagtagctactttttaatagagactgactaggtttacaacttctgggagctactctgtgggctgaattcttccaaaaccgagaaaagccagtgcagtctgatttcttttgcttttgtcagtaatggaatcttttgtttttaaaatgtacaaacctataagtttaaacaggtttgtactgacaacctccttggcttatttgggggtggagcaattgttttattccccagtttcagtgcgttgcccacttcaaacatggtgtgtcctttggagctgtgacagaggtgcctgttctgacttagaacctctggaggaggaggggggtgccttggtctcgtgttactttgctgtgcctgtgctgagagaccatgtgcccgagcatctggttgaccggcatgaagtacatcagcctgtcttagcctgagctgctttgaagaccatggggtcttgtgtttccaacttcgaagtgctgatgtggacagtttgccaatgttctcttctattgcaagttcagccagactccatgactcatctgatcccttttatggccaaatcatccttcagagtagggaacactcagacattctgtgcatgttgttcccccaaagcatggtcatcacaaagtcctgagttctggtgtgtgctcccgcctcctgggtatacagagagaaggcaggaatcaggagttccagaagcatatacatgtggctaccccagcaacaagcgcatcctgtgctcagataagctgcatggttgggagtgttttttctcgcacgttgaggcttagtggagatgggcaccactgccatttgctcagaagaaggctggtctggtcctaactgcatcccacactgcccagatcattctagaataggttatttctgaatgttttatagaatttcttaataccatcctggtttggtcagccattcctttgattggaaaggtcagctggggccagtggtgcctcaggcaggcccacacaactggccacctcttcccgttaatgaccacagcagacagaatttgagcccagcacctaaaagtacaggaatttcacttcccaccaggacttgagcacataactctatgtctgatctaggaggctgggggaagagcctcccataaaatcacacctactctgtggtaagaataaaatcccacccacctgggacttggtaatttctccagacaggaaagctttagaaaacttgagtgaaatggagcaagcttgaaggagttagaatcttctgtgcttagggtttgctgctgctggtgagcttagaattttggggttgggaaaaagtggaaggcataagcatagaaatattttaggatattttaggatatgtgaataaagctagactcaaaccatcataataaacattttttttttggacaaaagatgatacgataaaaaccaacttgtgtgaaactgagtcagtggagaagtgcatctcgtattttaacctaaggcttcagctcccacacacgactggacagaggggtgtgttagcctgatcttcagttttctcattgggaaagcacttgttccactgn

SEQ ID NO: 12867 - DNA, 549 bp, Homo sapiens
  misc_feature 548, 549: n = A,T,C or G
acgcgggtctgtggaaaaattgtcttccatgaaactggtccctgatgccacaaaggttggagaccgctgctttagatgggaattaattgtaagaaggataaaatatgtgtccactacttacatactataattttatctatcttcagttggaactgaaaaaaaaatcaagttaaatggttgcagaaataattcaacgtaaaaaaagtgaagttagaaaaaagtaacttaataatgactaaaataaggcagatgagtttgagatggggctgttatcctttattcctgtaaaggtctaatgatacagagttaggaaatacgaagtgccatttgcaaacactcctgaaatctaatgaccgtggtagatgatacaaatcaaccacagttcttttatctactgcatttagacatagcttcaaaatactttgtaatcagctgttggtctttttaaatgaaaacctatttagtgtcctagatgcaatctaataagggagggaagtaggtaatggaaaagtcagaaacaatctttagatcacttattcagatccagnn

SEQ ID NO: 12868 - DNA, 492 bp, Homo sapiens
acgcgggaggcttttgacttctggttttagactttctttagcttctgttgttagacaacattgtgcaagcttgtttttataagtttgcgtggattaaactgaacttaatgaaattgtccctccccccaaattctcagcacaatttttaggcccacaaggagtcaagcacctcaaggagatcttcagtttgaacttggtgtagacacagggatactgatgaatcaatattcaaattagctgttacctacttaagaaagagaggagaccttggggatttcgaggaagggttcgtaagggagattttagctgagaaataccatttgcacagtcaatcacttctgaccaagttatcagaaaaaggagaaaagaatgtctccccactaaatgttctagggtggtgagaaatctaggttggttatctaaatcaacaatatttagatattccaatatctaaatattgttggaaatactctcctgaagtgttcattgaac

SEQ ID NO: 12869 - DNA, 1142 bp, Homo sapiens
  misc_feature 1, 2, 3, 4, 1120, 1142: n = A,T,C or G
nnnncacatagagctataagagtgactgacaatactattttatttacagccctgaaaggaaaaaaaggatcttaaaaccccagctaaaatcagaaagctctacctctgcattctctacacctacacgatcaataccgccaagacacaatgctgctcagataaacggtaaaacagaatctagttctgtggttcgaaccagaagcaaccgagtggttgtagatccagttgtcactgagcaaccatctacttcttcagctgcaaagacttttattacaaaagctaatgcatctgcaataccagggaaaacaagtaagactcactttctaaattgaaatgtatatgatgattttcttaatttaagcttttactttgccaaatgcaatatactgagttttagtaattcctagcagacactgttgtttttgccttctttattaatttcctattttaaaaaaaagtttttaataagaagaattaaattgaggtttaggtcattatagactaatgcttaaaaatggcaactctgatctaaactacctgaatttaaatcacagtacccacactagctagcaatttgccaagacttgccttcgaaattttgaaatgatgggacagcttctaaaagggctgaaactattaagagtttctagttggatacgcctttttcctattagaaagtagctttcctaagaaagctttaagcatccttcaggttttgttgtcttggctattcaaataattcaggttaaccttttttcttatctttaggttcaataactcttaatttttaaattttgtttgtatgttttagtactagagaattctgtgaaacattccaaagctttgaatactctttccagtcctggtcaatccagttttagtcatggcactaggaataattcgtaagttactgtgatgagtgataaatacttcactattcagatactttcgtaagagatacatttcagtggaacactttgcataaatattttctcaaaaatgtgcaatttctctgcttccatgtgataagcattttccactctcctaaaatcctttgtcacagttaattttccgccttcgtctaggagaagaatgggtcaaatattcactctgccaggtnctggcgtcccggagtaccggan

SEQ ID NO: 12870 - DNA, 688 bp, Homo sapiens
acagttaacaagaggataactttttttattatctctgtccttctccctcaggaagcagagaattatcagattggtgagagaaaggaaataaaggtctgaacatgtgtctcaagtcacctcttttgggagcactctgttctcagtttattttaattctgtttctcaatttaatgagtttactagagcagggtccactattaccctgtggagatccttaatgatacatggatatgtttaattctgggaataaagtagttaaactggctagtgattatgccacattgttagagtcatctttgtcaataagaaagttgttcatatttatgacatctgtatccatttcttcagaagtgtgactattattcatatatccccaatacacacaaaatatatagttttaactaaatttttaatctgttacatatttttctaggttactagctagagacatcctggttgtttccaatttgttgtaaactggaaatttgatgctaaacaagtagtgttatgacaagccttcttattcataacttgacatgcttttgccagtatattttagatgaaattttgagattatggtggagtcaaatcatatgaacactttaaattttgctccgttattacccatattcctgtgcaaaagtgacaccaatttacaatgccatattgtatagacgtgtttcatggt

SEQ ID NO: 12871 - DNA, 2096 bp, Homo sapiens
  misc_feature 1, 2, 3, 2096: n = A,T,C or G
nnncgattaatcgattcctaaagatttggctcgcggccggatggggccagggaggatgaagaaagaagaaggactccccagaaaacacgggacttccccggaagctacttgaaaaacatgacccctggccggcctatgtcacctatacctctcagacagtgaaaagactcattgagaaaagcaaaactagagaactggaatgcatgcgtgccctcgaggaaagaccctgggcatcaaggcagaataaaccttccagcgtcattcagccgaaaaggaggaagtcttccaagtcttctggcaaagctgtgttcagggacacgctgtcagaatccacgttatcaatgtggggcgcttattcggtattggccatggctcctaccatgatcccagaacccacacacttacatgcggattccagagactgtccaactgaaaactataacaagatcatctttgcccgcaagcctatgatgaggatgctccctacagttcgctactgaccaacaaggagaaacatgcaaatgttttagccaggggtccctgcagccattccccaagaacgtacaaaagttaagctccatttaccactcacttgacagtgtcctttaaatctgaacttgctcttgctcatgcggagcttggctaagagaaaccagatcagaatgcaagctgtaggtgggtgggtgagtgtgtcccctcccacactgctctctggtgggtttgggcagtccctggctctagtctctgctgcagattctcaggaccaaaatgtgggtgatttgtctgggtccaggcaggagacagaaatcacacaagctcttttattagagataatataaagaatgattaaccaggtgacagtaaagggcaggaagggaatacaaaggtatccatggaggtagcaccacaggaagcaggcatcacacttgaggcttgggaacaaggggaagatgctggactcattgaaaggtggttgcttggagaagggacatggggctgaatctcagacttctgaggtgggggagtggggatgccactcaatgcagctggtatctctgagctctgaggagagtcctgtggggatggtgccccctcctctgaataggggagatgttttgttggtgtctctgaggggacccccatgaggctgcttttgtgagtgttggaaaaaccaaaaactgcattgaaatgtttctgggaggagttgccactgcctgggtgaagaaaaagcactgctagggttagcaacctgtctggcaagggacaggaagctgatagaaagtgaacaggaagcaaacaggaagtgagcaaggggccacttcctacttcctcctttagcctagcagattccttctagctccccctgggggctgagcctatcagggcacaaagccagaatgtggtttgtagaatcccagccccagcatctccaagcataggatggattttgaagccaagagggaattagctctcggccgggttctgagtgatcccatccagctgctcctggacctggtattgagaggtttttcccttggagggcaaacaaagtggcagtggggaccagggtgtcccctgctgagaaatggagagctcttttcccctgtacttctctggggtttgccttgtggaaccaagtgcttgggggaggagctcctggcaggactccagctgttatttgtcagaggacagctaggattggttcacccttgctctgagttggccccaaagcgagctatgctgaactcttctccatctccaagcagacaacctttgtctttacatgcaagagggatccaattatgacaggctgacccagctggtttcatgtttggggtttatctactgagtaaggtgaccttacctgagttctgtatgtgtattcgcaagacagttaatactaatcatcatcctcaaagagatgttaggatgagaagtcgtacctataccagcgtcttggcaagttgaattgcgcacaaggatgtctcatctcagggctgggtacgctcgcgcacccggccgtgggaacccccggccgggtttgtgggagggccaaaggacaccacgttggccccggggcaaatctaaaaaggccn

SEQ ID NO: 12872 - DNA, 433 bp, Homo sapiens
acattgtaattatgtttggttgcatggctgtcttatttccctttgatagatttagagacctcccaaagatttcttgattagtgataaacttagttatccactaatggaaaggaacagtgatgcatgtagattatagaaaatcaaacactgaatattctgattctcaattaatgttattttcaaatgattttgattatattagtattaatttgtattattcaatttttttccccagtatgagaataatgttatcactattgatctggttcaaaattcttctcaaaaaactcagaatgatgtggacatagctgatgtggcttattattttgaaaaagatgtgagtatcatcttctttattcctgtgttcaggaatgtagtctatcatgcctcaatgaattaaatatatttcatcacctttttatccacttacaga

SEQ ID NO: 12873 - DNA, 547 bp, Homo sapiens
  misc_feature 1, 547: n = A,T,C or G
ncatgtaagttctagtgatgctcatcttgtccgacttcctcatgttgcacatgaaaatactgaagcttggggcatctaaataacacgttcagaatgacagtagcagagcttgactttgaaacaagaaagagctctttccactgtacttttttttttttttttttttaaccttcattaacctccaggcttctaaatcccatgctgcattgctgttttggatgataaagcatgcgacatgaccaagcctagctgctacatcagttcccctctaaagccactcaacattactatcaacataaaaacagtgcatttgctatgcatttgcagttttgtcactatcccagccagaatgctacctaaaacctttcctgtaaagaaatctcaaattgcctcagaccacaatttggtctgtgacaatttgctgcgaggttatgtgtgtgttcgtgtgtcatgccccagtgatggatgatgtagcgtgcatgggacggtgtgcggttgtgtgtatgttcgtgtgtcatgccccagggatggatgatgtagggtgcan

SEQ ID NO: 12874 - DNA, 414 bp, Homo sapiens
  misc_feature 414: n = A,T,C or G
acgcgggtattaccataggtaaacagttttcacactctgccggcttctatgatgcagcaaaactaaagtataagaaagcgaatgaagagcaccatcgtttacttaaaggagcaccatttaagttaaatcttcacccaagggactattttgacgctaatccttatttttctgaggaatctttaccaccaattaaaaaagaagagaagaagaaaacaatttcaaatacttttaaaccgtcttctcctggtaaaaagcctggtggaatgaaggcaggaacatttgatccttacccatcacattctgctgacccttattggctaaattggcaaatatttctggcaaagatgataagattttccacccaccaagtggaccaaaaagcagaccagttgaaagtttaatgactttgaatgn

SEQ ID NO: 12875 - DNA, 596 bp, Homo sapiens
  misc_feature 1, 587, 588, 589, 590, 591, 592, 593, 594, 595, 596: n = A,T,C or G
nagtcgcccacgcgtccgcaagattcagagggctcaacgagctgtcaagacaagattgaggcttcaccgtctcctccaagggttccagagtgaggtgggaggctggtatctggaccagactggctctggagagtaggcggcattgagagaaggtggtacaccagagtctagactcccatgtgaagcacaaggatgctatctgccccacctgtctcctcttccagcctcactttcacctgccctagcaccccatgctctggccctccccagcctggagctacaaagccatcaggactggacatgaggtagaggctgggcaattggccactgctcttgagacagaactcaccccctccttagtgtccagggaagcctgcggatggagaggaaggctctatgagtctacctacctgctcatgcccaccttcccacaggctgcccatcacacccagggagcccccagaccatgggggactcgcagctgtacagggcttatgtagagtggaatctcttggatgcagcttcagaaataagctttcccccttttaaacaatttataaaaatcacacatggcattaaaaggatcnnnnnnnnnn

SEQ ID NO: 12876 - DNA, 577 bp, Homo sapiens
  misc_feature 577: n = A,T,C or G
ctataggagtcgacccacgcgtccggttaatatgaattttttaatgcttaagatttgatttttacttttcaaagcaacattttgttgaatttttttctgcacagctttccaaaataaaaagcagaagtataaaaacccaaacaagtccaccactcccagtattctctccttctgccaaaccagagctatgcagatgcaggtcactcttcttctccatagcctgcttcctctgaagctctgagcctgtggggccagaggagtcatccagaagccatcggccaggaacgtgtgagcccaacatgcttccaccctcagggttcctggaatgctaacaggagtgacaaaccaaactgccagccaggccggagaaaagatggagatacatgtatatatatatatatttatatatttttcttttttcctttttgaatttcaacccaaaaacatattccaggaaaagatgtagaggctgggctgggtctccttcaaaggacattcgatatcaaggacagtgggctggcctacagccaggctaccccagcccacttctccctgcttactccaggatgagaggaan

SEQ ID NO: 12877 - DNA, 390 bp, Homo sapiens
  misc_feature 1, 2: n = A,T,C or G
nnagtcgaccacgcgtccgacagatgagcccctgatgggagtcacaccctcagcaggcacagacacgcaggatggggtatgcggatggacagacgccaagcaggcctcacagccgagtgctggccccagcagctgccacttactttgagcttcatcctcttcttgtcgggatcgtgcacgacactggcctcatgagactctgctgcagtgcaagggaaagaaggacgcttgacctgggcctgcagacgtggctcagtgcttacagcattcgctgctcgaggaggacacgggtttggttcccagcacccgtactccagttccagtaaaaactctgggtgtctgctaaccttaagatgcagtggtccagtgtgcaataataaactaccagct

SEQ ID NO: 12878 - DNA, 430 bp, Homo sapiens
  misc_feature 428, 429, 430: n = A,T,C or G
actttttttttttttttttttttttttttatttttaggatgccatttagcaaatatgtttccaacagataccaattcatgaacagtggaacagggcagggcttctggaaatagtattctataaattgtgcttcaacttgcaagtattacatttgaaataagcagttaccaataaagaaatgtgccttgaagtaggtacagtttattttatatttatataaactacccagctaaatactaaatataaaaatcaatgggtatatcatttactttcacatagattctttttacttggtgctatttttttctgtaataaaattaatatagctgattaatggaggttggaagaaacaaaactgagaagaaaaaaaatggaatttcaatggcattagaaaggattacttggtgctccttcttgggaaggagacnnn

SEQ ID NO: 12879 - DNA, 636 bp, Homo sapiens
  misc_feature 1, 2, 3, 139: n = A,T,C or G
nnnaaatccacagcagcacattggcttgacttgctgggtcacctctagcacttcccttcagtcttcccttccctggtgttcttatcagtggatttaatcccatccagagaatgagctaggcattgactctctggaaaanacctctttaatagctctttttttttttttttttttttttttgggctatgttctcctcttccaattttaagtagatctgctttattctgatggtgccttctgttcagaggctccagcagacttacctgagtcctaacactatcactgtgatgggggtggtagagagacaggaccagcagaacagactggggctgctcgtctttttccagctggtgaagtttttatagggataaagcctcccagaatagaatggcccattgaacagcaaacacaaaatactggttttaggagaacattgtcagctgttgctttggctttttaaattcttcattttagaaagaactcgcatatgaatttaatttgtttctgacttaatattttcccatttgaactttcactgtatttttttcttcttgagcaagcaaattcaggaaaactccaatatttgtctgtcttctttcccagtccttctaaactccccccagacccgcgtacctg

SEQ ID NO: 12880 - DNA, 1373 bp, Homo sapiens
actggatcagtttctcctgcgtgaggtatgggtgacactcaacctggttagtcactggtttatatttcagtccaggtttgttcaagagcctctcgatctggaagtggttgaaatttgagaccccaagggctttcaccagcccctcgtccaccagctcctccatggccttgaatccctgtggccagtgaataagatagacgtccagatagctcagcttcaggtccttgagggtcttctcaaaggctttcctcacaaggggtctctcaaagaaagtgggccacaccttgctgacgatgaacaggtcctcccgtcgagcggccgcccgggcaggtacgcggggagcagggaaccgctcagatacccttccacaccgtggaaactttgttcttaccctcttgacgaaaaatcttgctgctgctcactctttgggtccacaccacctttaagagctacaacgatcaccacgacagtctgcggcttcattcttgaagtcagcgacaccacaaacccaccagaagggagaaactccagacacatctgaaggaacaaactccagacacaacatctttaacagctgtaacacacactgtgaaggtccacggcttcattcttgaagccagcgagaccacgaaccctctggaaggaaccaactctggacacagcaggacgtgagacttctacctgctcactcagaatcatttccgcaccaaccatggccacgtttgtggagctcagtacaaaagccaagatgcccattgtgggcctgggcacttggaggtctcttctcggcaaagtgaaagaagcggtgaaggtggccattgatgcaaaatatcgccacattgactgtgcctatttctatgagaatcaacatgaggtgggagaagtcatccaagagaagatccaagagaaggctgtgatgcgggaggacctgttcatcgtcagcaaggtgtggtccactttctttgagaggccccttgtgaggaaagtctttgagaagaccctcaaggacctgaagctgagctatctggacgtctatcttattcactggccacagggattcaagactggggatgactttttccccaaagatgataaaggtaatatgatcagtggaaaaggaacgttcttggatgcctgggaggccatggaggagttggtggacgaggggctggtgaaagcccttggggtctcaaatttcaaccacttccagatcgagaggctcttgaacaaacctggactgaaatataaaccagtgactaaccagaactccctaggaacaatgcaaaacagagccggctttccccgtgatgaggattgtttgctgttgcaggttgagtgtcacccatacctcacgcaggagaaactgatccagt

SEQ ID NO: 12881 - DNA, 681 bp, Homo sapiens
acttactgtgagggctagattggagctccaccgcggtggccgagcggccgcccgggcaggtacaaaagccaagatgcccattgtgggcctgggcacttggaggtctcttctcggcaaagtgaaagaagcggtgaaggtggccattgatgcagaatatcgccacattgactgtgcctatttctatgagaatcaacatgaggtgggagaagccatccaagagaagatccaagagaaggctgtgatgcgggaggacctgttcatcgtcagcaaggtgtggcccactttctttgagagaccccttgtgaggaaagcctttgagaagaccctcaaggacctgaagctgagctatctggacgtctatcttattcactggccacagggattcaagactggggatgactttttccccaaagatgataaaggtaatatgatcagtggaaaaggaacgttcttggatgcctgggaggccatggaggagctggtggacgaggggctggtgaaagcccttggggtctcaaatttcaaccacttccagatcgagaggctcttgaacaaacctggactgaaatataaaccagtgactaaccaggttgagtgtcacccatacctcacgcaggagaaactgatccagtacctgcccgggcggccgctcgaccaccgcggtggagctccaattcgccc

SEQ ID NO: 12882 - DNA, 400 bp, Homo sapiens
  misc_feature 400: n = A,T,C or G
actttctttttcttccctctttcttcttctctagccccctccccatcacctactccatctgctccccagcttcctctttaattattggataactaagtagagaaggaggccaggagaatgtggaaatgtgaaacttccctaagcctccaccttattcgctttccaccagtctttaactttacccaatggactctctgacctcagggaacttttgtaggcttttgagtgattttaacttttccctgttttactgtggaatgctctatcctgtggtcttcggaattatttcccatgttattgtatattatgctatttaggtagaaaacttcatagaatgcaccttagttttatcattgctttgtacattagtatccattacaaagtgataataatgaatgan

SEQ ID NO: 12883 - DNA, 423 bp, Homo sapiens
  misc_feature 1, 2, 3, 4, 5, 6, 7, 8, 9, 10, 423: n = A,T,C or G
nnnnnnnnnngggtgttttaagaagggggttttagcacatctctgccgacaggaattattgttttaatgtcaaaaacatctattctaatataatggtgaatttataaatttctccttgtagttgttatgtaggtttatgtatgttgaacctgtattatctggtataagtaacagaattctagtatcttcctggtaaactaaaccttttattgttatatgatgtggtagagactgcaggtggctttcccagaatcaccactccctcagtaaagtccagttttattctgggcagcctaattaccttgcagcaaagggctaatgaagttactaggtagaacttcttgtgaaaccactttaaggtcatgtatgttggctcatgcctgtaatcccaacacttttggggggccgaggccagaggatcan

SEQ ID NO: 12884 - DNA, 590 bp, Homo sapiens
  misc_feature 589, 590: n = A,T,C or G
ggttttgatgtatgtacagtcctattttaaacatgacacttccctcccttgccccaatcatttaaaatctacattgcttaccaatgttcatttctgatttttgttacagtctttcattggtttttaacttgacatgctagtttccaagatgtaatcttacacatttgactgttttgtcactggtccaacatacctggtgaaggaataaatccattaggtaggattagttgggttttttggttgggtttctttttttttaatagaaagctttggttaaaaaaaaaaaaaaagaacagggtattttaaaattttgtgtttgaaattaaataacagttttccaggcatatgtttaaattactgagatgagtacttttgaggagactactatcttaactgaaaattttaattttaatgtgattttgggttgccgccttaaaatctgcatgttttcaaatttgaaataaaaccaactggagtgagaggtcttgactaattgtgatttaaactttgcaagtagtttgacaaatttcagatcctaaggaaatatttgtaaataagatatatgctttttttaaaaaaaattaagacnn

SEQ ID NO: 12885 - DNA, 414 bp, Homo sapiens
  misc_feature 1, 2, 3, 275, 414: n = A,T,C or G
nnngtgctgctggtctgacagaaggacctccttacacactagcaaaaaactgtctgccttgatagctttaggactgaactatgggggagggggagacacctaatcatttttagagaaaacagtagctttaatgaaaaagtggaaaactatagcttttccaccaaatatcacacatatttattttatatcacttcccaaatcttgtttacatgtctattggtctgctagagctaccatacaaaattaccacagactgggtggtttaaacaacatanacatattttctcacagttctggaagctagaggtcagaaatcaatgtttcatcaggtttgatttcttacaacaccttcctccctagcttgtaggttgccatcttctgtgtcctcatgtggccttttctttgtgtgtaccn

SEQ ID NO: 12886 - DNA, 504 bp, Homo sapiens
  misc_feature 479, 480, 481, 482, 483, 484, 485, 486, 487, 488, 489, 490,491, 492, 493, 494, 495, 496, 497, 498, 499, 500, 501, 502,503, 504: n = A,T,C or G
acttatgaagcccatctaagtaagatcatttcttctaattcaattttctaaaatcatttgtgttttagaaatctcatgattcccaggaaaaaaattttaaattgtgatacaggtttgacagccttttagtcaaataagttaaaacacacacgcaaactcatttactcactttgccattataattcaatcacaaagaaattttggccaggcgtggtggcttacgcctgtaatcccagcactttgggaggccgaggcaggtggatcacgaggtcaggggatcaagatcatcctggctaacatgtgaaaccccgtctctattaaaaataaaaaattagcctggtgtggtggcgggtgcctgtagtcccagctactcgggaggctgaggcagcagaatggcgtgaactcaggaggcggagctcgcagtgagccgagatcgcgccactgcactccagcctggatgacagagcgagactccgtcnnnnnnnnnnnnnnnnnnnnnnnnnn

SEQ ID NO: 12887 - DNA, 1797 bp, Homo sapiens
caaacggcagtgagggaatctaagtggtcaaattcctagaaatacttgtcctcagcaccactaggtggcagtagttggttgaggctgtgaatgatcggtaacataatcactagtagtgaagccatcacagatgctagcaatgacttaggagtctcccacagctggtcagacaggcattctgtgaagcagatggccagtggacagtgtgagcctatcagacttgaattaattgaggaaataaatgagcggaatgaagtatacagacctttgcttggtaaaagaataatttggagaggggactagcatcttaccacctggagtaaaaaatggtatcataaaagatctattcaagcaatattccaaaagccttctgaattctttctagtgctccttttgtatatcattgatagagaattcatctcatgttttcttagctaaagaagcacacaaaccccctgtgtttattgagaagctccaaaacacaggagttgctgatgggtacccagtgcggctggaatgtcgtttattgggagtgccaccacctcagatattttggaagaaagaaagtgaatcactcactcacagcactgaccgagtgaggtaagactgcacaatgagaacctgatccttaactgttcagtcctaatgatgtatcaaaagatacattttatatagcatggaaatctatgtgtaaaagccacatagatgttttgatttttgatgaaatcaatcaaagacaaaaaccatgcgttacccaatgtaggattaagcttttagaaggaagctatgggtgtttgatctaatggtgatttcttaaaagtgtttatcattctatctaaaagaaaagatgaattcatttgctttagtgataaaagactattcagtggtttttgtaaaggcagatcctcaactaggaattaagcacacagatgtattcaactcttgacgtctgttctttctcccattaactttaatggagctagtaatctctacagaataagtatgaccctattatcagctacttgcacaattctgtttctaatgatctaattaaaaatgatgcttcatgtccaaagccacttttaaaaaatttagaaccctaatgactttatccttttctccagcatgcaccaggacaaccacggctacatctgcctgctcattcagggagccacaaaagaagatgctgggtggtatactgtgtcagccaagaatgaagcagggattgtgtcctgtactgccaggctggacgtttacacccagtggcatcagcagtcacagagcaccaagccaaaaaaagtacggccctcagccagtcgctatgcagcactttcggaccagggactagacatcaaagcagcgttccaacctgaggccaacccatctcacctgacactgaatactgccttggtagaaagtgaggacctgtaatccagcattcttgttaaagctgaaacactgaaacagccattgccttgaccaacatattcctttgtcacattatgtaaaaggcagaaacatacctttgactataagaaattaaaaaaaaacaccaaaataatatttttcttacttgatataccaaacttagtttaagtagataatgctaatacaaatatacacattgcacagaaaatacacatttactgtccaatttaaaactttggaattgctgtgattaaagtgatcaaaatgccaaaatactaaaggaaatcaattgttcacaggtaactacaatttgtattatctacaagtgcctttaaacacaagatataggtgctgtgtagcctgatagtg

SEQ ID NO: 12888 - DNA, 471 bp, Homo sapiens
  misc_feature 470, 471: n = A,T,C or G
actttttttttcttttttttttttttcctgctgagttgtatagtagaaaattcacattccagttttggagtttagctcataattgctgccatttttaaacgtcaaaatattttatttagctaactatagttgtttatgaaataggatccattttttaaatgcaaagaaactcagctcattaaccactaaaaagcgagtccaagggaaagggcctgacacatgaattagcaaatcacaatgtagtaaaacagaaaaagctgtctgttcaaaggtgaaaatcagaatcatgtaatggctatctgttgcttttattttttcagttgttttccaaaacagaaatatttactaatataaattttattttatttttttgagatagggtcttgctctgtcacccaggctggactgcagtggtgtgatcatagctcactgcagcctcgaactcctgggctcaaacaatcttcccgccnn

SEQ ID NO: 12889 - DNA, 1807 bp, Homo sapiens
  misc_feature 1802, 1803, 1804, 1805, 1806, 1807: n = A,T,C or G
cgcgtccggtcatcttcgcgcgccggtgacggaagtgcggtgttgagcgccggcggctcgcgcccacgctgggccgggagtcgaaatgcttcccggtgccgggagtgagcgatgagctggcttctgttcctggcccacagagtcgccttggccgccttgccctgccgccgcggctctcgcgggttcgggatgttctatgccgtgaggaggggccgcaagaccggggtctttctgacctggaatgagtgcagagcacaggtggaccggtttcctgctgccagatttaagaagtttgccacagaggatgaggcctgggcctttgtcaggaaatctgcaagcccggaagtttcagaagggcatgaaaatcaacatggacaagaatcggaggcgaaagccagcaagcgactccgtgagccactggatggagatggacatgaaagcgcagagccgtatgcaaagcacatgaagccgagcgtggagccggcgcctccagttagcagagacacgttttcctacatgggagacttcgtcgtcgtctacactgatggctgctgctccagtaatgggcgtagaaggccgcgagcaggaatcggcgtttactgggggccaggccatcctttaaatgtaggcattagacttcctgggcggcagacaaaccaaagagcggaaattcatgcagcctgcaaagccattgaacaagcaaagactcaaaacatcaataaactggttctgtatacagacagtatgtttacgataaatggtataactaactgggttcaaggttggaagaaaaatgggtggaagacaagtgcagggaaagaggtgatcaacaaagaggactttgtggcactggagaggcttacccaggggatggacattcagtggatgcatgttcctggtcattcgggatttataggcaatgaagaagctgacagattagccagagaaggagctaaacaatcggaagactgagccatgtgactttagtccttgggagaacttgagccagcggctgtcttgctgcctgtacttactggtgtggaaaatagcctgcaggtaggaccattgcagtgatgggcagatgcgtctttcacacggaatcaggcacagtggccttctgtgacatgtgtttataaaaaatggttaagtatataataaattgaacatctttgagattggagaattatgtgagatttccacattatgtttactgggttcaatactgtccttgcttgttttattgcaggcaagcaaggcaaatggcctaaaatgctgtggcttatattttgataagaaatcaaaaaaccattggttaaaagatgcaactcagaagtctggaagtattctgaaagcatccatttaccgtccagttgacaggtttgagtctcctgcttgtataggtgacttgtgcccatgggtacattaaaggaacatgctgcccagggcctgggcggacagctcagtgggcaggatgtgtgctgggtctcagccccatgtgcctgcttgctgggcagttagtatagggcaaagcctgcctgcggcgaccctggctgctaggccattctctaggaacagctgcgactcataaagaccaagaagcataaataaactttcaaaaatttatttggctctttcgttaaaaactgtgcaaaaaaaaaaggcggggtctaaattcccgagggccagttcccgtccagtttgtcaagggccaagggggttaagagcggcggttaaggacggaacgtggcctggaggccccttggggcaggaacacgaaacggatataggtgaaattgattgannnnnn

SEQ ID NO: 12890 - DNA, 444 bp, Homo sapiens
  misc_feature 439, 440, 441, 442, 443, 444: n = A,T,C or G
actttttttttttttttttttttttttttttatggggctctgtcacttaccatcatctgacatactacgtacttgtttaatgttcgtctatccctagctccatgaggaaagagatttgtttgttgtggtactgtatcctcagcacctagaagaggatttggcgaatattaaacgctcgataaatatttgatgactgaatgagtgaatgcatgaatgaacaaagtcataaaactgggcttcaaaagctcatcttgtctagcatcataactagaaagtcataaaaaaaaaaaagttttttccctttctgacagaatagtacagtgagtcgaagccaaaatatcagggattcatgtagttatgggccaaaatgcaacaaggaaagagaatgacatatacatagcccttaagtcactcagagacttatgattggagttttcannnnnn

SEQ ID NO: 12891 - DNA, 544 bp, Homo sapiens
  misc_feature 542, 543, 544: n = A,T,C or G
acttttttttttttttttttttttttttgagattgttctactaggaatttattaatcagaaaagccaatgaagccatatatattttgttaatataaaactcataatttaattttctttttattatttgattaatataaaaaggaaacctaattcaatttataaatattttaattaacagaattatatcccatacaatataaaatctaacatagaattatggctataactatggattatactataatacaagattaatttttaatttatttctttcagagatgaatcttacagtgatgtgtccttctattgacccactacattaccaccatttaacatacattcgtgtggaccaaaataaactaaaagaaccaataagctcatacatcttcttctgcttccctcatatacacactatttattatggtgaacaacgaagcactaatggtcaaacaatacaactaaagacacaagttttcaggagatttccagaagatgatgatgaaagtgaagatcacgatgatcctgacgatgctcatgagannn

SEQ ID NO: 12892 - DNA, 858 bp, Homo sapiens
ttggagctccccgcggtggcggccgaggtacgcggggagactctgccttttcaacatggatggctcctcccgctgccgctgccgctccaggagacagcattacagagcatcagttaggtgcagagactgggcagtgcgcccgtgtgcaaagacaggagacacgaatcttccctgaaggagtgacagtctagggaggaaggcagactgcaggggacctacttctctcgggaatctcaatacttggaacaagaacctcctagacggaccctttggcataatgaattggaccaactgtaggttccaggactagagagccagcaatgcctccatgaacaatctcacccaattactctgctcaggaaacgaggtaactgatggacagccgaggcagccccttaggcggcttaggcctcccctgtggagcatccctgaggcggactccggccagcccgagtgacgcgatccaaagagcactcccgggtaggaaattgccccggtggaatgcctcaccagagcagcgtgtagcagttccctgtggaggattaacacagtggctgaacaccgggaaggaactggcacttggagtccggacatctgaaacttgatctccagcaccctgccggtggcactactgagagacgaggtgccagggtggttcctgaaagtgcctgagccccaacttatcagcaaggagctcatcatgctgacagaagtcatggaggtctggcatggcttagtgatcgcggtggtgtccctcttcctgcaggcctgcttcctcaccgccatcaactacctgctcagcaggcacatggatgacagcgacacaccctcagatagcttggatagctcctgcagttc

SEQ ID NO: 12893 - DNA, 2432 bp, Homo sapiens
  misc_feature 1, 2, 3, 4, 5, 2421, 2422, 2423, 2424, 2425, 2426, 2427,2428, 2429, 2430, 2431, 2432: n = A,T,C or G
nnnnnccccccctcggaagtcttctagaattaattaacgcggggctccttgttttgctttcgatctggactgttctcaggcaagccggggagtaacttttagttttgctcctgcgattattcaactgacgggctttcatttccatttcacacaccctagcaacacttataccttgcggaattgtattggtagcgtgaaaaaagcacactgagagggcaccatgccggtggaaaggatgcgcatgcgcccgtggctggaggagcagataaactccaacacgatcccggggctcaagtggcttaacaaggaaaagaagatttttcagatcccctggatgcatgcggctagacatgggtgggatgtggaaaaagatgcaccactctttagaaactgggcaatccatacaggaaagcatcaaccaggagtagataaacctgatcccaaaacatggaaggcgaatttcagatgcgccatgaattccttgcctgatattgaagaagtcaaggataaaagcataaagaaaggaaataatgccttcagggtctaccgaatgctgcccctatcagaacggccttctaagaaaggaaagaaaccaaagacagaaaaagaagacaaagttaagcacatcaagcaagaaccagttgagtcatctctggggcttagtaatggagtaagtgatctttctcctgagtatgcggtcctgacttcaactataaaaaatgaagtggatagtacggtgaacatcatagttgtaggacagtcccatctggacagcaacattgagaatcaagagattgtcaccaatccgccagacatttgccaagttgtagaggtgaccactgagagcgacgagcagccggtcagcatgagcgagctctaccctctgcagatctcccccgtgtcttcctatgcagaaagcgaaacgactgatagtgtgcccagcgatgaagagagtgccgaggggcggccacactggcggaagaggaatattgaaggcaaacagtacctcagcaacatggggactcgaggctcctacctgctgcccggcatggcgtccttcgtcacttccaacaaaccggacctccaggtcaccatcaaagaggagagcaatccggtgccttacaacagctcctggcccccttttcaagacctccccctttcttcctccatgaccccagcatccagcagcagtcggccagaccgggagacccgggccagcgtcatcaagaaaacatcggatatcacccaggcccgcgtcaagagctgttaagcctctgactctccgcggtggttgttggggcttcttggctttgttttgttgtttgtttgtattttatttttttctctctgacacctattttagacaaatctaagggaaaaagccttgacaatagaacattgattgctgtgtccaactccagtactggagcttctctttaactcaggactccagcccattggtagacgtgtgtttctagagcctgctggatctcccagggctactcactcaagttcaaggaccaacaagggcagtggaggtgctgcattgcctgcggtcaaggccagcaaggtggagtggatgcctcagaacggacgagataatgtgaactagctggaattttttattcttgtgaatatgtacataggcagcactagcgacattgcagtctgcttctgcaccttatcttaaagcacttacagataggccttcttgtgatcttgctctatctcacagcacactcagcacccccttctctgcccattccccagcctctcttcctatcccatcccatcccatcccatcccatcccatcccgctcttttcctacttttccttccctcaaagcttccattccacatccggaggagaagaaggaaatgaatttctctacagatgtcccattttcagactgctttaaaaaaaatccttctaatctgctatgcttgaatgccacgcggtacaaaggaaaaagtatcatggaaatattatgcaaattcccagatttgaagacaaaaatactctaattctaaccagagcaagcttttttattttttatacaggggaatattttattcaaggtaaaattctaaataaaatataattgttttttatcttttctacagcaaatttataattttaagattccttttcttgtttatcagcagttgttattacatccttgtggcacatttttttttttaattttgtaaaggtgaaaaaagcttttatgagctcatgtagcaatcagattttcctgtggattgataataaatgaatatgatatatagttaaattttaaaaaaaaaaaaaaaaaaaaaaaaaaaaaaaaaaaaaaaaaaaaaaaaaaaaaaaaaaaaaaaaaaaaaaaaaaaaaaaaaaaaaatttaaaaaaaaaaaaaattggggcccaatttggggcnnnnnnnnnnnn

SEQ ID NO: 12894 - DNA, 720 bp, Homo sapiens
  misc_feature 1, 2, 3, 716, 717, 718, 719, 720: n = A,T,C or G
nnnccgccggttcgctcagttctagcttcaggttccacgccgcggcctcgctctcctactagagccagcccagcactcgcagcgcgcacacgcacgccccgcgtctcccgcgcccggcgcccgggtctccccacgcgcgcacacctcgcgcacggacgcacccacgtttgtcctcgcgcgccgggggctcggcggcggcggcaggggcagcggcagaagcaggcagaccgcgcggggcagtaccgtagcggccgtcacgggctggccggccggccatggaggctgatggggccggcgagcagatgagaccgctactcacccggggtcctgatgaagaagctgttgtggatcttggcaaaactagctcaactgtgaacaccaagtttgaaaaagaagaactagaaagtcatagagctgtatatattggtgttcacgtcccgtttagtaaagagagtcgtcggcgtcataggcatcgcggacacaaacatcaccaccaaaagaaaaaaaaaaaaaaaaactcagatacaggaagatggaccgggaatctccttcttatgataacaaccattcccaggagagttccagtttaatccctggggtacttgaagcatgatgcatgcacgaacattattcccccaaggatctctttcaccggcacaggcgcattgacctgggttaccagcaggatggagaaagcaattatgcactggcaaccnnnnn

SEQ ID NO: 12895 - DNA, 974 bp, Homo sapiens
accgcggtggcagcggccgcccgggcaggtacttttttttttttttttttttttggtgctggtggtggtggtggtctacattcactgtggaaacccagccagcccctagggggtgctaactctgatggcatcctaaattttagctggtgatttctttccaacgactgggccttccagaccacagaccacatcaaagcttagagaagcttatctggaagatatgaaatcacaggtagaaaaaagcaaagcatggacagtgatctttatatgcatccctacacacacacatatacatatgtatacacatgtataaatacacatatacatatgcacatatgtatatgtgtgtacgcggggaagtcaccaccgtggcctgcgacgaaatggcgaaaagtcttttgaagacagcctctctgtctggaaggacaaaattgctacatcaaacaggattgtcactttatagtacatcccatggattttatgaggaagaagtgaaaaaaacacttcagcagtttcctggtggatccattgaccttcagaaggaagacaatggcattggcattcttactctgaacaatccaagtagaatgaatgccttttcaggtgttatgatgctacaacttctggaaaaagtaattgaattggaaaattggacagaggggaaaggcctcattgtccgtggggcaaaaaatactttctcttcaggatctgatctgaatgctgtgaaatcactaggaactccagaggatggaatggccgtatgcatgttcatgcaaaacaccttaacaagatttatgaggtaaagaagcaaagaggaaaaattcttcttggcctatcaagacttcctttaataagtgttgcgctggttcaaggttgggcattgggtggaggaccagaatttactacagcttggtattatgcccatctctttgtggacgaatctgatcttactctctggagtcattaaatcgcgg

SEQ ID NO: 12896 - DNA, 851 bp, Homo sapiens
aaactcctacagcccctgtctgcctgccttgcaaggaagctcactgcttgccctctccattacatctgctatggagtccaactgagcctcatctgccccttgaacgcacactctttctcctctgggagtctctgaagtgggtaatatcctctgcttataatatgcttccccttaaacctctactctcttcctagctagctttgactcctctgtcacttgtccgctttggcatcacctcctcatagaagacttctatgactcccgagattctcaggagcatggcaggtgaagtgctcctcccatgaatggatggagattaaggagtgtgtgttattcatgcttaattcaccagtgcttagctgagtacctggcataaaatagttactgtggtggccaaagtaataacccccaccgccaccaattgctcatgtcctatgttacacagcacaattacataggaagggggaattaatagtgcagataaaattaatgttgctcatcagctgaccttaaaacaagattatcctggagtatctaggagagcccatgtaattacaagcattctttataactggaagagggaggcagaaggttaagaaccagagacggtgggcacaatggctcatgcctgtaataccaatactttgggaggccagggtaggaaaatcccttgagtgcaggagttcaaggccagccgtggcaacatactgaggtcccatctctgaataacatgttgcccagtcagtttctcttcctggattcagaagtctttcatggtaggtccagaatgaaaggtgatgtctggtgctcaggtgtgttgagggccccatgcctggactatgggtgctgag

SEQ ID NO: 12897 - DNA, 1335 bp, Homo sapiens
  misc_feature 1, 2, 16, 28, 30, 32, 1335: n = A,T,C or G
nnccgtggcgaaaganccggcggagcangnancccgctcccggagacgccgcctcgcgatccccgcgcgggcgggaccgggcggccggcatcatgaccctgtttcacttcgggaactgcttcgctcttgcctacttcccctacttcatcacctacaagtgcagcggcctgtccgagtacaacgccttctggaaatgcgtccaggctggagtcacctacctctttgtccaactctgcaagatgctgttcttggccactttctttcccacctgggaaggcggcatctatgacttcattggggagttcatgaaggccagcgtggatgtggcagacctgataggtctaaaccttgtcatgtcccggaatgccggcaagggagagtacaagatcatggttgctgccctgggctgggccactgctgagcttattatgtcccggtgcgtacagcagcctggagcccagacccctgagaagggacacctgggttccacgggggtgctggagggcaggggctcaaagcctggtgctgaaggtgtctgagtactggagaatcccatcctttgccttcctcagctgcattcccctatgggtcggagcccggggcattgagtttgactggaagtacatccagatgagcatagactccaacatcagtctggtccattacatcgtcgcgtctgctcaggtctggatgataacacgctatgatctgtaccacaccttccggccagctgtcctcctgctgatgttcctcagtgtctacaaggcctttgttatggagaccttcgtccacctctgctcgctgggcagttgggcagctctactggcccgagcagtggtaacggggctgctggccctcagcactttggccctgtatgtcgccgttgtcaatgtgcactcctaggcttggtgtctcagacattgatgtaccttttccctgcctcgctccaggttttagtgaagtaaacagtatttggaaagttaaaaaaaaaaaaaaaaagaggggcggggcggccctttttttttttttttttttttttttttttttgggggggcgaaaaccccctggttttttttgggaaaatttgtgggccaattccctttgtggggggcccccaagggggtgtgggcggtaaaaaagcgggggggggggagaaaatattgcgcgccccggggccccaaaaggttgtaaagctatttgggggaccaggcttggagtgagccctgtgcctctgtggtccccacatcggggctcaatatgccctcttgtccccctggggaactcttggaagttgttcccaagtggccccacacattctcttaagttgtgtcctcn

SEQ ID NO: 12898 - DNA, 3876 bp, Homo sapiens
tcgacccacgcgtccggagctacggccacggcagggacacgcggaaccaagacttggaaacttgattgttgtggttcttcttgggggttatgaaatttcattaatcttttttttttccggggagaaagtttttggaaagattcttccagatatttcttcattttcttttggaggaccgacttactttttttggtcttctttattactcccctccccccgtgggacccgccggacgcgtggaggagaccgtagctgaagctgattctgtacagcgggacagcgctttctgcccctgggggagcaacccctccctcgcccctgggtcctacggagcctgcactttcaagaggtacagcggcatcctgtgggggcctgggcaccgcaggaagactgcacagaaactttgccattgttggaacgggacgttgctccttccccgagcttccccggacagcgtactttgaggactcgctcagctcaccggggactcccacggctcaccccggacttgcaccttacttccccaacccggccatagccttggcttcccggcgacctcagcgtggtcacaggggcccccctgtgcccagggaaatgtttcaggctttccccggagactacgactccggctcccggtgcagctcctcaccctctgccgagtctcaatatctgtcttcggtggactccttcggcagtccacccaccgccgccgcctcccaggagtgcgccggtctcggggaaatgcccggttccttcgtgcccacggtcaccgcgatcacaaccagccaggacctccagtggcttgtgcaacccaccctcatctcttccatggcccagtcccaggggcagccactggcctcccagcccccggtcgtcgacccctacgacatgccgggaaccagctactccacaccaggcatgagtggctacagcagtggcggagcgagtggcagtggtgggccttccaccagcggaactaccagtgggcctgggcctgcccgcccagcccgagcccggcctaggagaccccgagaggagacgctcaccccagaggaagaggagaagcgaagggtgcgccgggaacgaaataaactagcagcagctaaatgcaggaaccggcggagggagctgaccgaccgactccaggcggagacagatcagttggaggaagaaaaagcagagctggagtcggagatcgccgagctccaaaaggagaaggaacgtctggagtttgtgctggtggcccacaaaccgggctgcaagatcccctacgaagaggggcccgggccgggcccgctggcggaggtgagagatttgccgggctcagcaccggctaaggaagatggcttcagctggctgctgccgcccccgccaccaccgcccctgcccttccagaccagccaagacgcaccccccaacctgacggcttctctctttacacacagtgaagttcaagtcctcggcgaccccttccccgttgttaacccttcgtacacttcttcgtttgtcctcacctgcccggaggtctccgcgttcgccggcgcccaacgcaccagcggcagtgaccagccttccgatcccctgaactcgccctccctcctcgctctgtgaactctttagacacacaaaacaaacaaacacatgggggagagagacttggaagaggaggaggaggaggagaaggaggagagagaggggaagagacaaagtgggtgtgtggcctccctggctcctccgtctgaccctctgcggccactgcgccactgccatcggacaggaggattccttgtgttttgtcctgcctcttgtttctgtgccccggcgaggccggagagctggtgactttggggacagggggtgggaaggggatggacacccccagctgactgttggctctctgacgtcaacccaagctctggggatgggtggggaggggggcgggtgacgcccaccttcgggcagtcctgtgtgaggatgaagggacgggggtgggaggtaggctgtggggtgggctggagtcctctccagagaggctcaacaaggaaaaatgccactccctacccaatgtctcccacacccacccttttttttggggtgcctaggttggtttcccctgcactcccgaccttagcttattgatcccacatttccatggtgtgagatcctctttactctgggcagaagtgagccccccccttaaagggaattcgatgcccccctagaataatctcatccccccacccgacttcttttgaaatgtgaacgtccttccttgactgtctagccactccctcccagaaaaactggctctgattggaatttctggcctcctaaggctccccaccccgaaatcagcccccagccttgtttctgatgacagtgttatcccaagaccctgccccctgccagccgaccctcctggccttcctcgttgggccgctctgatttcaggcagcaggggctgctgtgatgccgtcctgctggagtgatttatactgtgaaatgagttggccagattgtggggtgcagctgggtggggcagcacacctctggggggataatgtccccactcccgaaagcctttcctcggtctcccttccgtccatcccccttcttcctcccctcaacagtgagttagactcaagggggtgacagaaccgagaagggggtgacagtcctccatccacgtggcctctctctctctcctcaggaccctcagccctggcctttttctttaaggtcccccgaccaatccccagcctaggacgccaacttctcccaccccttggcccctcacatcctctccaggaagggagtgaggggctgtgacatttttccggagaagatttcagagctgaggctttggtacccccaaacccccaatatttttggactggcagactcaaggggctggaatctcatgattccatgcccgagtccgcccatccctgaccatggttttggctctcccaccccgccgttccctgcgcttcatctcatgaggatttctttatgaggcaaatttatattttttaatatcggggggtggaccacgccgccctccatccgtgctgcatgaaaaacattccacgtgccccttgtcgcgcgtctcccatcctgatcccagacccattccttagctatttatccctttcctggtttccgaaaggcaattatatctattatgtataagtaaatatattatatatggatgtgtgtgtgtgcgtgcgcgtgagtgtgtgagcgcttctgcagcctcggcctaggtcacgttggccctcaaagcgagccgttgaattggaaactgcttctagaaactctggctcagcctgtctcgggctgacccttttctgatcgtctcggcccctctgattgttcccgatggtctctctccctctgtcttttctcctccgcctgtgtccatctgaccgttttcacttgtctcctttctgactgtccctgccaatgctccagctgtcgtctgactctgggttcgttggggacatgagattttattttttgtgagtgagactgagggatcgtagatttttacaatctgtatctttgacaattctgggtgcgagtgtgagagtgtgagcagggcttgctcctgccaaccacaattcaatgaatccccgacccccctaccccatgctgtacagacaccaaactcagcttgggaagcaatcaacttaatctgcttctttgaaagattaattaaaatggagattaccaatggctgcggaggagctgggtcagccgacagggcccagtcgagatgagcgataaattgttttaaaatcacacaaacacagctgtgggccaaacacagagatggtgcataaaatcagcgtcttcctgggcccctccccgcgt

SEQ ID NO: 12899 - DNA, 2358 bp, Homo sapiens
  misc_feature 1, 2, 2353, 2354, 2355, 2356, 2357, 2358: n = A,T,C or G
nnccggatggcctcggggacggccagtgtgtggaggtgagctccgggattgccggcattcccgcttctgctggttgcttcatgctgcaggctgcggccgtcagccctcgctcgcattggtggcgctgaggtgccggggcagcaagtgacatgtcgtcgggcctccgcgccgctgacttcccccgctggaagcgccacatctcggagcaactgaggcgccgggaccggctgcagagacaggcgttcgaggagatcatcctgcagtataacaaattgctggaaaagtcagatcttcattcagtgttggcccagaaactacaggctgaaaagcatgacgtaccaaacaggcacgagataagtcccggacatgatggcacatggaatgacaatcagctacaagaaatggcccaactgaggattaagcaccaagaggaactgactgaattacacaagaaacgtggggagttagctcaactggtgattgacctgaataaccaaatgcagcggaaggacagggagatgcagatgaatgaagcaaaaattgcagaatgtttgcagactatctctgacctggagacggagtgcctagacctgcgcactaagctttgtgaccttgaaagagccaaccagaccctgaaggatgaatatgatgccctgcagatcacttttactgccttggagggaaaactgaggaaaactacggaagagaaccaggagctggtcaccagatggatggctgagaaagcccaggaagccaatcggcttaatgcagagaatgaaaaagactccaggaggcggcaagcccggctgcagaaagagcttgcagaagcagcaaaggaacctctaccagtcgaacaggatgatgacattgaggtcattgtggatgaaacttctgatcacacagaagagacctctcctgtgcgagccatcagcagagcagccacgagacgctctgtctcttccttcccagtcccccaggacaatgtggatactcatcctggttctggtaaagaagtgagggtaccagctactgccttgtgtgtcttcgatgcacatgatggggaagtcaacgctgtgcagttcagtccaggttcccggttactggccactggaggcatggaccgcagggttaagctttgggaagtatttggagaaaaatgtgagttcaagggttccctatctggcagtaatgcaggaattacaagcattgaatttgatagtgctggatcttacctcttagcagcttcaaatgattttgcaagccgaatctggactgtggatgattatcgattacggcacacactcacgggacacagtgggaaagtgctgtctgctaagttcctgctggacaatgcgcggattgtctcaggaagtcacgaccggactctcaaactctgggatctacgcagcaaagtctgcataaagacagtgtttgcaggatccagttgcaatgatattgtctgcacagagcaatgtgtaatgagtggacattttgacaagaaaattcgtttctgggacattcgatcagagagcatagttcgagagatggagctgttgggaaagattactgccctggacttaaacccagaaaggactgagctcctgagctgctcccgtgatgacttgctaaaagttattgatctccgaacaaatgctatcaagcagacattcagtgcacctgggttcaagtgcggctctgactggaccagagttgtcttcagccctgatggcagttacgtggcggcaggctctgctgagggctctctgtatatctggagtgtgctcacagggaaagtggaaaaggttctttcaaagcagcacagctcatccatcaatgcggtggcgtggtcgccctctggctcgcacgttgtcagtgtggacaaaggatgcaaagctgtgctgtgggcacagtactgacggggctctcagggctgggaggaccccagtgccctcctcagaagaagcacatgggctcctgcagccctgtcctggcaggtgatgtgctgggtatagcatggacctcccagagaagctcaagctatgtggcactgtagctttgccgtgaatgggatttctgaagatttgactgaggtctctcttggcctggaagaataacactgaaaaaacctgacgctgcggtcacttagcagaggctcaggttcttgccttgggaaacactactagctctgaccttccatacctcacttgggggagcacagggcccgctgggcctctcacacggcgtgccaatatgccccataagggggtctcgggttcttctctctccaacgcctgggacctttcaccctgggttttgccggcagctctaatgtggtgaccccaaccccgtgggnnnnnn

SEQ ID NO: 12900 - DNA, 1154 bp, Homo sapiens
  misc_feature 1, 1154: n = A,T,C or G
ncctctagatgctgctcgagcggcgcgggaggatatcgcgaatccccacggtggtctgatcttcctgcggctgaaccgcccggctgagccgacattgccggcgtcttggcgattcggcccgacgagctccgctttcgctacagcatggtggcctactggagacaggctggactcagctacatccgatactcccagatctgtgcaaaagcagtgagagatgcactgaagacagaattcaaagcaaatgctgagaagacttctggcagcaacgtaaaaattgtgaaagtaaagaaggaataatctaccctgactaaagcttgaaatgctacatttccaaggtgaagatgtgtgggcacatgttatggcagattgaaaaggatctcattccatgggaaaaaaaaaaatcctgtcttgttcataaattgacaatgtcaataaattgaaatatggttcaaaaaaaaaaaaaaaaaaaaaaaaaaaacctgcgagagccttcttattgtctgcgggtgggcgcgaaaaaagaggcgttcgctgcgaagatggcgccagcagggcccaatagcgtgttctctcactgtgacccccgatttctcttgttcccaaaggggaacaaattctcggcgcggtctctcccacttatttgcgagaggctctccctttaatctttcgcaattaacccgagggttaaccgcggcccttaaggaaccccgggccagaaggcacacaccaggagacacgacgcaccgccagaggagggaagacagggggacctagaagcaaggagagagcaacgacagaaagggccgcacgccgcgagacaacccccacgaagccgaccgggcagcgaacgacgaaacgcgaggacagcatgcggaaacagccgacaacaacaacaaaccgcagattccaacaagaccggaggggtagatgaagtagagcgaagccctcgcgggaagcgaccgacgcaaacacgacaaagacccgagcggcgcaccaacgcggggacgccaagaggaccaggcggaggcccatccccaagcacaaacagaccacaacagccacaaccggagtgacccccagggccgcacggacgcacacgcggcacaggaggggaaaggcacggaagcagaagccggcaccacgaaaagacn

SEQ ID NO: 12901 - DNA, 520 bp, Homo sapiens
  misc_feature 518, 519, 520: n = A,T,C or G
accccggcctgggcgataagaccaagactccgtttcaaaaaaaaaaaaaaaactaatacaaaacaagagtttgacatttcacccaagattttgcagcatctgctctctatgtatttgtctcagatttttgacagtcgcttcgtgattttgacatttcacccaggatattgcaacatctgctctctttctatgtatttgtctcggatttttgacaatcacttcgtgattttgaacatgacgttccacgcagtttggctcattctctactgccactgtttcagcagcttgcgtttagaagtgcatccaaatactctctgggtgtgggtgatctcagggccagacacctggcgtcatcttaagtggatggagacactactccaggagtcctgtagcaccagataaatagttgacaaatatttgacactgaacatgctctgtgccacccagtgaatccccatggccatgtaaacctgaagcagaaagagcttttcttcctgtgttcctctccgtgtgcaaannn

SEQ ID NO: 12902 - DNA, 202 bp, Homo sapiens
cgggcaggtacctggggacctctttatccacagaggtccacatatcaaccactcattacattattgcttaatgaaagcttgtggatttttttcttctagaaactgcatgttttcctcttccaagaagtgcttgtgatcactcgagccgtcacccacaatgagcagctttgctaccagctgtacctcggccgccaccgcggtg

SEQ ID NO: 12903 - DNA, 463 bp, Homo sapiens
  misc_feature 463: n = A,T,C or G
agcatctccctgagatgctggcattccttgggccgatcccacagcagctgcagtggtgtgctggtgagagaagattgtgtggatttctttccagctttgtattcagcgacaacctgtttgtggtttgtaagccgctcatcgtggaagtatttacacaacggcaagcactaggactcaggcccccccacctttctctgctggtgctccttggagaggcaccccgtggcggtgcagttttggggctgcagccttcttctttagagaaggggcaggtgccactgctctctgagggaagggccttgagagaatagcagctgacagttcttccctccctactttctcaagaaccccagtttctaactctacccttccctttggtgtctcctcaggatgtgggctctcttgatgagaagatgaagagcttggatgtgaatcaggactcggagctcaagttcaatgagtn

SEQ ID NO: 12904 - DNA, 861 bp, Homo sapiens
  misc_feature 1, 2, 3, 4, 5, 6, 7, 8, 9, 10, 11, 12, 13, 14, 15, 16, 17,861: n = A,T,C or G
nnnnnnnnnnnnnnnnnccgatgtacatatccacagcctgtcagttgcaccctccctgacaccaccaccgggacctgcacagactgggagttcatttccttgctcactggggcctgccttccccaggctggtgtcttctgatagccaaactgaggggtgggaggtattttgaaatgcagatttaattattcatgtgtggtgaggccaacagatcaggagataactgccactgaaatgatagtttgttacacacagttcccaatgggaggggacatgccacacacggtgggggtcacacagggaagcaccaaggtcagctgggaggtagagggagccagggagaaaagtgggcaagagcctttattgttttccatgggagggaacggacaaggatttgagtaagtaggtttaggattggctatttggaataacttcagcgagatctggagcacagaggctgtcctgagttatctggtatgtgtcctggattgattagggcaggagacaggggcccagagtgtgagagcccaaaaaaggaggtggggtatgggctttggagcagttgtttgtgggtgaaaggcgtgttcccagcagcaggccaggcttttgctgtctccgggaattagctagcctttcagggtcagtgaggccctaagatgtcaaagcttcaaaatgcagaataaaaagacatgatcagtaaagaagcgaacaaggagcaggcaggtgagcatcacagcctccagcagaggcagccagagtctgcccagcccggcaggatgctgaagctggggaagacagacttctcttacccctgctgcaggtgcgggcaggcgggcgactgagctttccaccggacgcgtn

SEQ ID NO: 12905 - DNA, 1864 bp, Homo sapiens
  misc_feature 1863, 1864: n = A,T,C or G
gggtgtcggggcgccgcggcggaaatcgcgcggatgccagaacgcgctctcagcttcgggtcctgcggctgcggctgccgccatcatggtgcggaagcttaagttccacgagcagaagctgctgaagcaggtggacttcctgaactgggaggtcaccgaccacaacctgcacgagctgcgcgtgctgcggcgttaccggctgcagcggcgggaggactacacgcgctacaaccagctgagccgtgccgtgcgtgagctggcgcggcgcctgcgcgacctgcccgaacgcgaccagttccgcgtgcgcgcttcggccgcgctgctggacaagctgtatgctctcggcttggtgcccacgcgcggttcgctggagctctgcgacttcgtcacggcctcgtccttctgccgccgccgcctccccaccgtgctcctcaagctgcgcatggcgcagcaccttcaggctgccgtggcctttgtggagcaagggcacgtacgcgtgggccctgacgtggttaccgaccccgccttccttgtcacgcgcagcatggaggactttgtcacttgggtggactcgtccaagatcaagcggcacgtgctagagtacaatgaggagcgcgatgacttcgatctggaagcctagcggatctcccactttgcatggctgtcttttacagatgggaaaactgaggcctgatgctggagattctatgagggtgctctcctcaagggtatcagacggtcgtaggttcttaagaatttgattcatcagtggcaggccatgcatagagccacgggaggtgcgtccttgttttccaggaaatgttcttagaacttggactactgattattaattgactgtgccttgggaaacagtgggaagtaacttggtgcagcactggggtattgttggcttcttgtgttggaaactttgtaatgtaaaaggaaaaactggaaatccccacgccctgtttccctttatcgtcttgtggttggactggttcaattcgtttaactcgaattcttgctcctggccgtggttaagctgtgtacagatgatggagagtttggcctcaagtttttataaactgagcgagactagtgttcaggatctcctcccttgtttaaatgtcaataaatgccccaactgctttgtaagtgcaacaaaaaacaaccccaacacagaaaaaaaaaaacacaaacaccacgagacgaagcacaacaccaacgacacgacgacgcgggcaccacaacacaccaccaaccagagacaaagcgacagcaaaccacgacggcgcaatcccagcgagggccgaaccgcgacgagccaacgccgagcagggccacagcagctaagacacagcacgaacaagacggaggaacagaacgacggaggagaaactaaagaggcagagagccccaccacaagccgagacagcgcatcagtgtgaaagcgacgatgcaccgcgccgagggacgcgactcaacgctgaccccataaactagccgcgcggagagcggagatggaaagcaagcgggtgaacacaagatgaacgaagagcggagggcgcacgtcccacacacacagggagactaaactggatggagaggaaagaaggaccatgaaaaggaatgtgtgatagggagagaggacaagacaagatggaagggcgcgacgctgcacggaggtcagagaggaaagaacatcagagcggtccaccacgaccgcgcgggcggcacgggagccgaccaccacgctgacacgccccgaacggcgctcgcgcgcccagagcgcagcaaggcagcagtggcgtaagcgaggctgagaaggcgaacaatagagggaaagggagaggagggtgaaann

SEQ ID NO: 12906 - DNA, 701 bp, Homo sapiens
  misc_feature 698, 699, 700, 701: n = A,T,C or G
actttgttttcatctttcaggttataaaacttttcagtttctacgggataaattaaaatagtcaatgaatattggctgcattgcttttctattttaactgcatttgctcattgtaattgctaaatagtaaaatttatccccactttctttaggcttcaacttttgtttatataatcagtttttcttttatactgttacaaaatgcctttcaagcttctcttatattttcaaaagctatgaaacccatcaaaattataaggacttaaatttatgtaatttttttatttttggatacttaaattttctattaatttgctataagtcattgaaatgttataaataattttctcatatctactctttgttcattttatttcagcctttagaaataagagggccatatgacgtggcaaatctaggcttgctgtttgggctctctgaaagtgacgccaaggctgcggtgtccaccaactgccgagcagcgcttctccatggagaaactagaaaaactgcttttggaattatctctacagtgaagaaacctcggccatcagaaggagatgaagattgtcttccagcttccaagaaagccaagtgtgagggctgaaaagaatgccccagtctctgtcagcactcccttcttcccttttatagttcatcagccacaacaaaaataaaacctttgtgtgatttactgnnnn

SEQ ID NO: 12907 - DNA, 534 bp, Homo sapiens
  misc_feature 526, 527, 528, 529, 530, 531, 532, 533, 534: n = A,T,C or G
acgcggggtccacagcggcttccttgatccttgccacccgcgactgaacaccgacagcagcagcctcaccatgaagttgctgatggtcctcatgctggcggccctctcccagcactgctacgcaggctctggctgccccttattggagaatgtgatttccaagacaatcaatctcgagcggccgcccgggcaggtactgagctccacaaacgtggccatggttggtgcggaaatgattctgagtgagcaggtagaagtctcacgtcctgctgtgtccagagttggttccttccagagggctcgtggtctcgctggcttcaagaatgaagtcgtggaccttcacagtgtgtgttacagctgttaaagatgttgtgtctggagtttgttccttcagatgtgtctggagtttctcccttctggtgggtttgtggtgtcgctgacttcaagaatgaaaccgcagactgtcgtggtgatcgttgtagctcttaaaggtggtgtggacccaaagagtgagcagcagccagannnnnnnnn

SEQ ID NO: 12908 - DNA, 565 bp, Homo sapiens
  misc_feature 562, 563, 564, 565: n = A,T,C or G
accctttctgcagaaagtataaaaatggccttgctaaggaatttaaatttacattcaagtgctatttctttacagcaccggaaaacaagcatttcaaacaagacctactatacaatgacagtaattaagataatgtgatactggtggaggaataagcacgtagacaaatcgaacataatagagaacccagaaataaacccctacaaatatatacgcaactattttttaacaaagattcaaaagcaattcagtggagaaaaaatgaccttttcaacaaataatggtggagcagttgaacatctacagcaaaaacaaagctcaacttcaacctcacacctgatataaaacatgaataaaaaactatgaaacttttagaaaaataaataaataaaccttagggatctagggccaggcaacatgtttttatacttcacatcaagatccataaaataaaaattaatacattggacaataaattaaaaacctttgcactgcaaaagactgttaaaatcattcaaagttatagagcgagcgggagaaaatccaaccacgtacctgcccnnnn

SEQ ID NO: 12909 - DNA, 1351 bp, Homo sapiens
  misc_feature 1350, 1351: n = A,T,C or G
acccaagcatcatgtgaacactgtgcaaatgctatacagagagtcacggcagcttaaccagatggagaacaaaaacacagcagcgcacaacgaatgagtaagtaaaatccctatgaatcaattcactcaggcataatactctaaatccttaaaaaggggggaaaaaaagaatgtaacagaaatctatttccacaatacacccaagggtaactaatgtaactaactggctaatgacaatacaagattaaaataaacaccaaaacccactatacctggattcatattacttagtcgagcggccgcccgggcaggtacaacgacccaacccaagaatctatcattttgaagccaaagatggccttagaggtgggtgactacaaaatcaatctcaagctcatggataaccagaataaagaccaagtgaccaccttaaaggtcagcgtgtgtgactgtgaaggggccgccggcgtctgtaggaaggcacagcctgtcgaagcaagattgcaaattcctgccattctggggattcttggaggaattcttgctttgctaagagagcggtggtcaaagagcccttactgcccccagaggatgacacccgggacaacgtttattactatgatgaagaaggaggcggagaagaggaccaggactttgacttgagccgctgcacaggggcctggacgctcggcctgaagtgactcgtaacgacgttgcaccaaccctcatgagtgtcccccggtatcttccccgccctgccaatcccgatgaaattggaaattttattgatgaaaatctgaaagcggctgatactgaccccacagccccgccttatgattctctgctcgtgtttgactatgaaggaagcggttccgaagctgctagtctgagctccctgaactcctcagagtcagacaaagaccaggactatgactacttgaacgaatggggcaatcgcttcaagaagctggctgacatgtacggaggcggcgaggacgactaggggactcgagagaggcgggccccagacccatgtgctgggaaatgcagaaatcacgttgctggtggtttttcagctcccttcccttgagatgagtttctggggaaaaaaaagagactggttagtgatgcagttagtatagctttatactctctccactttatagctctaataagtttgtgttagaaaagtttcgacttatttcttaaagcttttttttttttcccatcactctttacatggtggtgatgtccaaaagatacccaaattttaatattccagaatgtgttcaataaaatgcttttatcatatacaaaaaaaaaaaaagggcgcccgctagactagtctann

SEQ ID NO: 12910 - DNA, 571 bp, Homo sapiens
  misc_feature 568, 569, 570, 571: n = A,T,C or G
actgaagggctgcatagcacagtttagaaattaggctttggtgccagacactgcaggttcaaatctcagcacatccattaaactagctacatgacttatttctgtgctgtttcctcatctgtaaaatgagaaaaactgctacttcatgggcttactgtgaagggtaaatgagtaaaaacacaaacaacatactgaacattgatggatctatcctggtaataaaaacaaatgctaatcattattattataattgttaatagtgatattattttaggctttgtataaatttctgaggatataaagtccaacaggccgggcatggtggctctcttttaacttgagggtcgcttttaactactagagctccatttctcctcttaaatgagaaaggatttcatttcttttcttttaaatctcctatttcttcacacagttcaatgtaaagagcaataaatgttttaatgcctaacctggagggaggcgtggtttctgttaatacatactttccttgttccttttcattttccagggtatcaccatcttttacctaagagagtagcatggagcnnnn

SEQ ID NO: 12911 - DNA, 1003 bp, Homo sapiens
acgcggggagcagggaaccgctcatatacccttccacaccgtggaaactttgttcttaccctcttgacgaaaaatcttgctgctgctcactctttgggtccacaccacctttaagagctacaacgatcaccacgacagtctgcggcttcattcttgaagtcagcgacaccacaaacccaccagaagggagaaactccagacacatctgaaggaacaaactccagacacaacatctttaacagctgtaacacacactgtgaaggtccacggctttcattcttgaagccagcgagaccacgaaccctttggaaggaaccaactctggacacagcaggacgtgagacttctacctgctcactcagaatcatttccgcaccaaccatggccacgtttgtggagctcaatacaaaagccaagatgcccattgtgggcctgggcacttggaggtctcttctcggcaaagtgaaagaagcggtgaaggtggccattgatgcagaatatcgccacattgactgtgcctatttctatgagaatcaacatgaggtgggagaagccatccaagagaagatccaagagaaggctgtgatgcgggaggacctgttcatcgtcagcaaggtgtggcccactttctttgagagaccccttgtgaggaaagcctttgagaagaccctcaaggacctgaagctgagctatctggacgtctatcttattcactggccacagggattcaaggtttgagtgactccctttctcagcctctagtttctgagctgttgcaggaattcagggacccccaacagagagactggctgaagccatggcagaagaacataaattgtgaagatttcatggacatttcttaattccccacattaatatttttataatttcttacgcctgtctttactgcaatctctgaacataaattgtgaagatttcatgaacatttatcacttccccaatcagtacctcggccgccaccgcggggagctccaattcgccc

SEQ ID NO: 12912 - DNA, 1042 bp, Homo sapiens
acgcgggggagcagggaaccgctcagatacccttccacaccgtggaaactttgttcttaccctcttgacgaaaaatcttgctgctgctcactctttgggtccacaccacctttaagagctacaacgatcaccacgacagtctgcggcttcattcttgaagtcagcgacaccacaaacccaccagaagggagaaactccagacacatctgaaggaacaaactccagacacaacatctttaacagctgtaacacacactgtgaaggtccacggcttcattcttgaagccagcgagaccacgaaccctctggaaggaaccaactctggacacagcaggacgtgagacttctacccgctcactcagagtcatttccgcaccaaccatggccacgtttgtggagctcaatacaaaagccaagatgcccattgtgggcctgggcacttggaggtctcttctcggcaaagtgaaagaagcggtgaaggtggccattgatgcagaatatcgccacattgactgtgcctatttctatgagaatcaacatggggtgggagaagccatccaagagaagatccaagagaaggctgtgatgcgggaggacctgttcatcgtcagcaaggtgtggcccactttctttgagagaccccttgtgaggaaagcctttgagaagaccctcaaggacctgaagctgagctatctggacgtctatcttattcactggccacagggattcaagactggggatgactttttccccaaagatgataaaggtaatatgatcagtggaaaaggaacgttcttggatgcctgggagaccatggaggagctggtggacgaggggctggtgaaagcccttggggtctcaaatttcaaccacttccagatcgagaggctcttgaacaaacctggactgaaatataaaccagtgactaaccagaactccctaggaacaatgcaaaacagagccggctttccccgtgatgaggattgtttgctgttgcaggttgagtgtcacccatacctcacgcaggagaaactgatccagt

SEQ ID NO: 12913 - DNA, 410 bp, Homo sapiens
  misc_feature 407, 408, 409, 410: n = A,T,C or G
actgttgattacctgctacatccttcaaaatcatctccttttgcttcttgacatgaccactctcctacatctgtcatctgatagtgtctttgctgtagcacccctgcttttttttcttcccccatgccactttaagattatattctaaatgccctctagaggatcagaatctctgggcctaatctctctctctaggctctgtatctaaatgcctgtgatattcccaattcagtgtgtcgggacatctgggacttcacaaactcatccaatttccccgagagtctttttctctcttaaatgttttttttttttttgagacagagtctcactctgtttcccaggctggagtgcagtgacatgatctcggcttactgcaacctccgcctactgggttcaagcaattctcnnnn

SEQ ID NO: 12914 - DNA, 511 bp, Homo sapiens
  misc_feature 511: n = A,T,C or G
actttttttttttttttttttttttggacttgattcaaaatttatttataaaggaccatttcgggcgaacttcccggaacaaagagggactgatccaaggtgaccccgtgttcccacctcttaaaacagaccctgttgcccatgtcaggagaggtgagaaaggtagtacattagtgccccagcaccttttggattcctgagaaaatggacatttgtgtcgtggagtctgtgattttccatctggctttgacttgcttctgctgacttctttggctccacccttgactggaaggatggcctcgtgggacacacagatcagagttatgctaacgaggctgccgagtgccagtttgcctgctggggacaccacactctaaaaatcctgccgggcaaattgtcaaaatccggttcccatccagtcccttgagagtttccctgtaaggtggttcagctttttgaactccaaggacaatgccattcaagagcttgacaaagcagtgggcaaactccn

SEQ ID NO: 12915 - DNA, 1463 bp, Homo sapiens
acgcgggggaaagtgtgtagcacctccaccttctctctctctctccctctccctctcctgccagccaagtgaagacatgcttacttccccttcaccttccttcatgatgttaccattggaatgacatactgcatcctatagttataccatccactctgaaatcaatgtgaatttaacttcagttccatacagaaactttttttccacaggagtttaagcccaagctggagtgcgatggtgcaatcccaactcactgcaacctctgcctcccaggttcaagctattttcctggcttagcctccggagtagctggaattacagatgtgcgcccccatgaccagtaagaaacggttgaactggatgcaatttttatcacagcttgtgtaagactgcctctgtccctcctctcacatgccattggttaaccagcagacagtgtgctcaggggcgttgccagctcatttgctcttatagcctgtgagggaggaagaaacatttgctaaccaggccagtgacagaaatggattcgaaataccagtgtgtgaagctgaatgatggtcacttcatgcctgtcctgggatttggcacctatgcgcctgcagaggttcctaaaagtaaagctctagaggccgtcaaattggcaatagaagccgggttccaccatattgattctgcacatgtttacaataatgaggagcaggttggactggccatccgaagcaagattgcagatggcagtgtgaagagagaagacatattctacacttcaaagctttggagcaattcccatcgaccagagttggtccgaccagccttggaaaggtcactgaaaaatcttcaattggactatgttgacctctatcttattcattttccagtgtctgtaaaggtaggcagcttgtgtgatcaaattaatttcacttttgttctcagcataaatattgttttcatggagatttgaactaagctttttcttaggaggacatagggattttaacatggaagaagagccctaaacataactcctaattcctttctatggaacagaaagcaattttgaatccatacttccgtgattgcatgtctacaagaaaagagagtgcagaatcctcaaagcctctgcctcaaaaacttgaggaaatgacaatcatctccttgaaggcacaaggtcttatttatgattcctgatttcacctcttgggatgttcacagacacagagtttcatgaagctgtggtgtccagaaaacctgctgcacatagggtgcacaatgagtttccatcttcttgcctcttttcaaggggcaagaactcagtccgggaatgtcttaaactacaaaccttcatgggaaaccttgttgcttctgcttcctctcttttcacactggaggttttatttttgcttagccatgaattcttgtgtcattcataacttttgtcttaaggtacctcggccgccaccgcg

SEQ ID NO: 12916 - DNA, 1735 bp, Homo sapiens
  misc_feature 1726, 1727, 1728, 1729, 1730, 1731, 1732, 1733, 1734, 1735: n = A,T,C or G
acgcgggggatttgcaaaaggaaagtgcaaagacagctcctcccttctgaggaaacgaaaccaacagcagtccaagctcagtcagcagaagagataaaagcaaacaggtctgggaggcagttctgttgccactctctctcctgtcaatgatggatctcagaaataccccagccaaatctctggacaagttcattgaagactatctcttgccagacacgtgtttccgcatgcaaatcaaccatgccattgacatcatctgtgggttcctgaaggaaaggtgcttccgaggtagctcctaccctgtgtgtgtgtccaaggtggtaaagggtggctcctcaggcaagggcaccaccctcagaggccgatctgacgctgacctggttgtcttcctcagtcctctcaccacttttcaggatcagttaaatcgccggggagagttcatccaggaaattaggagacagctggaagcctgtcaaagagagagagcattttccgtgaagtttgaggtccaggctccacgctggggcaacccccgtgcgctcagcttcgtactgagttcgctccagctcggggagggggtggagttcgatgtgctgcctgcctttgatgccctgggtcagttgactggcggctataaacctaacccccaaatctatgtcaagctcatcgaggagtgcaccgacctgcagaaagagggcgagttctccacctgcttcacagaactacagagagacttcctgaagcagcgccccaccaagctcaagagcctcatccgcctagtcaagcactggtaccaaaattgtaagaagaagcttgggaagctgccacctcagtatgccctggagctcctgacggtctatgcttgggagcgagggagcatgaaaacacatttcaacacagcccagggatttcggacggtcttggaattagtcataaactaccagcaactctgcatctactggacaaagtattatgactttaaaaaccccattattgaaaagtacctgagaaggcagctcacgaaacccaggcctgtgatcctggacccggcggaccctacaggaaacttgggtggtggagacccaaagggttggaggcagctggcacaagaggctgaggcctggctgaattacccatgctttaagaattgggatgggtccccagtgagctcctggattctgctggctgaaagcaacagtgcagacgatgagaccgacgatcccaggaggtatcagaaatatggttacattggaacacatgagtaccctcatttctctcatagacccagcacactccaggcagcatccaccccacaggcagaagaggactggacctgcaccatcctctgaatgccagtgcatcttgggggaaagggctccagtgttatctggaccagttccttcattttcaggtgggactcttgatccagagaggacaaagctcctcagtgagctggtgtataatccaggacagaacccaggtctcctgactcctggccttctatgccctctatcctatcatagataacattctccacagcctcacttcattccacctattctctgaaaatattccctgagagagaacagagagatttagataagagaatgaaattccagccttgactttcttctgtgcacctgatgggagggtaatgtctaatgtattatcaataacaataaaaataaagcaaataccaaaaaaaaacgcaaaaaaaatacccagnnnnnnnnnn

SEQ ID NO: 12917 - DNA, 1621 bp, Homo sapiens
  misc_feature 1, 1617, 1618, 1619, 1620, 1621: n = A,T,C or G
nccagggccggtctccggcgccgccgctgcgtcctccccggccgcgggcgagccgctgcagagggagcgtcgcgccggggcggagtgcgggcttgcgcggcaagtgcgcgccgaggtcacgaaatggattggagtgaaccggagaccccgaaaacggaagcgcagggagaaggaagaggtgtttgaaaagttttgatttgaagttcctttaaaggctgttggagcttttgcaaatacccagctaatgaaaggcacttaagattgggcccatctgcatcatcacattgaagttttctgtctaaaggaaggttccagctacctgttacccttttgctaaacacagttgcagtgttgcagtgtatttcatgacaaaagtgcactctagttttctgtgaaatgattattttctctgaaatgattcttggtcatgttgagcttctaaatgttaaagagaacatagtgcttttgacctgtggaaatctcatcttggtaccatggtgctgcacagaccatcaggaagaactgaaaagttcaggcaacttgagaaaataaagtcaccaccagcaagaagctgtctaaaataaccggaagattataacccaagcacgtggaggagtgtgctagtgagtagaatgttatgaaagctactagaggtcctccatagatgcatgtgctagtcctaaggagaaggaagaggagaaggattgccacggaggaacacctgaagtttcagttgagcactttgtttggaaagttgtccaaggctggagttgtgagagctgggaaagacctcacaagcttctctaattcaagtccttgtttcacatatgagaatgcagaggccctgagaagttgattcccaggcctgcatgctggcctggaactagagcctgggtctcctcttgctttttccagctgtctgcccaggtagctccccaaggcaggcatggaggcagagctgctttgggttccaggtaaggagagatgtgtccaggtggcctttgttgtattgtggggcacagacactgagggagacagggaaaggtctgggagacacaagatggtaccccagaaggccatcctttgtagactagacacacatccaaagggagggctgtttcctggcttattgaggacttttccatttgggctagaagtaaactgagtcagattttgagagatcagtaattccaaagagcagataaggattctatagtaacacagctgggttcactgcacgggttgatgtcaaattgtgcttttcatgttacattagtggattttacaaggcacagattatttgacatttttgtgatgcttgttatagaccaactgtgacatgacagtattatttaaaaaaaaaaaaagaaatatagggccaggcatgattgctcacgcctatagtttcagcactttgggaggctgaggcgggtggatcgcttgagctcaggagttcaagaccaacctcggcaacatggtgaaaccccgtctctactaaaaatgcaaaaattagccaggtgtggtggtgcatggctgtggtcccagctactcaggaggctgaggtggggggattgcctgagcctgggaggtggaggttgcagttaagccgagattgcnnnnn

SEQ ID NO: 12918 - DNA, 783 bp, Homo sapiens
  misc_feature 782, 783: n = A,T,C or G
gaggtacaggtttgtagccaaaaagcaataggctataccataatagtgcaggtgcgtagaaggcttttacataaaggttttatgacctgtatgatgttcacacaacaacaaaattgcctagtggtgcatttactataacatatcccatccttaagggacacgtgaatgtatatacacacacacacatatacacatattaccaaatggatacatacgtggttacctacagaaaaatttaaactttgaaataatactcttagggaatgttacctttttaaaagatattctttaaatttatatttgctattatgttgccttaccaatattcacatgtaacattgcacatttcactaagggattttttatattagcattttagtcagcacatttgttgtctgtttaccctgtgttatgagttaggtaaaaagagatcttgttcctgctttaaagagatctcagtttagtgacagataagtaaaccaaccaaagagggtgcatgaaccccggtagcctgtgtaggaagaagctttcactctcagtagttaaggtgatgatgggatggaggactgttcaggaaagactggtcagaaaagctcagacttgtctaagtatggaagggtgggaggaatgagttaggtgggaaagggcattcgaaacagagacggcagcgcgtgccaagtgctgaagcagcatagcctggcatgaggaggtacacagtaatttgactcagctggaatgatgggtgcagggggcggatcctcattttcagactcaggtggtgnn

SEQ ID NO: 12919 - DNA, 2313 bp, Homo sapiens
ctcagatgaccctaagaaattgttttaccaaaaacaaagtgatctatttgctttgggaggaactcccttccttttgtttctcttcccttccccccttcccctgcggttgtagagcccgttctgtccggtcgtggttctgtccagccatgatccgggagtcctagcttgctaatggaacacctgagatgttccttatggctcaaggcttgaattgaaggtgggaaccacctgaagcctccgtggggaggccttgcctgaggttaggtgtctggcatgagtgccgccggctgggtgtgatttaggtgaaggacatctgtaaaggagcgtgtcacaacctctgttccttcttcacatctagtggtatcctgaggtgcggcaccactgtcccaacactcccatcatcctagtgggaactaaacttgatcttagggatgataaagacacgatcgagaaactgaaggagaagaagctgactcccatcacctatccgcagggtctagccatggctaaggagattggtatggaatcctgtgtttttcctcctccttgtacctcttttattgtagtgacagagactggagtccagtctgggaaaggagggtgtgtgtctcccactcagggcctggtgtactcttggggaaccagctggcaaggccctctgggtcttaacgtcagcgttggaaggtggaagcagggctgggagccggcagaaggcgcccgggccccaggagctgcctcccgctggtggtgtgatcagaagagagtggggtcgagtgtacattgccgtgtggtcgtgtttcctgtaggtgctgtaaaatacctggagtgctcggcgctcacacagcgaggcctcaagacagtgtttgacgaagcgatccgagcagtcctctgcccgcctcccgtgaagaagaggaagagaaaatgcctgctgttgtaaatgtctcagcccctcgttcttggtcctgtcccttggaacctttgtacgctttgctcaaaaaaaaaaaaaaaaaaaaaaaaaaaaaaaaaaaaaccaccgggggagccttcgcactcaatgccaactttttgttacagattaatttttccataaaaccattttttgaaccaatcagtaattttaaggttttgtttgttctaaatgtaagagttcagactcacattctattaaaatttagccctaaaatgacaagccttcttaaagccttatttttcaaaagcgcccccccccattcttgttcagattaagagttgccaaaataccttctgaactacactgcattgttgtgccgagaacaccgagcactgaactttgcaaagaccttcgtctttgagaagacggtagcttctgcagttaggaggtgcagacacttgctctcctatgtagttctcagatgcgtaaagcagaacagcctcccgaatgaagcgttgccattgaactcaccagtgagttagcagcacgtgttcccgacataacattgtactgtaatggagtgagcgtagcagctcagctctttggatcagtctttgtgatttcatagcgagttttctgaccagcttttgcggagattttgaacagaactgtatttcctctaatgaagaattctgtttagcttgtggtgtgccgggtggggtgtgtgtgatcaaaggacaaagacagtattttgacaaaatacgaagtggagattacactacattgtacaaggaatgaaagtgtcacgggtaaaaactctaaaaggttaatttctgtcaaatgcagtagatgatgaaagaaaggttggtattatcaggaaatgttttcttaagcttttcctttctcttacacctgccatgcctccccaaattgggcatttaattcatctttaaactggttgttctgttagtcgctaacttagtaagtgcttttcttatagaaccccttctgactgagcaatatgcctccttgtattataaaatctttctgataatgcattagaaggtttttttgtcgattagtaaaagtgctttccatgttactttattcagagctaataagtgctttccttagttttctagtaactaggtgtaaaaatcatgtgttgcagctttatagtttttaaaatattttagataattcttaaactatgaaccttcttaacatcactgtcttgccaggttaccgacactgtcacttgaccaatactgaccctctttacctcgcccacgcggacacacgcctcctgtagtcgctttgcctattgatgttcctttgggtctgtgaggttctgtaaactgtgctagtgctgacgatgttctgtacctcggccgccaccgcgg

SEQ ID NO: 12920 - DNA, 594 bp, Homo sapiens
  misc_feature 572, 573, 574, 575, 576, 577, 578, 579, 580, 581, 582, 583,584, 585, 586, 587, 588, 589, 590, 591, 592, 593, 594: n = A,T,C or G
acgcgggaatctcagtcatgtaagaaatgtcacattttatttaattcaaatcctactctggaccctattcttgctttggtgggaaatgtggcctaagtaattattggaggaccctctgcttctttggaatctctgaagtattaggaggccaatctggtatggggaaaatgaaggaggccctctctccttcagttcatcacggctgctgctaacccattcctgtcccagctgatagggtatctgagaagatgggtgattcttctccctccaagccaagcttgacaagactagaagctgtgaggtatctgatctggcctctgtagatgaacaattgagccacaccctgaagttttctcacctccccaatgtattgccatgaggataaggacaggtccctattggtcatgacatcccttgctgcctcacccctgaacagagagagcctaaagtcctagctactttcttgaaaaaaaaaaaagggtggaaaaatacacagagagcaaacaaacacaaattaataactgaataaagagttgaactagcctgggcaacgtagttgagaccctgtctannnnnnnnnnnnnnnnnnnnnnn

SEQ ID NO: 12921 - DNA, 306 bp, Homo sapiens
  misc_feature 1, 2, 3, 4, 5, 6: n = A,T,C or G
nnnnnncaggtactcccggttagcccagtcctggtgaatctcccgctgcaccggatcctcctgtcccgccatggccgccccccgcgtacctgtcctcaaggagctcatagtataatcaggacattcacaaggaaatgtattattcctatttagtccagtgtcatagcataaggatgatgcgaggggaaaacccgagcagtgttgccaagaggaggaaataggccaatgtggtctgggacgcgttggatatacttagacgtcttaataatcagagtaattttcatttacaaagagaggtcggtacct

SEQ ID NO: 12922 - DNA, 1810 bp, Homo sapiens
ccacgcgtccgcggacgcacgaacgcgcacgaacgcacggccgcgcagcatctgtcttgctggaagctttttcctagaggttgagcggtttgcacaatgtcggaaatggctgagttgtccgagctgtatgaagagagcagtgacctgcagatggatgtgatgcctggcgagggtgaccttccgcagatggaggtaggcagcgggagccgggagctatccctgcgtccctcccgcagcggggcccaacagctcgaggaggaaggcccaatggaggaggaggaggcccagccaatggcggcgccagaggggaaacggagccttgctaacgggcccaacgctggggagcagccaggccaggtggcgggcgcagacttcgagagcgaggacgagggcgaggaatttgatgactgggaggacgactacgactatcccgaagaggagcagctcagtggtgccggctacagagtatcagccgctcttgaagaagccgacaagatgtttctgagaacaagagaaccagccctggatggcgggtttcagatgcattatgagaagaccccgtttgatcagttagcttttatcgaagagcttttttcactgatggttgtcaatcgtctgaccgaagaactcggctgtgatgagattattgatagagagtagttagatgctgttaaaagaggaggaaactacttgaggagggacccaactttccgctatcttttgggttcattccaaatagttttgtgccattgaaaaacttgaccttcaaaaaaatttgtttttcagaatagaacacaataggacagtgactgcacagttgtgaaaaaggaagagaatcattaaagaaaaagaaaaaagattttaagaccgttgaaatcaattatcaagaacgtcctaaaacacctatggctttgactttgttattgatccagattattttccttgcattggggaaaatatctttcatatttgtttgctgtaaagatggttttgcaagaataagtcatgaccaagacaaactgccaatacaaaagcccactgatactaattatataatgagaaaaaaatgtatccaactaggacacatatcttttgagttatttggactgaaagcttaagaaaacttggaaaattctattttgtgatctagtcaagccacagttatcaaaggctacattttcagtgtaagataaatggatgagtaaactcaaatatgtatcacgtgtgctttgtatcttaagatgtgtttccaagagcatctgaaattttgtttgtacatgtatcttgatcatttataaagccactgtgatctataaatcaagaaaatccattgtcataaccatttttaaaagtcaaaaattaagacatccttaattaaaaagtttcaaatctagacactaaatgtgtgtgaatgtacaaagaaaacaaaccattgcttatgctgttatatactagagaaattttgttttgcttgctgttttaacttgacagatgaaggactttagttgaacttcatattgtaagaactgttaataaaagttgtcaagtaaaaagcgctatatctaaaaagactttatgaacagttattctatcaacttttaaaggttttaaacctgcccagaaattaccttggtatctgaagtttccctctgtctcctcctctaattaagcttgttatttgtcatgcaccagcattggagataataaaatttcttgttctgtgtaaaaaaaaaaaaaaaattggggggggccgaatttaaatgtggggggcaagaaaaggaatgcaaaggggaggggttcaaacgggggg

SEQ ID NO: 12923 - DNA, 303 bp, Homo sapiens
gcaaggccatcgacctgaccgtgggcccatcggccgacggcaagggcgcgcgcacgatcaccgtggtgcccgtgccgaccgaggatgccctgcgcaaccgcgactggatcgagggcaatatgcgcaaggtcaatgcggccaccaatggcaaggtggcgtacgtgtacgtgcccaatacggcgggcctgggtcacacttacttcaagcgctatttcttcccgcaggcggacaagcaggccatcatcgtcgacgagcgtttcaatggcggcggcagcgtggccgattactacatcgagatcctgc

SEQ ID NO: 12924 - DNA, 1312 bp, Homo sapiens
  misc_feature 1286, 1287, 1288, 1289, 1290, 1291, 1292, 1293, 1294, 1295,1296, 1297, 1298, 1299, 1300, 1301, 1302, 1303, 1304, 1305,1306, 1307, 1308, 1309, 1310, 1311, 1312: n = A,T,C or G
acaccgcttgttaatggcaaccatttcaaaagataagaaaatggaaattaagggaaatctgttcagcaacaaagatcttgaggaattatgcagacatatcaacaacagaaaccaagcagcacagcattctcagaagcagtctactgagctcttccagtgcatgtacgcggggaccacttctctgggacacatgccttctgttttctccagcatgcgcttgcttccagttcctgttcagggccagccctgcaaccctgctcctggttctcgtgcctgcagtggggggccaacaaagctcaggacaacactcggaagatcataataaagaatttggacattcccaaagtcagtacgtccaaatgacgaagtcacgggcagtggtgggaggttcaaaacagaattggaaaggacttgcatgggggtataaaaatatacctcattagcagcatccttctacaaggggtgcattttacttataagtataatggcctgctattgtgaggacaatccaaaaaactttttctactggggactttatacacccaaaggaatttggtgcaatttggcagccgtccgtggatggtaatcgcgggaataaggcatctggcctggaatgatgcttgcttgtaatctcaatcaaaaaacaaccgggtttatactatgtgaacatcctacgggtagaaataagtggacgccctgtttgtgttgggccacacccaaggttgatttcctctaaagaaactggggtggaattctgggtgtggctctataaaataacttttttaaacatgcttctacaacaaaaacacacacaccaacaaacatttgtggggcccggcctcgagaagtttaaaccctcggtgggcgggcccatgagtatagactggccaagtgtcaagagaccgggctagagggggggtcccaaaaaaagcggggagccgcgggcaaccagggtcgggcttgcaaagccgtacacacccgtatcgcgccggacaagctagcaccacaagcgccaaccagagcgagtagcaccaccagaagcgacaagcagacaccagcaaccacgcaccaagtacagaaacgcggcacgaaaagacaggaaagcagaaagagagaaggcaacaaacagccagcgagaagcgaagacacacgcacgaaagaggaaagaaacgaaagcagaacaaaacacagaagagacggcagaacagaaaagaggagcaacaggaaagggacgacagcgagggcagcgaacgagcagaagaaagaaagcgagggcagaaaaagannnnnnnnnnnnnnnnnnnnnnnnnnn

SEQ ID NO: 12925 - DNA, 458 bp, Homo sapiens
  misc_feature 457, 458: n = A,T,C or G
actttttttttttttttttttttttttcttggggtttctttaataatgcctctccaacacagccagtgagaaattccgtgcagagccaattatccagctaattgagaacaaggatactctaatactcttcacctgctccgaagagggtatcatcagatgcctcttgagaagggatttgtccatcaaggatccaggcagaggggagtgtcagccactacccgggaggtggaccaggtggcaggaacaaaatggaaccagtatgatggtaaccagactgcagggacctgcacccaaaccacaggcagtctccatcagtcagcccagagagcaagacccagttatgtggctaagaaaggaaaaaattagtaaaaatggatctaatgaaacttcacagggtgggtgtcaggatttatcaaattaatgcatgggttctcaaccttggcaatcccgcgtaccnn

SEQ ID NO: 12926 - DNA, 806 bp, Homo sapiens
  misc_feature 380, 381, 382, 383, 384, 385, 386, 387, 388, 389, 390, 391,392, 393, 394, 395, 396, 397, 398, 399, 400, 401, 402: n = A,T,C or G
ggctcccatagtacatgttttatgaaggaaactaccagaaatccatgattagagatggaaaatatcagaccaattggaaattttcctttgactctcacctggtctgagcatcttctgtctttttggtacaaaagccaagatgcccattgtgggcctgggcacttggaggtctcttctcggcaaagtgaaagaagcggtgaaggtggccattgatgcataatatcgccacattgactgtgcctatttctatgagaatcaacatgagatgggagaagccatccaagagaagatccaagagaaggctgtgatgcgggaggacctgttcatcgtcagcaaggtgtggcccactttctttgagagaccccttgtgaggaaagccnnnnnnnnnnnnnnnnnnnnnnnactgagcctccacaaacgtggccatggttggtgcggaaatgattctgagtgagcaggtagaagtctcacgtcctgctgtgtccagagttggttccttccagagggttcgtggtctcgctggcttcaagaatgaagccgtggaccttcacagtgtgtgttacagctgttaaagatgttgtgtctggagtttgttccttcagatgtgtctggagtttctcccttctggtgggtttgtggtgtcgctgacttcaagaatgaagccgcagactgtcgtggtgatcgttgtagctcttaaaggtggtgtggacccaaagagtgagcagcagcaagatttttcgtcaagagggtaagtgcaaagtttccccggtgtggaagggtatctgagcggttccctgctcccgcgt

SEQ ID NO: 12927 - DNA, 1941 bp, Homo sapiens
acgcgggggaaagtgtgtagcacctccaccttctctctctctctccccctccctctcctgccagccaagtgaagacatgcttacttccccttcaccttccttcatgatgttaccattggaatgacatactgcatcctatagttataccatccactctgaaatcaatgtgaatttaacttcagttccatacagaaacttcttttccacagatggagtttaagcccaagctggagtgcgatggtgcaatcccaactcactgcaacctctgcctcccaggttcaagctattttcctggcttagcctccggagtagctggaattacagatgtgcgcccccatgaccagtaagaaacggttgaactggatgcaatttttatcacagcttgtgtaagactgcctctgtccctcctctcacatgccattggttaaccagcagacagtgtgctcaggggcgttgtcagctcattgctcttatagcctgtgagggaggaagaaacatttgctaaccaggccagtgacagaaatggattcgaaataccagtgtgtgaagctgaatgatggtcacttcatgcctgtcctgggatttggcacctatgcgcctgcagaggttcctaaaagtaaagctctagaggccgtcaaattggcaatagaagccgggttccaccatattgattctgcacatgtttacaataatgaggagcaggttggactggccatccgaagcaagattgcagatggcagtgtgaagagagaagacatattctacacttcaaagctttggagcaattcccatcgaccagagttggtccgaccagccttggaaaggtcactgaaaaatcttcaattggactatgttgacctctatcttattcattttccagtgtctgtaaagccaggtgaggaagtgatcccaaaagatgaaaatggaaaaatactatttgacacagtggatctctgtgccacatgggaggccatggagaagtgtaaagatgcaggattggccaagtccatcggggtgtccaacttcaaccacaggctgctggagatgatcctcaacaagccagggctcaagtacaagcctgtctgcaaccaggtggaatgtcatccttacttcaaccagagaaaactgctggatttctgcaagtcaaaagacattgttctggttgcctatagtgctctgggatcccatcgagaagaaccatgggtggacccgaactccccggtgctcttggaggacccagtcctttgtgccttggcaaaaaagcacaagcgaaccccagccctgattgccctgcgctaccagctgcagcgtggggttgtggtcctggccaagagctacaatgagcagcgcatcagacagaacgtgcaggtgtttgaattccagttgacttcagaggagatgaaagccatagatggcctaaacagaaatgtgcgatatttgacccttgatatttttgctggcccccctaattatccattttctgatgaatattaacatggagggcattgcatgaggtctgccagaaggccctgcgtgtggatggtgacacagaggatggctctatgctggtgactggacacatcgcctctggttaaatctctcctgcttggcgacttcagtaagctacagctaagcccatcggccggaaaagaaagacaataattttgtttttcattttgaaaaaattaaatgctctctcctaaagatcttcacgttagaaaaaacaagacacgaagaggcaaaaaatttgtgggggggctccgcccctagaaagtttttaaacacacctcttggggccggaggccccggtggttaggagacagggcaaaacgtgttccccaggagaccgggcctagacatggggggggttcccccataaaaaagccgcgggccccgggtttagacaatcaagggctcgggcatgggcttaacgggccggcc

SEQ ID NO: 12928 - DNA, 495 bp, Homo sapiens
  misc_feature 493, 494, 495: n = A,T,C or G
acttttttttttttttttttttttttttaccaacaattattaaagctgtttttatttcccaaagatttctaaagttacatgaactaaaagacattacggttttcattttggtttcaaaatatttgatgtaagtgcttatttttgtttaagccaattaattagtttttaaaaatataaacgttacacacaacacatatgtagctacacagaaagacggaagcagatcaccacaggggttgtaagatttttcattttgccagtttttaagttttttaattggattaccagctttagggtggagcgcttggaagaacagggccagcaaagggttctctggtgcctcctgtttttcccagggagtccaggctgttagagcttgaatatccactttttaattgaactgattttaaccataacactctttaatattaaagtccttccgtgtccggaattggtgggttcttggtctgacttcaaaaatgaaaccgcggannn

SEQ ID NO: 12929 - DNA, 417 bp, Homo sapiens
  misc_feature 1, 2: n = A,T,C or G
nngtgtgccaagaagggttaatgggggtgggggcaattaatgtccgtgtaccccataatataaatgaggacaaatattttaaaaatacagaaggtaaaagatattggggtaatacatgggatatgggggtaatacattacatgggttatgtgttagcagtgcagttgccactaccatactaattaataaatatggccatatggatctttcagttctgaaagtaacaaaaatgtgaaaaatgaaatacttcaacaaaacagagcttattaaaaatagcaatagttaagtttctagtaacagataaagagaataacttaccagaggaaatttcaggaagcaaggagactgtgagaaaaatacatccaggattcaaatagatattccatgatcttccaaatcaaggtaaagtccccgcgt

SEQ ID NO: 12930 - DNA, 1310 bp, Homo sapiens
  misc_feature 1282, 1283, 1284, 1285, 1286, 1287, 1288, 1289, 1290, 1291,1292, 1293, 1294, 1295, 1296, 1297, 1298, 1299, 1300, 1301,1302, 1303, 1304, 1305, 1306, 1307, 1308, 1309, 1310: n = A,T,C or G
actctgtcactggagtcgaagaggtgaatttccagggccatccagagaagctgatcagactcaggaatccatggggtgaagtggagtggtcgggagcctggagcgatgatgcaccagagtggaatcacatagacccccggccggaaggaagaactggacaagaaagttgaggatggagaattctggatgtcactttcagatttcgtgaggcagttctctcggttggagatctgcaacctgtccccggactctctgagtagcgaggaggtgcacaaatggaacctggtcctgttcaacggccactggacccggggctccacagctgggggctgccagaactacccaggctcctcctaggttgaatcagctgaggcagcacctgatgaagaaactcaggaagacagccccacatctctaaggagaaatgaagaaaagcaaatcctgccctctctacttttcacctcctgctccccatgttccctgcctggtttgctgttgatctgttgattgacttagactgtaagcgcatggggcagggccagtcactttcttctcatgacagagctcactgcagggctgtgctcggtgctagggaagcagcattagaataaaaccccacctggatgcagtgctgggtcttgacaagttctctcttctttcatcacccatccaacccaaagctcccggttcaggcagctgtgaccagagtgctgaacagagaggaaggaaaggggtccacatcctgcccttgttgcttgatttagactctgggaagggcatttccctcttatgagcttcagtttcctagtcctccagatggggttcgaccttccaaccttactgggtcactgcaagccttggaacacagagtgtgtagggaagcactttgtaaactgtgtagcattatataaatgggagtattatttttatggcccattctcttcctccagtactgttaaggagtaaacaaaaaatgtatggattgcagtaatgttgcatttgggagaaattaaaatatgctcaccattagcaagctcttagaaaatgtggaggaaatttgcatggatcattttgggagctcagaactgtagggggtgcccaaggtatctggatgcaccaaatcacagtcccatccatgctgccaactagctgtcaggaagacatggatagttcctgccctttggtagtgatggaagtataggcgattacagatttttttttccatctcctatgggatccacagatatccggctttaaaatccataaacttgagccctaaaannnnnnnnnnnnnnnnnnnnnnnnnnnnn

SEQ ID NO: 12931 - DNA, 649 bp, Homo sapiens
  misc_feature 1, 2, 3, 4, 5, 6, 7, 8, 9, 649: n = A,T,C or G
nnnnnnnnngcaggatgcacgtactttattgtgatgtttaatatgtgcacagtgtaacaaaggagatgcaggtggggggagtatgattatatgataaggaacttgaactggaaaacactatataaactctctcctcctgcagaccttaaggcactaggattttgtcatgtgccaggaggaaggggagcaggaaagaccttctccctgcctgtagagatcagagatgcagcatgaacctataggagatgaggccaaagctccaacctcagcttcttcactgtgaaaagagtcaatgtcttgaggatatttattctgtccctggacagggagacaatcaggatgcaatggggagacagggagtcacgctttgtctttttgccctggacttcaaaggccagtgaaactacatctggatttgctattggtttcaagttataggcaaggtcagtgaatcacctgacagtgaatattctctcgctaactcaagatctagggtaatgtgattacgtgcagtccccatagagaggcctaattttcaagaattagcatctcacttttgttaaacacaatcctaaaatacgtcatttactctttctctaatcatgcataaggaatttcagaacaatcaagtacctcggccgccaccgcn

SEQ ID NO: 12932 - DNA, 526 bp, Homo sapiens
  misc_feature 525, 526: n = A,T,C or G
actttttttttttttttttttttttcaaaactagtgactcctgtcactctcttccactctaaaagggcaggatgcaatggcaaaagggcacataattctgtttccttgagtgtctcttagtattaaagtaggctcagtttctaaatattaaaatgacccacaataagagctgcaatgattaagtttgtgacttgttataccaatcaatgtatgacaaacttagaaaaactgtttataatttacaatgacaagagaggaaagaggagcacaggaaacagaaactccaagaataattaaaaagacattgcaagtttccagaaaggaaagccacaagaaattttacacgctggcctaggaatttaatagagacagagttgtctctccttagcagtagaaattataacttaaaactaaaaatggaacttattacagattttaatgtttcaaataagaagaatagagataattttttaaatccaagccataacaattttctatgaaacagtgcaaggcatgtcactcacnn

SEQ ID NO: 12933 - DNA, 455 bp, Homo sapiens
  misc_feature 438, 439, 440, 441, 442, 443, 444, 445, 446, 447, 448, 449,450, 451, 452, 453, 454, 455: n = A,T,C or G
actttttttttttttttttttttttttttttccaaaccaggaatgatctgagtatttgccagcacccaaataatcccaacagactacaatttttttgagtaactgatactatatttaaaagaaattatggcctattttattggcatcaaacttctgaacaaacctcttaataattactaaatgtcctacaaaaattatgttgtatacatgggagtcaaatggatgacatggatgcggaaagcagaaagagactggaaattaacattttaattcagccttccaaaaagtaaaacccaccacttttttccccttcattatttcaaaagcccatggcaatgaaccccaaactgaggcctgagggcggatgcaccagactttatttccaggctctcatgggaattatctattatgggaaaatggatagtttgggaagaggcnnnnnnnnnnnnnnnnnn

SEQ ID NO: 12934 - DNA, 910 bp, Homo sapiens
gcgtccgcagaataaatatggcctgcaatagtacacagagtgacacatgtctgggcaaagacaatcgacttctggaacataacagatcagtgttatcaggtgacgacagtacaggaagtgagccgccactatcacccccagaaaggctccccatcagacgctctgggaccagagacaaaaacagaagaggggaaacatgtttcctactgacgacaggtgattacacgtgtgcttctgatggagggatcaggaaaggatatgaaaaatcccgaagcttaaacaacatagcgggcttggcaggcaatgctctgaggctctctccagtaacatcaccctacaactctccttgtcctctgaggcgctctcgatctcccatcccatctatcttgtaaaccaaacaaccaaactgcatcagtcggctaaattgtattaattcaagtgctgtttaccccataatggaaataattaaatgtagagttactccaggctccattaatacagtataaatcttgcatgatactacaatttgaagtcagaaatgccacttgggtagctaatgaatcttacccaggctttaaagattgtctaaagtagtgctaagatccctcctattaattgccctgatatccttttgcaataaaatgacagatagtgtcagatattgaccagtgcactaatatataaacataccttcagggagatatatttaaaacagtgtgcttccaaatgccaaccacttcattggaactttatttcttgtgactgtaaaccattctgaagatgtctgggatcctatcttgattgcacacgacatgacttgtgtcagctcatttgcatggaccatcttgtctctatcacctgaaagcaatgttgcagagttcggggactgtggatagctcaggatatgtgt

SEQ ID NO: 12935 - DNA, 428 bp, Homo sapiens
  misc_feature 1, 2, 3, 4, 5, 6, 7, 420, 421, 422, 423, 424, 425, 426, 427,428: n = A,T,C or G
nnnnnnntttttttttttttttttttctggatttttagtagagacggggtttcgccgttttagccgggatggtctcgatctcctgacctcgcgatccgcccgcctcggcctcccaaagtgctgggactacaggcgtgagccaccgcgcccggcctataagagttcctaatacaaagtaggcattcaataaatatctgttgaatgaacaaatgaatgaatgaactttctaggtgtaaagggctgcttataacaatcaaaatgttttccttacctaaaaagcgtgattataaatcagcttaatagttagaagacaagttgaattaaaaaggtttatgaaaggaaagttggcaaatgctaatttttaaagatagcaaatttccctatttttcaagaggtagagaaatgttaatttatggatannnnnnnnn

SEQ ID NO: 12936 - DNA, 346 bp, Homo sapiens
  misc_feature 345, 346: n = A,T,C or G
acaccaaacacttatttctacataaataccatgattacactgcaagattctttgaccaaataaagaaagtagaactttgttctgtttttaaaaactagacagactatgaattctcacctgtaagacatgttattattgctgttgacatcatttacagtttttcctggtgatactggtgggttgggtggatgctgggggagaaaaaaaaatcaaggtaaaaataaaactcaacacacagggaatctttaaaaaaaaaattagacctgtagatgcctgtcaatatattatctgtcactggtctaatataatgggaaacattgccagctgagacaataatttgaatcnn

SEQ ID NO: 12937 - DNA, 935 bp, Homo sapiens
  misc_feature 933, 934, 935: n = A,T,C or G
acttttttttttttttttttttaaagttcagttttagttttttaccacttgatggcagtgatggagctagagctctaccctgagaaggttagggcaagaactcattatgaataacaaaagcgtaggtacaaaggaaatccctgacattttaatattattcacatttctaggtgatattacttatattgcaagtgacagtaatagggggaaaagcctctagatggagcttcagtactttctaagggaaaacatttcctgtatctttccaaatgcatattttatattattttacataatatattaaatccagaatggatttttacaaaataatatttaagggtgaatttatttcagatgtaattatggaaattaattcaccaaatttcctaataatttgaaaaaatggctttttaaatatcttacatttttaaatcattattaatatttgttgaaaagtatgttaaactttgagtcaaacatttctatctagtataaatgatttgcatatctaacaagttagtaaaagatatttaataagaagtcaggtgcttaaaatcaatattgcactataattaaatctgaccatctatattattatgcctagtatcattcaacatttgagttcccaagagaacataactattactccaactcaattgcccaactaaaaaaattaaaaactaggaattttaatgtaaaataattttttaaagaatatatatgttctttagtaaatattcttactttcttcagtaatgttttccttttacagtcaagagagtctattatcactatatattgaagggaagttgtcattattagtagaaatatgatgttaatgttcttagtgcactgttgattttagtgtctacttcttgaataataagaaaacttgaaacaagaacaataagttttctgagaatgaccctgtannn

SEQ ID NO: 12938 - DNA, 1614 bp, Homo sapiens
  misc_feature 1613, 1614: n = A,T,C or G
acgcggggagagaagtttccgggactggtgagtagtgggcgatttaaaaacccgcgagtgtagttgtggccttcgcggtaggtgccggttggggccggctgtgattgttatcttggtgctgcagaggacagcagaagaggagattgggtcagaaaactgccctgccgcaccagagcacagcgcactagtgggacaggggtcctgactcagacttaactggctgtgtctcgtggtttttcactgtcctggaaaaggcctgaagtggcactgaaatgaggcatagatgaggtaacgtcgagggagcggtttgcaggttgcaaaggggccctactgatgctgcttaatagtaaacagtgcttactctaggacgggagttgtttccagctttacgtgtaaatctcgcgatattgtggcctgggcactatttccattaaggaggaaactgcacaggataagtcatttacctgctgttgcacagctctggctctaggattcaggctggcttcagagtcggtgctcttaaccgccatactatgttgccttctgttgtcgttgttgactgtggccatgtagcttcgcagtttcctcatctgtaacagtaaataactcaaaacctgcatgatggcccactagggtttcactttcgagcttgccagatgtagaaaatgctggagaatggagcgcctggtgatccgggctctggagaacagagtcggtatctactctcctcatacagcctatgatgctgcgccccagggcgtcaacaactggttggctaaagggcttggagcttgtacctccaggcccatacatccttccaaagctcccaactaccctacagagggaaaccaccgagtagaattcaacgttaactacacccaagacctggacaaagtcatgtctgcagtgaaaggaattgacggtgtttctgtcacttctttttctgctaggactggtaatgaggaacaaacacggattaatctgaattgtactcagaaggctttgatgcaggtggtagattttctttcccggaacaaacaactttatcagaagacggaaattctgtcactggagaagcctttgcttctacatactggaatgggacggttatgcacactggatgaatctgtctccctggcaaccatgattgatcgaataaaaagacacctaaaactatctcatattcgcttagcccttggggtggggagaaccttagagtctcaagtcaaagtcgtggccctgtgtgctggtctgggagcagcgtctgcacggtgttgaggctgactttacctcacaggtgagatgtccatcatgatacttggatgctgcttcccaaggaataaatgtcatcctctgtgaacacagcaacactgaacgaggcttcttactgaccttcgaggatatgctcggttctcacttggggatacgatacatattcctttcgaagactgacaggacctctccaggggatattgcgacacccggtaaccatgctcaatccggggatccactaaattgaccagacaggaacgggcgccgaaaggtcaagctacaaatccgtggagcttcaagtcttcccgtggacggttacaccttacacggttactggagann

SEQ ID NO: 12939 - DNA, 1692 bp, Homo sapiens
  misc_feature 1, 1689, 1690, 1691, 1692: n = A,T,C or G
ngtgtctgggtgatgtgttgtgtatgtgctgtgctgtggtgtttttaccgctgcctggtgtaatggttgctggagtttgagggctgtgggagacattcttttgttggcgggaggcgagatgatggtgctggggttgggcaccatctagtcacgcgttcggtggttggtttgtgttgttgctgcggggcgctttgatattcgttctgtggggtggtgtgtgtcgccccgtttgtgttgtccgtccccccagggtgtggtggggttttcttttcacgaagtagttcctcgtgagagcgttttgttttcccgcgtccggggcgtgttgtttgttaagggcgcggcccgcctcgttgtttatataagacgcgcccccattgggggcccgcccctgttggtcacagaaaaggcggggtgtggctaatttgtgggcgccccccgcggggggttgattttttttgggcgcccgcgcgccccctctctctttttttttttttgttttttttgtttgtttttttgtttgtttgttttgttgtgttttttttttgttttttttttttttttttggttccaagttaacttaacccagcttgaaaaatcagatactgcaccaaatacagtgtttttccgtagtgtttttaatgagtgcacctattactactgtgcgagaattcatgttttaccagtcattgttatattacaaacagacttgcatgattaaccagttgttacacttactttttcaagttggagtatatatgactcagtgcagactggtctctcttatgtgaatgcacacatgcagaaatgcagagtcaattttacatgcccataaagacatttgtaaagaattcagctcttatggtctgttgtataaatgtgtatctaggcactttattataactggaatttgacctcacagatgttacaacttgatcagtcatttgacctaatttgtggtagctatctgtatgttttgcaatcttaatacagacatgctttccaaaaagattaatacagaaccatcctgccgttttggataagtctatccagctgtggaaagggcaacctgtggtttctctgtactggtgtttaatgggggaagaatatgaacagctttaaagagctgtgtattgtggttactactattaaaaaataagatctgcacgagtctgactggcctttgggtggcctttgtggacggctcgtagctggaaagtgttgatctgggttttctggcattcttttaagttaaaaagttaacatcgggacatgggtttgatcttttgttgtacctgatgacagtgcagagattctccacagctggataaaaatgtcacaaagctacttactgtacatgggcagtatcagatttcaaatcctaatatttcagctgtgcttttaatactcaaaatattaggggatggggtgttgaagctttccctttttggcttaacaatttatagaatttacagatgtctgtctttatgtggcctaatttaaagttatggaactaccttgttacagtttaaaaaaacttctgggcacacatattttagagttccctgtactattttagggaggaatttatatatagaacggtagggggtatcaaaatattaaaagtgaaaagagtgggagagtaataggaaaagaaaaaggcaatagagcatagtaaaaggagtacaagannnn

SEQ ID NO: 12940 - DNA, 499 bp, Homo sapiens
  misc_feature 494, 495, 496, 497, 498, 499: n = A,T,C or G
acgcgggtggctggttgtttttacctatacaaatcaaaaggctattttgattgtcttcattttccccttataaattaggttggtgtctttagtcatttaggctaagttttactatctgattcttaacttttctattgtagaatggtgctgtcatgtggactgtcctcccgagtgtcccactggatgttcagagaatttatgtgaaggtcacgtcatttagcattgagatgctgtggttaccttcttccatttcttccataatatgcagccacatctatgtgtgaagaaatgtaatagataaaatttctctggacgcataataatgtgagaaagattgtcacatgtcccagcaaattgttattaatataaatttgttacttggcaagctgagattttgcaagaatgttactcaaaatttcacaatgaaaggaacagggagtcattttatcctgggttcctttttttaaatttcaaacaacttaggaactttgaannnnnn

SEQ ID NO: 12941 - DNA, 293 bp, Homo sapiens
acaagacttctgtgtgctttcctgtgtcaaactgatcagaggatcagtgtgtggaaagtcccaaggtttgggctgggtgggaagtaggaaagcctcataaacactcaaagctgtgaatggaaattcacatagtattctgtgatcagtaggtaaatagtaacacccaggccaggaacgtgaaggtgaagtgaggtgagggaaaggagacagaataccaagagaagcaaaacactttaactaaagggaagcgacagacctcctccctccaggagagggccagcttgagaaatgga

SEQ ID NO: 12942 - DNA, 375 bp, Homo sapiens
  misc_feature 371, 372, 373, 374, 375: n = A,T,C or G
actttttttattcacctcagatgggtcatgtgccgacatcataaggggatttgagggaggcatatcaaacatgtgaacataaaaacccaatcattatgcttatctattacaaaaggatcaagtttaggctcttaaaagctcccaaatcaacttgatcaaaaacaataaaagattactgtttagtttttcaaatatctgagctactaagaaacatattttggcactacatgagttattctatactaattattgtgagcctataaagctcattaaaaatttttaattttcttgcagacctgcaaaatttggttatttgacatcacttcaatcactgacaagcaaggccataaaagatgtgtcattaatgctcnnnnn

SEQ ID NO: 12943 - DNA, 2491 bp, Homo sapiens
  misc_feature 1, 2, 3, 4, 5, 6: n = A,T,C or G
nnnnnngacgctctggccatgggttgtgcaaagaaagctttttatttgagaacacctagatacttttggaaatgttcttgttggatcacaaacaacctaattgacagtctatcgccaacatccacaaacacagcaaacagtccagtcctgcagaccacacagggtacatctagagggttctacttgcatcacccacacttccactcctgtgaaacaactgtcttgggcatgagaagggccaggataggccaggtgaatggcaggctgcccaacaaccccaatcccaaaccaacctcccaggccatgggcccaagtccctgcaggaagatgctaataggtacaacaggtagaacatgtagacacaaacatctagtttattttttctgactgtaaccaaagtcagcaaaagaaacaacaaaacttcagtgccctagaaatcctcctggattcaatgacaacacatcaatggccgggcacagggttggattccttttatgaaatcaccttataatctctcatcatcccaggacagtgccttttgggactgcatgaatctttaatagctacaccacattttctcatcctttaagttatgacagacaggttatctctctccaagagcatcaggttagatgctctttcactcttacaaactgtcaggtggagggagaatcacgacatcgttcataaataactgtggagtctgggatgctggctgaaggcatctccaggaaggactggagggcgattttgctaaagggctgctcactgctcatttcactgcatgccgcttttctcactttggttgggagtttgaaggaccatgtaatcacagagattagagctccctgtgaaatcaatcactgcctttagatctccacaaagacctgttctccaatagcacatgcgtttctctgtgagctgtattcgcatcagcgccggagcctcagaaagaatgcgtgtttacactctgtactctccaatgggtaatatttatcatagaaatctaatacatattcttcagtcttgaatccaaacttctggtacagtagcatagcggggttgcttgctgagacgtgaagggttacgtccttgcccatgcaggtctgaatcagatgatagatcatgaaagttgcaatccctgctcttctccattcagggtggacgaacagaaatgaaatgtaagcttcattgtatttcacatcaggaaccatgaagccaaaggcaatgatgacttttttataaagaacaacaacactgaagtctgggtactgcagacactcagacaggtcaatgccaggccaaaaaaactcctgacacatggagttgatcgttgggatgtgatttggccgcacataacagtaatcgagaggtgcgtcgggctccggcgtccagtgagggtcgctcctgtgcaggtgggaacgaatctgtgacaggagctgcagtttgggtggctttgtttcataatcacgcctgatataaggtttcaagatccgagaggtataagggctgacaatactctggtccacagccatatcttctgatcctaccaagcgatacaaaaacttggtggtctggtgtcgaaatcccttcctggacggcaaggaagtctggtatcggtcaaggattctgaagtcctgacaggtggttctgtacgtggcttgtccagctggaagtctggaaattcctccttctttggctccataaatcccgtcaactaacaaaagagcagcattaacaacttgatccaagtcaaaaagtggtaatcccctatcccttttcgcttgtctgacaatcagtttgcgtttcagtctccgagcttccggagtcatggcaacagcaccgggacaagcttccagcctcttgagcagcagcttttcctcgtagatgctcacgggagtatacctgggctctttcggctttgtgtccttctccagctgaggcttcctcttttctctagcccttgtttgcaaagatgtgtttgaatctgtgtcttcactgtcaatatccatcctgtcgggtttttcctcctcactctctacctcctgctttatctgttcagggcctctgaccttctttctgcccccaaccactggcccagaagctactgacccagcagggggtgggacgtactccatccctgggtctatgactccatcgccttccatctcatcgtcatcatgaaacaaggcttgtgggggcatcacatctggaatcagatctgcttctgaaagcaagctaggtgtggcagaatgagaggcaggtgtaccaggggcagagaaatccagagaaggaggaggagatgggcttgtcagcggggtgcggtcagaggagctcaaggaggaaaagtcaatcacttcgcctttttccagaatcacatctggcctgcggcctcggcttatgaattttacaggggtagaagatgtgctcctgtcaagaaagccagcggcctccttctgggctcttctaatgtcttcggacgcgtgggtcg

SEQ ID NO: 12944 - DNA, 377 bp, Homo sapiens
  misc_feature 369, 370, 371, 372, 373, 374, 375, 376, 377: n = A,T,C or G
acgcggggggtctaaattgaaatggtgacagtgggacctggtgtgggggttgtttgttgtgtaagagacactcagagaaagaatccctgctatctgagaatttcaggagtacaagatattggagcagacgtagagaaagttgcaaagaaagaacaatagaagaccacgaactggtgattgaagtgctatccaactgggggatagaagaagaaaacaaactatactttagaaaaaattatgccaaatatgagttctttaaaaacccaatgtatttttttccagagcatatggtatcttttgcaactgaaaccaatggtgaaatatccccccacacagattttgcagatgtttctgagttcaagcacatannnnnnnnn

SEQ ID NO: 12945 - DNA, 852 bp, Homo sapiens
  misc_feature 1, 849, 850, 851, 852: n = A,T,C or G
naaacccaccagctgaaggccccattgtagaagcattagaccacagcaaaagaggaaacacaacatcccctctagattctacctcaaaagaaatggaggtcatgggttgtaggttttaccacgctgcctccattgcagcccgagctgctagctacatggcctatatgactcaatatcagcgtaaactctgggaagacatggaagatctggttcatgacccagaatttgatcgtggaaaagcaagatgcataatatctgatggtatggatgcaggcctttggcaactttgtactactagggacataatggactctgtagtcagagttatggccatggccatagactatagacggcaggcctggcttcgacttacatctctcactaagaaaacccaggagaagatctcccacttgccctttgatggtacttccctttttggacaagatgtgaaagctgttgttgcagaagacaacaatataaaagaaaatgactataaagatcacaaatactataatcagcatcgatacttttatagtcatgatcagaaagcacattatcacaatagaggatactccaaaggggattggtacaaacctcgaaaccacccctatagatatagaaagaagggagactctccagaacgccatgggtacaagaattaataacctgtttaatgttcagcagagtagtcattcaagatcctaactattttacttgttcctccttgtacaaataggatctacaggtaggagatcatctcaaaaactggatgcatgtctggaatgatcacagctgacatttgaattctagacttttgaaatgaagtatataataaagaaactcatgacnnnn

SEQ ID NO: 12946 - DNA, 479 bp, Homo sapiens
  misc_feature 476, 477, 478, 479: n = A,T,C or G
actgtagtctcaactggtggtgttaatattgctatttgtaaacctgtaatgtgattgaactgtggtcatggcattgtgtttttggaaaaaatatgaaacaaccattgatgcttatcatttggatagatgtttgatttatttgcatgctttaagaaactacagctatattggagcttacaagtttggagctggcaaagagcatgcaaaagaggggatgctattcattatgtcttgtttatttccaaatttgtccccattttgcatttttttccctaaatttgaaaaaatcatatccctttttcatggcaaaagactgataatcacatctaaagtttagggggaaagatctgtattagtaattgtattcactagaagggcttccaactgcctgctactaagtcatataacatatttataaaggaaatatgaaaatggcttaaacatggcttaacatatttctttttggtaaaatatannnn

SEQ ID NO: 12947 - DNA, 285 bp, Homo sapiens
acgcgggtatccaggcgctgatcagcggtattgaagcccagctgggcgatgtgcgagctgatagtgagcggcagaatcaggagtacttgttgttgctttgtttggagggtgtggtggtctccactcccgccttgacggggctgctatctgccttccaggccactgtcacggctcccgggtagaagtcacttatgagacacaccagtgtggccttgttggcttgaagctcctcataggaaggcgggaacagagtgaccgaaggggcagccttgggctgacccagga

SEQ ID NO: 12948 - DNA, 453 bp, Homo sapiens
  misc_feature 1, 2, 3, 4, 5, 6, 453: n = A,T,C or G
nnnnnnatttttttttttttttttttttggtctcaaagacatttatgagtgaaagaagcccgtatcgaaagcttacatgctatatgattccatctgtgtgacattttcaaaaagacaaaagtgtagtcatggagaagagtggttgccaaatgttatatgggggaagggggttactacaaagggataacagaattttttagggtgatgttactgctggaatcctaattgtggagatggttacaggactctacaaatatgttaaaattcacagaactgtgcaccaaaattaagaagtcaaattttctgtatgttaatttaaaaaataaaagaaattttaaaaaggcaattttgccatttaaaatttatagttaacacatttagagaggctatttaaaatttgttgtttgcagcataattccagatataacaacattttaatgagtaccataggcn

SEQ ID NO: 12949 - DNA, 418 bp, Homo sapiens
  misc_feature 1, 417, 418: n = A,T,C or G
ngtacctgagcccagttctcccacctggcatggctctacaaccatgaaaccctgatgccctcacatgcataagaagccctgacaaagtggatgtggatatttctgtcactctgcaaaaagagactcacgatgacctgcaatgtgatgcttctttgggcctgaaactttaaaaaaaaaatacaccacttcaaaccacccaattgctttcaggttgcctgactcacagggcaccttgatgctctggccagggacactgaagactgaatcacctaacttgcctttgcagaaactatttactaatatgtggtttcatttctgactttttccaaccttaagctttatgtgcccctaatccacagcatgtccttgccgcccatgcctttactcccatgcataaaaggaggcgtaggcaaatgnn

SEQ ID NO: 12950 - DNA, 585 bp, Homo sapiens
  misc_feature 582, 583, 584, 585: n = A,T,C or G
acaaatctagctgagaacaaagaatttatattccaaacaggataaaagtatgaaaaatgtctttattacctacctagtattttccttcctccgtttatgacttcttttacatacacgttttatggaattattcaggcaaatgccttctttgggactcctaactctgtgtgcagcatggttgaagaatgggatattcctgttacagatacatcaggcacatcaccaactcccaacgaatcaaatccaattgaatgcttttaaccctaaaattttcaggaaacaaatttatcatctttgctaaattagaagacacaatgggagccatatggtaatggtgaccatatttcccaaattataaatttatggcatagaacctgaggaatgctcatcatggaaacaacaggagtgaaaatttaaatgcaagcagtgtgggcccatatgctctatggctaccatggctgcctgtcccattcaagtgggatgtgttcagaggaagcgctgactctggatggcgccccctcatggaaagcaggagccactgcagctcagagaacctttagcttttccatgttactttgatcnnnn

SEQ ID NO: 12951 - DNA, 505 bp, Homo sapiens
  misc_feature 488, 504, 505: n = A,T,C or G
acaacatctgctgtttcaataggctgcatccattagagctgctgtttcactgtgtgtttgtgcctgagttggaggtggaggggcaaagacagcgtgggccgtgatggccacacacagggcatgcgtgtcatggggactcagaccctggtggagatagtatggtgcaaagcatggcctccgcactaaccctgggtcctcacctggtgcaaggtgggaagctttcctggctcgcagaagatcactaatgtgtccctgtgtaggctcctcctaggttgaatcagctgaggcagcacctgatgaagaaactcaggaagacagccccacatctctaaggagaaatgaagaaaagcaaatcctgctctctctacttttcacctgctgctccccatgttccctgcctggtttgctgttgatctgttgattgacttagactgtaagcgcatggggcagggccagtcactttcttctcatgacagagctcactgcanggctgtgctcggtgcnn

SEQ ID NO: 12952 - DNA, 989 bp, Homo sapiens
  misc_feature 1, 2, 3, 4, 5, 6, 7, 8, 9, 10, 11, 12, 13, 14, 870, 905,920, 944, 950, 955, 964, 972, 983, 985, 986, 987, 988, 989: n = A,T,C or G
nnnnnnnnnnnnnnattcggctcatggttctggagattggaaagtccaagagcctgacattggaatttgctcaacatctggtgagggccttcttgctgcctcaaattgtgatagaagggtggaagggcaaaaagtgcatttcaactcaggtccctcctcttcttataaagccttgggtcccatcatggggtctactccatcaacatatgaatttgaggattaatttttcaacatatgaaacttggggaacatactcaaactatagttgtttctaccattttatcttataacatatttcttgtttaatcattctccaaagccagtcagcagtattcaatgcccgtacataattttactacagatataccatgccttttatcattttcctgctttatatgagaaatagtgtattggtcatcttgtttttataacttaaacatggaaaaatcaattatattagatctttatcttaattgtttttagtgatcagtttcataagatatacttttagttctcattgatttttataatattcctcaaaatagctatttgaattgaagaatgaaaaactttttctcacagaaagtgtatctgatttggctgactggtttgacagtgaagactggccctgccaatgaggttttatgacagatatttttcataaatgagctaaatctgcaactccaaattagtggcaatacatttaaaacaagaaataagatcaaagcattttatcaaaaagcattgttttggcaaacatgtaataaaactaaaaatttgtttgattttcctgccatttctggtgatacgggttttaaaaggtgggcctaagtacaagtgttacagcacaattaacaataatttgatgantcttagtaaagctctcttgggtatacttcccgganttggggaagtaattnttccaattgcgggaggaccaatcncttgcnagtcnggtgctccnagttcacngttttaaaggnannnnn

SEQ ID NO: 12953 - DNA, 603 bp, Homo sapiens
  misc_feature 575, 576, 577, 578, 579, 580, 581, 582, 583, 584, 585, 586,587, 588, 589, 590, 591, 592, 593, 594, 595, 596, 597, 598,599, 600, 601, 602, 603: n = A,T,C or G
acccttcacaatacattggcaaattctgaagctacaaagcacaagagaccagaaagccaagtagaaagctatgaaaaaccatttttaggaagctagtattagagttcaagacccagcagtgaggacaagaggcttttggtgactgtctggggatttcatttggaaagtctggagattggtgccttttaagaagggacaaaactaagggtaagtgaactttggttctaggaatggcaagatcagcaagaagatcaccattgccaactgtagcctttacacaatgtcatagcagcccaaattcagtcagctattgaattaagtttattgtctacttgccaagctaaagaatgtatgaatgctgtctttagaagataacatcatatggaggttctacaacttcttagacacaatgtcaagcttttagtaaaattatactagacattcaagagatgggattgaaaaccaagagaaagggcagacaatagaaatatactcacagatgattcaggcagtggagttaagaccaggacttgaaataacaatgataattgttcaagaaaatagaagacagggannnnnnnnnnnnnnnnnnnnnnnnnnnnn

SEQ ID NO: 12954 - DNA, 420 bp, Homo sapiens
  misc_feature 408, 409, 410, 411, 412, 413, 414, 415, 416, 417, 418, 419,420: n = A,T,C or G
actttggccaccgtccccggaaataaccgcgcctgcctctcaagataccccatcctctccacgccgctgccgctgccgccatgcaaggggaggacgccagatacctcaaaaggtgacgactccccaaggctctgtcctaccctccttgccagggccctgaagatgttcttgggttggctgtgagatgtcactgggcaacgctagtttagcagacgggatgggaagcagggagagaagtcaccgaaaggagagggaaaaggtgaagtggagaaaaaaggagagctctgggggggtttcaaagtcctttgacctgactcggcggaaccctgacagcattgaaagatggtttcttcgctacatcaccttattccaaggggagagggaggtagggcaaggtaaaccgcgtcnnnnnnnnnnnnn

SEQ ID NO: 12955 - DNA, 364 bp, Homo sapiens
  misc_feature 361, 362, 363, 364: n = A,T,C or G
actttaagaaattatagcagttcttcccaccaaagggaagggcaggtaagaccctggttaactgattagtgaaaaggttacgctgcctacacttgaagttttgagttcgtgcctgagaccctgaggcctgcagcattgcagccatagggcaggatttctcagcctcatcactgctgacgttctgggctgaatgagtttttgtcttggggctgtgctgtgcatagcagggtgttgagcagcatcactggcctctacctactacttgtcagtagcaaaccccccatcccttgcagctgtgacagtgtgtctccagatgttgccaggtgtcccctaggggacaaaattgccccttgctgagaannnn

SEQ ID NO: 12956 - DNA, 450 bp, Homo sapiens
  misc_feature 446, 447, 448, 449, 450: n = A,T,C or G
accaaagaatccctgcctcagcaggctctgagagaaagtaacgggccagtctcttccaaaatgaaacaagatacagcaaagggaatatacttaattcagaaaagcagcttggcaagactgaaaggagcctgaagtcaaaactcagagactcccaggtctgatttatccttctctccattggctacatgttcataagctgaatgttccagtcatgggaaatgggcgtgagttcaaaaatgtgctagtgtgactgtaaaatgctttgtcctcatcgttctgattccagagactaaatacttatatggaaatcagcctattaatagcatcttatcgtaaggataaattacagtgccatccatgagcaaaggactggcaattatctagtgactacagccttttagatagggccggagaaataaaggcaactttttacctaactgatatgnnnnn

SEQ ID NO: 12957 - DNA, 1200 bp, Homo sapiens
  misc_feature 1, 1189, 1190, 1191, 1192, 1193, 1194, 1195, 1196, 1197,1198, 1199, 1200: n = A,T,C or G
ngtctgcttcattaattatacatctgcttggcctctgttggtatggccagttagcaacacaatcatctggttggggaagaccgtgctgcactatttccaccaccaagggcccagggacgtttgcactcatttttggatagcagggaacacttacaggatcatgaacaccacattggaatcagaggttcctcagtgctactcaaaacttctctgctgcaattccaactctacctccctgggccctcgttagaatcctttgatcatcctcctccagggattgagatcacatgataaacaatcttggattgggtcaggttaagctatatgcaggtatgataaattcataattttcaaactgcggtatgtgtacctaaggcttttcacggattgcatactcaggacaattttcaggaaattaatttccagatcctctatatacactatactctttccttaaattgatctgctgagaatgagtctttgttcatactgtttcttttcccacagaaaaaagatataggctacccatcccaaatcttaatacattgctcttaatgtgacaccaaaaacctcagatgtagcaaacagaggaaaggtttgatgattaatcataaaaccatagagccttgggcttttgcctcttatacacatgttaaagctgattatgatgttagataacatagaaattgggtgtttggactcacaaatagattttcagaattcagatgtatgataaagtggagtgatggtaacaattttttttttttaacggctttttggttttctcttcctgactcttgtcaaagaatttcttgctcttgagggaaagccatgggagagtgaaacaaagaaaattagtagaaggcactgaatgccaaaaatgtcttcttacatataattataatcaattatttcccattattgtcaatatccttccctaggatgtatcttgactgggaaaaaaagtaacttggaagagctaaagcagtatagatttgccatgctgattattttaaatgtaaccagaatggcttttgggaatgccaaatttttataagatgcagtagacagatagaacccaaggataaaaactttcacatggttctttcagatttgatgtgcattcattaataaagttgtcagaacccattgtatcaaaccataaaaaaaaaaaaaaaaaaaactcgannnnnnnnnnnn

SEQ ID NO: 12958 - DNA, 416 bp, Homo sapiens
acagtttctgagtatgggaacttccctccccaagtggtgggaagttacagttaactacagcttactcaactatcacttccagaggtttagtgtttttaatatgggaaagaggagaaatctcaggtctaatcagggttctgcccatcagcttttcactgaaactttcaactgtgttttgttttttgtttttttttccatctttcagtttctagctgtgtttgccttctccctccgcgttccctcctctttttttgcttttggtctcctttccagcttcatgtctccatgagttcagctgtaccctgcatttgggaacagagagaaaaacaaagaatttgctgaaaaaaaataggccaggtgcggtggctcacacctgtaattccagcattttgggaggctgagatgggtggatcacc

SEQ ID NO: 12959 - DNA, 511 bp, Homo sapiens
acgcggggtcttcacccccatgatcagtttaaagaaaatgtgtaggtcaatatacaaaggaatacattatacttaaattattcacaagattttgattaaaaagtatgtgttataaagaaaatatattacttatattgtttcctaatattataaagtagagaaacaacaatctgataatgattgtgaatcaccaggatttttcactatttaatttatttttatctcttttttagggccctcctggtattcctgggagaaatggtgaccctggtattccaggacaaccagggtcccctggttctcctggcccccctggaatctgtgaatcatgccctactggtcctcagaactattctccccagtatgattcatatgatgtcaagtctggagtagcagtaggaggactcgcaggctatcctggaccagctgtacaccaagcacctatttttataacttagcttcccatggagagaaaatggcttgcgtgcattttatgtatccctaacataca

SEQ ID NO: 12960 - DNA, 424 bp, Homo sapiens
  misc_feature 421, 422, 423, 424: n = A,T,C or G
acgcgggatgaacaagctcaggaaaaatctaagaaggccttaatttctcacctctagctgactttcaggctacataaacaggaattgaatgataaggtagaaatgtgaactccctgactgagtgttgaaggtatgccctacacatccacaaaacccttgagcaaagactaaactaaataagcagagacttaagtggccacacataaaaaagaatacagactgcagaatgtgttcccccaaaaaatcactaagcaaagagcaggagtaacaataaacagcaacaataaatcctgcagaaaaggagattctgatttttagagttgacacataatattatttaagacactcagttttcaacaaaaaattatgaggcatgcaaaaaaaaaaaaaaaaaaagttccttgggcggaaccccccttannnn

SEQ ID NO: 12961 - DNA, 420 bp, Homo sapiens
  misc_feature 1, 2, 3, 4: n = A,T,C or G
nnnngtaaatctttttatctaaaataagctataaatttgattaaggtggaatggggcaaagcaccaataaagaacttttcttaaaaagagatcacttttcattagggttctacttcaaaggaaatgtccacaaaaggttacttggttaaggaagatgaacacccaaggaatgaaaagtaaaaattaaacctagaatttgcagaagaaaacactacagaaaatttttgtgacctggggtttggcaaagatttcttaaatatgacaccagaagcacagtctataatgaacgtattagtttattgggttaatcaaaatgtaaaaacttctgctcttcaaaagacagtattaagagaataaaaagagaaaccacagattgataatctttgtaagccatgtatttgatcaaggacgtgtagaata

SEQ ID NO: 12962 - DNA, 493 bp, Homo sapiens
  misc_feature 1, 2, 3, 4, 5, 6, 473, 474, 475, 476, 477, 478, 479, 480,481, 482, 483, 484, 485, 486, 487, 488, 489, 490, 491, 492,493: n = A,T,C or G
nnnnnnggacactgtctggggacatcactgggtttgtcataatgcaagttcatttttatgtcatatctgtactgtgtactttttgcattttcaaatgactttgactattgccagagtcattatagacctgcctatgatgtaggagtttattgtatctagtggaaaacatacctgtttgtggggcagaagcttctgttccattcatcctgattttagacacagcatttaacttttcaggttcagttccatatgtataaagtagggataatagtgacatcctagtgtattaagaattaaggtgttattatttctgtcactgttacttcaccctaattttgtttccacactcatctctgagcttttttacttcttatgttgttcagtgttttctaaattaccaaaaaaaaaaaaaaaaaatttttccttcccgggggggcctttaaaagggggaaattccccccccttgggggggnnnnnnnnnnnnnnnnnnnnn

SEQ ID NO: 12963 - DNA, 456 bp, Homo sapiens
  misc_feature 453, 454, 455, 456: n = A,T,C or G
accagtcatattggattagggctcataatgtcattttaacttaattgtctgtcaaaaaattctgtcttcaaatacagtcacatttctagggtttaggattttaacatatgaatgcagggggacaattcagtccataatactgtggttatcactttttggtcttaagatgattgctacagctctacaacccacatctattataaaaacaaaaagaagagagaaataaattgagagaggagagttccttgatcactttgcaggacgtgcgacaggggtgttgctcatctgtttggccaccacacattctcaggccctttgcaggacagggagcatgctgacaggcaggtgcagcaacccaggcgagtgccttggggctccagccccaaggtaggatctaagggtgggtgcctgtgactcctgaagcccaaatgggtgtgtgttacagtgtgctcnnnn

SEQ ID NO: 12964 - DNA, 1520 bp, Homo sapiens
  misc_feature 1, 2, 3, 1520: n = A,T,C or G
nnngcgtccccgccccgcgcagccgccgcgctcctgcgctccgaggtccgaggttcccgagatgaaggtctggctgctgcttggtcttctgctggtgcacgaagcgctggaggatgttactggccaacaccttcccaagaacaagcgtccaaaagaaccaggagagaatagaatcaaacctaccaacaagaaggtgaagcccaaaattcctaaaatgaaggacagggactcagccaattcagcaccaaagacgcagtctatcatgatgcaagtgctggataaaggtcgcttccagaaacccgccgctaccctgagtctgctggcggggcaaactgtagagcttcgatgtaaagggagtagaattgggtggagctaccctgcgtatctggacacctttaaggattctcgcctcagcgtcaagcagaatgagcgctacggccagttgactctggtcaactccacctcggcagacacaggtgaattcagctgctgggtgcagctctgcagcggctacatctgcaggaaggacgaggccaaaacgggctccacctacatcttttttacagagaaaggagaactctttgtaccttctcccagctacttcgatgttgtctacttgaacccggacagacaggctgtggttccttgtcgggtgaccgtgctgtcggccaaagtcacgctccacagggaattcccagccaaggagatcccagccaatggaacggacattgtttatgacatgaagcggggctttgtgtatctgcaacctcattccgagcaccagggtgtggtttactgcagggcggaggccgggggcagatctcagatctccgtcaagtaccagctgctctacgtggcggttcccagtggccctccctcaacaaccatcttggcttcttcaaacaaagtgaaaagtggggacgacatcagtgtgctctgcactgtcctgggggagcccgatgtggaggtggagttcacctggatcttcccagggcagaaggatgaaaggcctgtgacgatccaagacacttggaggttgatccacagaggactgggacacaccacgagaatctcccagagtgtcattacagtggaagacttcgagacgattgatgcaggatattacatttgcactgctcagaatcttcaaggacagaccacagtagctaccactgttgagttttcctgacttggaaaaggaaatgtaatgaacttatggaaagcccatttgtgtacacagtcagctttggggttccttttattagtgctttgccagaggctgatgtcaagcaccacaccccaaccccagcgtctcgtgagtccgacccagacatccaaactaaaaggaagtcatccagtctattcacagaagtgttaacttttctaacagaaagcatgattttgattgcttacctacatacgtgttcctagtttttatacatgtgtaaacaattttatataatcaatcatttctattaaatgagcacgtttttgtaaaaaataaaaagtgggataagtgn

SEQ ID NO: 12965 - DNA, 366 bp, Homo sapiens
acttttttttttttttttttttttttttttccattctcacactcaaactttaatttgagcattagagggatatagaaagaaatttgggcttatggccagattaataacttgttcaagaaatctttactgagatagtgccagaggatgctgagaagcagggtgaataagtaaccaaaaaggcagggtttcttcctttttgaagcttccggtctattcaggaatgcagacaagtcagcaggtaatcacggtgtgcacaggtgagatggactgtgataagggaagttcgggcgcctcctgcagtgggtgctccagcatcccagggggcttagatgaagcaaaaatgggggatgtgataggggtggagga

SEQ ID NO: 12966 - DNA, 367 bp, Homo sapiens
  misc_feature 367: n = A,T,C or G
actccagcctgggcgacagagcgagactgtgtcaaaacaacaccacaagctagctgagtagggattcttgggcgaagtggaagacattataagcaaatagggtagtatgggcatggaaacgaactacatgattaaagattagtattatctggcgagggaggaaaagtgccagagcaagtgccgaaactggaaggttacatttagttcaggatatgaagatcatatagggcctgcacggtggctcacacctgtaatcccagcactttgggaagccaaggtgggggaggatcgcttgagctcaggagttggagaccggcctgggcaacatagtgggaccccatatctcaaaaaaaaaaaaaaaaaaaan

SEQ ID NO: 12967 - DNA, 2168 bp, Homo sapiens
  misc_feature 1, 2, 3, 4, 5, 6, 7, 8, 9, 10, 11, 12, 13, 14, 15, 16, 17,18, 19, 20, 21, 752: n = A,T,C or G
nnnnnnnnnnnnnnnnnnnnnactaaaaaagtatatttgtgtttgtatttttttgtagagaccgaactggtctcttcccgagctcaagcaatccatctcccaaagtgagccaccatgcccagcccttaaagagatctttggagattttttatgatgtaggatgaatgctttgcctcaagcagtaagtcccaacacatgacaaggttggacagtttccccatttacttgggaaacacggaagtgagcagtataaagttcacacggagggtctgctttggctttgagctatcttccttaatcctttctgagctgccttctcccgtgtcaaaatattgatcctaaagtgatccaggccttgtatatgcagatgctgcaactcatgaaaatagatgaaacccattattagagcaagtactaattcttaggccaactggcctgttccatcacaccccaccacattctaccttctggggcgtgctcctaccacacctgctagagtgccttttctacctagctgccagacttgcaccaagttaggactcaaatatggcaggtcctacaaatactccagagaaccctgatttacatacctacctgtcaactgagaaaccttgaactcaggctttagtgtgtgaattatcccaagctgctcatcccagttttggataatcccaaactgtcctatgtggataactacctggacaaaggattcctgtgaaggaaaccaatttgaaccttgtttaaaagttgtncccttggtcttcaaactcaaatggtcaaatgaatgcagcagttttgtagaaacattcatgatctccaaaaacagtcattattaaaatcttacaaatcatatttccaaaaaggtttcacaatttttaaaaaggagtctctcatctccctcacatcatgcaacctggcttgtcctttggcctggctacatcatggcagggatctctgaagacactgtgtccaggggctgccagtgacagtccatcagagcgtcatacagctcctcactctgttccatgaactccttgttggcctcagtcacatccagctgtggcatggggtcttccaatgcatcatctccaacttcttcatatgtctgcatggtgctctgggtatagccatactgggggtaactgtagctgtagctgcctgtgttctggtcatagccccactgagcatagtagttctggtactgctgataatactggttgtagctataactgtacatctgactatattccactggctttacacggctcgctttagggattgccacgctcagccgcacaggcttagaccccagtcccactgctccctggcactccgtcagggctcgcttctgttccagttcatctgtgaatttcacaaaaccataacccttagacacgcctgtctggtccaaaaccaccttgcctccccgacaggaggggtagactttgacgaagaattcatacagcatgccatcatccacgtccggggtcaggtcccccacaaagagggaatactcagggctgttatctggttgtttcccgtaagtggcatagttcagtttaaaacgtttcgcaggtgtggctcctggaaggggtttcccattaattttatgcaaacacttctcagctgtggccaaatctgcaaattctacaaagcagtagccagctgggatcccagtgaggcggtttcggataattttgacgctcattacggtctcccccatggtggcaaaggctctggagatgaagttctcatccatgtagggttccaggtcgcccatccacaggctggccgccatacccgcgcaccggggtggggctttgcgggcggggctctgcgggcggggctcgaaggcccgcgcgggcgccaatcctggctgcggagaccgctacagagcatgcgcctccgacggcttctgcgcaggctcccgagcgcagcggcccgggtcgggcagtgtgttcagctccgggtttttcctgcaacccactgggcgctaggcttccggatcgcggtgggcggagttcaggctggaatggggcgggccagataccacctcagcctccctaagtgctgggattacaggtgtgtgggcggcaagccacccagctgctgaggcgagagactgaaggcacaagctgttccagtataataaagaaaatccttaaaat

SEQ ID NO: 12968 - DNA, 2616 bp, Homo sapiens
  misc_feature 1, 2, 3, 4, 5, 6, 7, 8, 9, 10, 11, 12, 13, 14, 15, 16, 17,18, 19, 20, 21, 22, 23, 24, 2589, 2605, 2606, 2607, 2608,2609, 2610, 2611, 2612, 2613, 2614, 2615, 2616: n = A,T,C or G
nnnnnnnnnnnnnnnnnnnnnnnngtacttttattgaaaaggtacatttaaaaaaatacacagacattttaccatttacaggttgcagatatagatgctctaaaagagtccactctattttgttgttctatgataactcttgcccctgatatcacaaacattccagtcttgttgatatcggcttagaaaggggggcatgggagcatgacctgcaatatattcagcgaacagaaagacaaattgttcaattataaatttttttatcttctgtacattattgcattagggagccacaaaattatgtagcatcattacaaatgaaaacaggttaaaaatgaagaagatacttatatagaaatacatggattcattgtcttcttgcagaatgcacaagaggtgcaaaaatgtgcaatttaggaagctctttttctgtttgtatacgtttgcttagcaacacaaaccagtgaggaagctacaaaataagttaaacaaaaatagcaaacaggtagtaattatagctatgttatatggctttctatttcatttaaatatctccaaataaaatgtgaaataaagaaaatacattattttatcttttattctcttacagagaaaattcaaagctactttgcttcctaacatttacacagcaactaaaaatgtttaattcagacaagagatacagatctagtactacacaggatacagcagtacttgggtcgacacagtacacaatccctgtcaacaacagtacaccaaagagagaactttgtgatccgttggtaagatagtatccacaagtaagcacttgtgttcactgttttgtgttccacactagaatccaagtctgtcaggaaaatattccatattgttttaagccagatcatacccatggaaaaatagagaatggttttctttctttttctttctgaccaatacatgctcaagaaatcaaatatctgagatacacaaattgaacgcggtagggtgggggaggaagtagggagataaagcctatgctgctgattcctcaattataggagcagtctctaaaagccctcgtcaatctagtgatgtgtttctctctggaattgggggactgggtggtgggctgcattttgtgggtgaatgggggttactgcaacacaaactgcttaaattgctgaatccttgtggctttctttctcaacttccctactggcctcaaacgtcttggggtttgcagacgttagtacggagcaaagaggatggaggcaggagtggcgcggatgggcccatgcccaggcctcagaagagctggaggaatggctggagcctggaagagcgaggcagagggccggggtgggagtgacagcgctgaggacacggctgccgccgctgcgagaggtgaggacaggaaggctggggccaaaggcttcatcatatctttctggaatgcaagttttgctgctagaatactcgggctccgctggagtttgttgtaagggctgtattttggcttcagtggtttccctgcaactcgatctttatgccttcggctagaaatgtgctgtttgagttgaatttctgaattaacatgaacatcacagatttcacaatgaaatgtcttgttctgtagtcctgaccccttactgccattctgcatctttaatcttgatccaggtctaggataggatttaattggaccagccccattacgagcttcaaccatggtcttgtgtttagatcctgtgttgtgtgcctctagctgtgacagggagttcacagccactttgcatagtgaacaataaagtaattttttggctttttcttcttctgattcaacaacagtaccgggagctccatttgtgctcttggagggagaagtggctgctccaggtggcaggggtgttgtgccagatttgaggagaaatgagccactttcagagcttgatggctgactggaactgctggcttttaacttccctttatcttctgatttgtcagagttgttgcctgtgattggagtgatggagcagctgggattagcctttgcgctgtccttggaaggaaccattttgggtttatttttcgttgcgtctagtgctttgaccttcttggcatgtttacttcctttgtagtgggcctcggcctggctatctgagttaaagcgaagctgacagacattacaagaaataacttgtttcttctttgggggaatggatactccaaatgtatggttaataaccgctttttgcacaggatccattgtgttaaaatttggaaagagcccaacagcagaactactgtccactggaaaagacataaatggtttgatatccagtgaaggctgcatcatcagggtaggtgtgcgcacaagagcaggaagggtagtagtgtggcatgtactgcctggtttccagagagatttctatgcccaagggtctaaacaaacatgaaaccattgagctttgacgtgaactagatggaacattaaaacttgaaatggtgcctatcataaaaatcatgtgacaagagtgcaaatctcccacgtcactcaatttgattacaggctaccagccactattctgtcccccgcgttaattaatnctagaagacttccgannnnnnnnnnnn

SEQ ID NO: 12969 - DNA, 430 bp, Homo sapiens
  misc_feature 1, 2: n = A,T,C or G
nnattaacggggatagtcattgacagcggagatggagtcacccatgttatcccagtggcagaaggttatgtaattggaagctgcatcaaacacatcccgattgcaggtagagatattacgtatttcattcaacagctgctaagggagagggaggtgggaatccctcctgagcagtcactggagaccgcaaaagccattaaggtaaaaacagatgggaaaccggctggtttgggggtgagagagatggtgttctggacacttccccttggtgccgtcatccctgcccctcctttccatcctctccccttcccatgagtgtggggcttgatttgttttaccccttaagtgggctgaagatgtaaagcttaacctcttccaaactagatgctctgaggttccagctgtcactgagaacagcttggtagctggt

SEQ ID NO: 12970 - DNA, 2339 bp, Homo sapiens
  misc_feature 1, 2, 3, 4, 5, 6, 7, 8, 9, 2311, 2312, 2313, 2314, 2315,2316, 2317, 2318, 2319, 2320, 2321, 2322, 2323, 2324, 2325,2326, 2327, 2328, 2329, 2330, 2331, 2332, 2333, 2334, 2335,2336, 2337, 2338, 2339: n = A,T,C or G
nnnnnnnnnatacaatctcctccccttcccttcctgaaaatacatggtatggtggtacatgacagagagcctacagaatggtgaagaaggcacgtctactcctgaggacaaggagagtgggcaggagggggtcgacagtatggcagaggaaggaaccagtgatagtaacactggctcggagagcaacagtgcaacagtggaggagccaccaacagatcccataccagaagatgagaaaaaagaataagtgttgccttgttttgtgtgttctaaatactttttttaatgaaaaaatgttttttggttttaatggtgttacgtggtttgtgtattaattttttttcttgtccatatcacaccaccaaaggcttttggaccatttagcatcatgagcctaatggctcagtcagtcacctttcttaagtgttgtgaagatggctcttttctttggatcttgtttctagccctcaactgctgaaagcctcagaatttagattaattgagaaaacacccacctcttttagagaattatcctttgatgctgcagaatctactcttacaatgccttcctacagctcactggggtgcttaccaaagccatagctttaaaccttcccagtccccatcagtagcttcctgaaagtctcctctcttgtttacttctgcaaagggtagcttcttaaaaacgtgatcatgtatgagtatgtatttgttcacttacccttttttacttttaatcaatgtcagataccaagagttgtgttaagctgagtgtagtgtgtaactaactacacttggatcttactgatccagaaatagtccccatagttagagtagttacttatgaagtggttattaaagtgaacacagcacatatacattatctatactgctttttgttatgattaatactgggtatgttctggtaaatccatccttattgtatagaaaaaaaattacttttttaccaggttttccaaagacagaatagatcacaaagctcaaggaatttaatattcttgtaatggactagataattcaaactgattagcccattccagaagaaaaacagctgggaattaagttaatccacttgaaattgttttacaataatcagaacatccaaacctcaaggctcaggatcccatagaccagagcccacctttttgataaacttagtaaagtcttggagactagaagcaagatagtttgtgacacataagcttcccaaaaactagaatagatttttactgaatagtggtatatctgatggtatatgtttcttaaaggtccaaatgtaataaaaaaaaaagcaaaaaaaaaaaaaaaaaaaaaaaaaaaaacaaaaaaaaaaagagagagggggcggcgccccagcgaaattctatccccgcgggggcgcccccacacccgcgcgccccaccccgactttctcgggcaacacaagggggcccccaaaacaggagaggcgcaaattataaagaaagaagagcaaggaggggcgggaaattaaacacacagcgcgggaccggggagaaaacacgcggaaaacggcggaaaccttggggaagagggaaacaccctacaatacgggggcgagagggacaacacacacgtgggcaaacaaacaaccacacaagaagcatcttacaaagccccacagaggcgacaaaccataccacaaacgttcacagagggatcacaaagcggggcacaaccaacacaacagcgcgccacaaacaacagcagcagcgacgagcgggagagaaaacacacattcaccgccgccccccacacaccggccaaccaccgaaccgcacgcgaaaaaaacccaatactacaaaccaccagcgggcgccaaccacgaaaaccataaacaccaccccccaaccacccacagacacacacaacagacacgacaaaaggaaaagaacacagcaggacaaaacaaaaaagaacacaagacgaaaacgaccggacggcagcagaaaagcacagacgagcagagagagaaaagaagaggagaaaaagacagccaaaaaaaaggaaagcaacggacaaggagcgaggagaaaacaagaggaaggcaacaaagcaacacaacagcgaagcaagacagaaaacccgacacagaaggagagaagaacacgtgcaacgaccacacggacagagacacaacagacagcacaagagcagcagaaacgaacaaccaggcaaacagcggagcagaaccaacaggaccacccaacacacgagaaacacagaaaaaacaaaaacaaaaacacgtaaagaagacaaacaagcaaaggannnnnnnnnnnnnnnnnnnnnnnnnnnnn

SEQ ID NO: 12971 - DNA, 697 bp, Homo sapiens
  misc_feature 1, 2: n = A,T,C or G
nnatggaaagactgtaggctgtcaaatagtgaactagctcggtagttcccgatgccgtgatcatggttttggtctcgtatcttttaggtaaccctgtttcaggccagtgcttttgcttttttggcccctgctcgagccatcctgtctttagataaatggaaatgtaacaccacagatgtttcagttgccaatggaacagcagagctgttgcacacagaacacatctggtatccccggatccgagagatccagggggccatcatcatgtcctcactgatagaagtagtcatcggcctcctcggcctgcctggggctctactgaagtacatcggtcccttgaccattacacccacggtggccctaattggcctctctggtttccaggcagcgggggagagagccgggaagcactggggcattgccatgctgtaagtggaaacatctcccctcatcccaccactgcggggcagcctttaggaacattcacagacttcaggagataatgtttttcaataataagaatggtctgacagtttcaactttatttgcttcgtgctggggaatagttgaagggtttttgacccagagtttgggaagtgacatatagttgacgtattacaaagacagacttagcagcaatatgaagagggtggattgtaagtttttaagctttggtagtggggtaagggaatggcgc

SEQ ID NO: 12972 - DNA, 1710 bp, Homo sapiens
aacatcactccagtgttttaaaaactcagagtacataaacttgagcttattttgcctgttttaggaaataaagaaatataatggcacatagggatttgaaagaatcacaaacacatcagagagatcttatgttaggctgatttataagtgctgctttgggcagttacacagtttgtttacaatgaggagttatttgactttgaacatactgtacatggcaacttctaattgccatgtacagtttgtttacaatgaggagttatttgactttgaacatactgtacatggcaattagaagttgtcatggcaaaagaaaaccacagctggcctgccacagccaacacaagaaccagaaaatggtagatgaaatgaaggaataaaggtggggtttattccttattataaaagaaaaaaaaataattcttcagcagtcttaacaaagacatcaagatacaaaattacaagtgttttgactccagccctgtccccatctcctccaagagcagaggtaggagacagttgaagcaaacaagcaattctgtaaaaattacctagaaaccctacaaatttgattaaaatctaaacttctataattttgctttttaaaaaatttaatatcaaaaggcctgctttagtgacatgctattcctaccagaaaataaccccaataccccctctgtcagtaacatgctcaagttgaccagccaactcttatctctaaacctatgtggacaagtgtgtcttttaaaccaaagccacggagatcaagtgactgctagtaacgtgttgtctgttaactaatccagtgcccaccttctccagagggtgggcagggcagaaacccaaaagggtcttgagggcctaatcccagatcaccatctaagaaccacttcccttgctctctactcaaaatgagatgctttatttctaatccgactatttgtctcaaatttggtgccccgtgacctggatggttttttcctttagcaaaacacacataatccacaaaaccatacatatagtttttttgtctttacatttaaatataaaaatactattctgctttgtgtgataaatcaaggaccaagcagtaagaaccttttcttctttcaaggtagggatatccatcagtttatactaagcttcgtgttcagagcagggcatttagtcccaagccaggctagtcccacaagcaagagaccaaagccattctctctgattcccaacccctaccttctctcctaattcccacttttaatagaaaagttggttataactttttaagaaaagtttccaccacgagggcaagtcctaacctaaccagagtacgtcaggtcttcccctttcagctacctggaagaagagacccccttctgcaaacgtgctctgtccggatagctacgcctattggacaggtgcaccccattaaatggaagcagtggttatgtctccccaccctcctccccactaatgcactaaaaagcttcagtgatagggaaaaaaaggagggtaggtgtgaagaaattaataacttgacccctctatcccagccaaacaaagaaagcaagattaactgggcacatggaatgaaaaaaacgaccttgatattccaccctttgagttacaatcgggacaactgggagagggggaagagttggagtgggatgaagacctaggaggggctcaacagctggaggtccggacgcgtgg

SEQ ID NO: 12973 - DNA, 857 bp, Homo sapiens
  misc_feature 1, 2, 3, 4, 5, 6, 7, 856, 857: n = A,T,C or G
nnnnnnnacctggaactcccgggggtgggaagagccaggctgagcctttaaaggactgctctttgtccaaacacacacatctcactcatccttctactcgtgacgcttcccagctctggctttttgaaagcaaagatgagcaacactcaagctgagaggtccataataggcatgatcgacatgtttcacaaatacaccagacgtgatgacaagattgacaagccaagcctgctgacgatgatgaaggagaacttccccaacttccttagtgcctgtgacaaaaagggcacaaattacctcgccgatgtctttgagaaaaaggacaagaatgaggataagaagattgatttttctgagtttctgtccttgctgggagacatagccacagactaccacaagcagagccatggagcagcgccctgttccgggggcagccagtgacccagccccaccaatgggcctccagagacccaggaacaataaaatgtcttctcccaccagaaaaaaaaaaaaaaaaaagtcgacgcggccccttatttcttcttctctttggtgacctacattgtcaaaactaccaattccaggttaactttgttggagaatttcccccacccccatccagtgggtcacccaagagtaatgtccctccagcaacgttccccctatggcctccagcaaagctgatctgcctctcacacaggttcctggtgtctgcctctgcaccgttccctaaatgcagccaccttggcaggttccaggtggaagttggtagaaggcccctgccaggtcaaagcaatgctctccttgtcaaggcatggaccaggctcattcagacccattcagatactgcactgann

SEQ ID NO: 12974 - DNA, 1175 bp, Homo sapiens
  misc_feature 1111, 1172, 1173, 1174, 1175: n = A,T,C or G
acgccaccatgcctggctaatttttgtatttttagtggagacggggtttcaccatgttggccaggctgttctcgaactcctgacctcgtgatccacccacattgtcctcccaagtgctgggattacaggcgtgagccactgtgccatgaggattagtaaagtgcactcatgttaagtaaaaaatttgttttatgtttatgctgattatatgaaggtcatcatagcttagacacaatcaaaacccatggggaacatctttagaattcatttttctcttttcttacaaaaaaagtaaataggtaaaatggaaaatagaagacaacctatcctatcctggatgagacacacacatatttaaattgaattatagacttaaaatttaagtaggaatattttttttcctgagaaacaaagtcacaaaaaccaaaactttcagaatcaccaagtcttgaaaatagattatgaagcagactttttggatggtgcttaatgacatcaggcgacatttaaatgccacctagtgaggaacactgaaattgcagctaaattaaaatgaccttttatttgcctggacaacaaaaattttccatgattttgcttttttgaaacaatgataagaaatttttttttaggcaataagatactaagttgtatcaacaaactgcatgggatatttccacaaggagaggattttgttccctgatctagtttacgtgacattttcccttatgcttgctttctctgagctgactcttcttaaactgacctagatggtaccctatttcaactgactcagagttcattcaaaaatatgatatggtgacttggcttcactgacatgaaatccaggcactctctctactcttgctcacattcttccttgcccaaggttccagcgtgattttaggatatcttatgccaacccagtgtaacgtcacttctcagagatgtagggccaaccagctactcaactacactcctattcttttgcttgacagcctcatgtggccagatgataggcgaacaaagcaatgcaagcactgcctccatgtcaactccatcatcaaatggaaagcgtatctttgttttgctcaggatctttgaagagaanaggacacaacaggtaccacacacataggtagccagcattcatggaacaggcaccgtgggcnnnn

SEQ ID NO: 12975 - DNA, 1910 bp, Homo sapiens
  misc_feature 1, 2, 1909, 1910: n = A,T,C or G
nncttctgggagcgacccctccgctcgtctcgttggttccggaggtcgctgcggcggtgggaaatgctggcgcgcgcggcgcggggcactggggcccttttgctgaggggctctctactggcttctggccgcgctccgcgccgcgcctcctctggattgccccgaaacaccgtggtactgttcgtgccgcagcaggaggcctgggtggtggagcgaatgggccgattccaccggatcctggagcctggtttgaacatcctcatccctgtgttagaccggatccgatatgtgcagagtctcaaggaaattgtcatcaacgtgcctgagcagtcggctgtgactctcgacaatgtaactctgcaaatcgatggagtcctttacctgcgcatcatggacccttacaaggcaagctacggtgtggaggaccctgagtatgccgtcacccagctagctcaaacaaccatgagatcagagctcggcaaactctctctggacaaagtcttccgggaacgggagtccctgaatgccagcattgtggatgccatcaaccaagctgctgactgctggggtatccgctgcctccgttatgagatcaaggatatccatgtgccaccccgggtgaaagagtctatgcagatgcaggtggaggcagagcggcggaaacgggccacagttctagagtctgaggggacccgagagtcggccatcaatgtggcagaagggaagaaacaggcccagatcctggcctccgaagcagaaaaggctgaacagataaatcaggcagcaggagaggccagtgcagttctggcgaaggccaaggctaaagctgaagctattcgaatcctggctgcagctctgacacaacataatggagatgcagcagcttcactgactgtggccgagcagtatgtcagcgcgttctccaaactggccaaggactccaacactatcctactgccctccaaccctggcgatgtcaccagcatggtggctcaggccatgggtgtatatggagccctcaccaaagccccagtgccagggactccagactcactctccagtgggagcagcagagatgtccagggtacagatgcaagtcttgatgaggaacttgatcgagtcaagatgagttagtggagctgggcttggccagggagtctggggacaaggaagcagattttcctgattctggctctagcttccctgccaagattttggtttttatttttttatttgaactttagtcgtgtaataaactcaccagtggcaaaccaaaccaccacaaaccgggaggcacgacaagagcaataccaccaaggaggcccacagcaaacgcgtaccacagcaaacacgaaccaaagagaacccaaaagcaaagacgcaaaacaagcacaggacaagggccagcccgctcaccacccgcacacaaacccgcacaaacaaggcaaagatcgagactcacgcagaacggacaccaacacacagaaacgccacaccctcggcaacacaaccaaacacacaactaaacagcacaaaggacacaacacacacccccaacgcagcaccccgggccaacccccaccgccacagccccgacgcacgccaacaacggccacaccacaaacacacacaaaccaatcaaccaggcgcacgagagcacacaccacccaccaccacgcacagcacaccacccccccgccgccacagccgaccgaaggagaagaacgggaggagagaaacggcggcgagcgagaaacaggacgcaccggggggccagacaggaccggcaggcggaggacgcgacaacggagccagccgaggcgaaggacagagcgcgcccgcagggggacgcacgacgagggaacagagcaagccgaggcgaagaggagcgaacgaccgcgacgcagann

SEQ ID NO: 12976 - DNA, 3752 bp, Homo sapiens
  misc_feature 1, 3751, 3752: n = A,T,C or G
nactcactacgaggcgcgtcctcgtctttcccctcccatctcctcagatcggtggacgtgctcgcctccactcggggccaggtctatgtcccggtttcccgcagtcgcgggcagggcgccaaggcggcaggaggagggtgagcggtcaagagacctccaggaagagcggctctcggctgtttgcatcgccgatagagaagagaaaggatgcacgtcccaggagggaggaactactccaacttttcctattcagaaacaaagaaaaaagattattcaagctgtgagggacaattcattccttattgttactggaaatacaggaagtggtaaaacaactcaactcccaaaatatctatatgaagcagggttttcacaacatggtatgattggtgtaactcaaccacgaaaagtagctgctatatcagttgctcagagagtagctgaagaaatgaaatgcactttgggatccaaagtaggataccaagttcgttttgatgattgcagttctaaggagacagcaatcaaatatatgactgatggatgtttactgaaacatattctgggagacccaaatcttaccaaattcagtgtcattattttggatgaagcccatgaaagaactctaactacagatatcttatttggtttattgaagaagctatttcaggagaagtctcctaataggaaggagcatttaaaagtggtggtaatgtcagcaactatggaattagccaagctctctgcattctttggaaattgtccaatatttgatatacctggaaggctttatccagtcagagagaaattctgcaatttgattggtccacgagacagagaaaatactgcgtatattcaagcgattgtgaaagtcaccatggatatccatttgaatgaaatggctggagacatcttggtttttctgactggccagtttgaaatagaaaaaagttgtgagttactttttcagatggcagagtctgttgattatgattatgatgttcaagataccaccctcgatggcttgttaatattgccgtgttatggatcaatgacaacagatcaacagaggaggatatttttgccaccaccacctggaattagaaaatgtgtcatatccaccaatatttctgcaacgtctttgacaatagatggaatcagatatgtggtagatggtggctttgtgaagcagttaaatcacaaccccagattagggttggacatcctggaggtggttccaatttcaaagagcgaggcattacagcgaagtggccgagctggcaggacttcttcaggaaaatgctttcggatctatagtaaagatttttggaaccagtgtatgcctgaccatgtgatccctgaaattaagagaactagtttgacatctgtagttctgaccttaaagtgccttgccatacacgatgtcataaggtttccctatttggatccacctaatgagagacttattttagaagctcttaaacaactttaccagtgtgatgctattgacaggagtggccatgtcaccagattgggtttgtctatggtggagtttcctttgcctccacatctgacatgtgcagtaataaaagctgcttccctggattgtgaagatctactacttccaatagcagcaatgttgtctgtggaaaacgtcttcattagacctgttgatccagagtaccagaaggaagcagaacagagacatcgagaattggcagctaaagctggaggatttaatgactttgcaactttagctgtcatctttgaacaatgcaaatcaagtggagctccagcttcatggtgccaaaaacactggattcattggaggtgcttattttctgcatttcgtgtggaagctcaacttcgagaactaatcaggaagcttaaacagcaaagtgatttcccaaaagagacctttgaaggccctaaacatgaagtactacgaagatgtctttgtgcgggctatttcaaaaatgtagctcgaagatctgttgggagaacgttttgcacaatggatggtcgtggaagcccagttcacattcatccttcctcagcacttcatgaacaggaaaccaaacttgaatggatcatttttcatgaggtattggttaccaccaaagtctacgcaagaattgtatgcccaatccgttatgaatgggtaagagacttgttacccaagttgcatgaatttaatgcacatgatttgagcagtgtggcccgacgtgaagtgagagaagatgcaagaaggagatggacaaataaggaaaatgtaaagcagctaaaggatggaatatcgaaagacgtcttaaagaaaatgcaaagaagaaatgatgacaaatccatatctgatgcacgggctcgtttccttgagagaaagcagcagaggacccaggaccacagtgacacacgaaaggaaacaggctaaggtggtgaaccctccaattcaggaagtgggaaaaggagccaggaaatgtgcttctactttgccagttatttcagacagcactaccaagaggaggtggtcagcacttgttattggcctatgaactaaaagcaaatcaaagctcataaatcaaagctcatcagttcccataaatgcagttgtcaaagaaaagatttggttgccatagtcataagcaatgatacatgaaaccaatgaaagacagtacatgtaataatattttcctcagtacaattttgctggccttaactggtatcaaacgctgtcattgagatgttttcaaagaacattgagttgtatttaatcagcgtgtactccatttgcattgaagcattaaaaattatttttcttaaaatctctttaaggccttcttgttgctgttagaatagtgctatatatcaggtatgtgaccatttatttcagaaggctgaacataagaggtttctactcagcaatacttagatgtctaactgtttaattgctacagagctttatagatatttagagaaaagacttaatcaattagtaaataaaattgcctatggcaggattctttcttgaattaatattaatccttaaattgatttttctgggattatacaaattcctttttatataaaagtatattgtttaaaacagtagctatagccattaaccaaaggacagatgatatatatatatatgatatatatatatatataagttcttttttagctgtacctacgtacttatatcagcaccatgtatgtaggtgtgatagtactttcaaacagcgcctccacctggcctactctgttatttccacctgtttgggtagggccatttaacttccattatgccaaacttgggatgggattttcgaagcagacaacactatttcatcgtgtttcaaattggaaccttgaggctagttagtatcacactcaggccacactcagcacttgcccactcttgtttactgccttgtattctagttatttgtgtatttgtctccctcactagattatacgctccttgtgggcagggactgtgtcttttttcatctttgtatctttcatgcacctagcatagtgctttgcacatagtagtcactcagtgtttgttaaataaagctattagtgtcattaaaattcaaaagacagaaaaaaaaaataaaataaaagtaatttaaaaaaaaaactcgagggggggcccggtccccaattcgccctatagtgagtcgtattccaattcactggccgtcgttttacaacgtctgactgggaaaaccctggcgttccccaacttaann

SEQ ID NO: 12977 - DNA, 628 bp, Homo sapiens
  misc_feature 1, 2, 3, 4, 5, 24, 622, 623, 624, 625, 626, 627, 628: n = A,T,C or G
nnnnncagatatttgttctaaaantatagatatatacatagtatatatacatatatacctgtatgtatgtgtctatatatgaaagtaatagaaaaggttaatgaatgtccaaagttttaaaagcttgagtttgatgttacatggttgagttgatgaaaatctacagtggcttattttaaaggagtacatgtctgtatttgaaattgcaaccctcaagattaaagatttaatagaggaatcaatttaaatattttcttatatactacaacagctatgcatttttgcttaaccataccatataacccaactgtaacatatgaaaattgcataggaaaaaaatgtggtcaccaggcaagatttatctttaaaaaaaaaaaaaaaaaaagcttgggtctaaggggtaatgtccatgcaaatattccatgccaaataagatatatgcaagacatgctgatttcctgccttccgccatccaaccgggaaccaccactgtcctgttaatcaagccagtagggtgggataataccactgtttaagaaatctggcttctatcagcctctgtcatggagaaacaaacgagactgcctcccaataagcaaaagtgatcacatttttcacaaannnnnnn

SEQ ID NO: 12978 - DNA, 386 bp, Homo sapiens
acatctacagagtggtgggactgggccaggccttgaacccagtggtctgattcagagcccatgctcttattaatgtttccccacatgggtagtgaagtaaatttctgataaaatgaaaagttctctttgtatactgatatccattacaaaacctgcaggactacagcacttcacaaaatgcatcatttccacaaacagtgatgttctttttcagggtaaactatattgcaataacagcaaatatgaaaagatactaatatagtatctcacatgccctcctttgtatttgaaataatgaaactccaccatcatcaggaggacctaaaacatgagttgtttttccagagctaggaataaatgtctgctgactcatctgtagttacttc

SEQ ID NO: 12979 - DNA, 1267 bp, Homo sapiens
  misc_feature 1, 2, 3, 4, 5, 6, 7, 8, 9, 10, 11, 12, 13, 14, 15, 16, 17,18, 19, 20, 21, 22, 136, 148, 150, 164, 1263, 1264, 1265,1266, 1267: n = A,T,C or G
nnnnnnnnnnnnnnnnnnnnnnagggacattggtctatagttagtatctaggtttacaacattaagcttttttcattttgtttggaaaaacaaggctggcagaattacatttgtttttaattccattgctaatatnacatacttaggntnctatcaggtgcaanttatttacttgagacaagaagcactgattattttggctaggcttcatctgaaggcctatgttctgggaagggaggcctccataaaaaaggaagaacctttagtgacctttatccttgggaataaaagtaaagatcagaagccagtgcattcagtttaccgtcttacaaaaggagtcaagtattgtataggtcagagaccactattgtaagatcatataaatcctgtgtctaattttgttatcctctgtttctccataataattagtaccaagcactttacaaaaagaatccccatatatttgtttttggaggccacaagaaatgggaagggctaatgagagactgcagttaattctgcagctagtcttagggaaaacagaactccaaaaaatagaagagctgaaaggagaagaaagcagactgaattcttgtgcttatcaaaggaagaacaaaagaataaggagttgtcctggatctgagaccattagtggggttacctgagatgacctgtgatgtgtgtggcactgtgttttttttatgtgaactagagcaagaaattagatatggcccctcctgtaaagaaactcactcatttgtggggaaaatatataaggaaacaactcttcataacctaaggtttaataatattagtgttataatagtgaaggagacagatcttagctattctgatgggaagtttacattttagttgagtttgggaggataaataaaatttcattgggaagaaaacgaattttccaagttgagaagtcatttatttataccttttcctaccttctcccagtccattaccaaatcatgttaattttggcctccaaagtatatctcgagtcttcctatcttcattgccactaggctagttcactcggtagtttttttacatgagctatgttgatggcccttggccttctaatcagcctgttttcattattgcctcctcctcctacccccagcaatctatgctcaccatagtagccaaagttgatttaaaatataaatttgtaagtggaatagtgatactccctccctaaaatctttcagtggattctaattgcacttaagataaaattcagagtannnnn

SEQ ID NO: 12980 - DNA, 5759 bp, Homo sapiens
  misc_feature 1, 5747, 5748, 5749, 5750, 5751, 5752, 5753, 5754, 5755,5756, 5757, 5758, 5759: n = A,T,C or G
nccaccagattgggtggaaggggctctttctacggcatttcatgactgagcctccaagaacaacctgtattgagtttctctttgagatgattggactgctctcgcctgttgtgacaggtcattgaaattatgagactatcattcaaatggaagcattatagttcttcggaaccattatgatctcaaaacgaaaggagaatgatacagatacactggctgaggtgttttgaggtgcatcgaagtgttccaagctgtgacttaccttaacatgttcttgaagtaccatggcgtggattaaaaggaaatttggtgagcggcctccacctaaacgacttactagggaagctatgcgaaattatttaaaagagcgaggggatcaaacagtacttattcttcatgcaaaagttgcacagaagtcatatggaaatgaaaaaaggtttttttgcccacctccttgtgtatatcttatgggcagcggatggaagaaaaaaaaagaacaaatggaacgcgatggttgttctgaacaagagtctcaaccgtgtgcatttattgggataggaaatagtgaccaagaaatgcagcagctaaacttggaaggaaagaactattgcacagccaaaacattgtatatatctgactcagacaagcgaaagcacttcatgttgtctgtaaagatgttctatggcaacagtgatgacattggtgtgttcctcagcaagcggataaaagtcatctccaaaccttccaaaaagaagcagtcattgaaaaatgctgacttatgcattgcctcaggaacaaaggtggctctgtttaatcgactacgatcccagacagttagtaccagatacttgcatgtagaaggaggtaattttcatgccagttcacagcagtggggagccttttttattcatctcttggatgatgatgaatcagaaggagaagaattcacagtccgagatggctacatccattatggacaaacagtcaaacttgtgtgctcagttactggcatggcactcccaagattgataattaggaaagttgataagcagaccgcattattggatgcagatgatcctgtgtcacaactccataaatgtgcattttaccttaaggatacagaaagaatgtatttgtgcctttctcaagaaagaataattcaatttcaggccactccatgtccaaaagaaccaaataaagagatgataaatgatggcgcttcctggacaatcattagcacagataaggcgagtatacattttatgagagaatgggccctgtccttgccccaggtcactgcctgtgcctgtggtagagagccttcagttgaatggcggtggggacgtagcaatgcttgaacttacaggacagaatttcactccaaatttacgagtgtggtttggggatgtagaagctgaaactatgtacaggtgtggagagagtatgctccgtgttgtcccagacgtttctgcattctgagaaggttggagataggtcccagcaaccagtccaggtttcagtaactttggtccgaaatgatggaatcatatattccaccagccttacctttacctacacaccagaagcagggccgcggccacattgtcagtgtagcaggcgccatccttcaggccagttcaagccacgtgccccctttgggcttttgctctaacagccatgcaggttccacgcctgcccgcgcaaattcaaccagtgtcacatcatctacaccaacagtggtatcctgaactaccgtctttttgctaagactcaaacggcttgagtgcagcaaaaagttgacaaaaaaggaaaaaaaaatgaacagtcttttgtggtttattgggaaacttttcataccaggtgatactattctaaaaccccgttgtctccctgcaagtgctgatttgaaatgcagaagccacagtaaaaaaaaaaaaaaaaaaaaaaaaaaaagaaaaaaaaatcaaaatgtataaatattggaaatcaagtttttcagctgttttgttggttggttggttggtttttgtttggttttgtttaaatgggcaagaagtaaataatgtggctggaatacaagttgaacaaactagaagacacaaatctaacatagtttttatggaccaaggaacttgtatattgtataagctttagtaaaaggtacattttcaccatacctttttttatatcacggtattatagtacaccttgttaccaaataggttgttctcttccccacccacctttgagcttttgctctaaaatacattcaggttccaagcctgaccatccttgtttaatctatcatactcttccaggttttttttttttggtctaaggctggaacttttttcttttttttcagctgaagtcttatgacttttcatgagtcaaaattgtttggatttcagcaagtcaaatcttgcaaaggcctgcatattttttttaagattatatgaagtctgtgcaaaagctttaaaaaaatgcctctgccttgcctgcaatacatgcaatgtatgttaacttagtctctcttctcagacactgttggtagttatttctgtgttttcctttttttaaaaaaaaatatggacttattgtggttatctgagaggttctaacattcacatgcaatttggtgtggccatttagctattaatgagttaatggcgcagaacttgttgatatttgaagtgttctctccccttttcccatgacgtaaatacataggtgtgttccaggatttgttcaggtttttcccccctcctaatcttgtacataacttgtattatgtgtaagttaaacattttattttgaacttggaatgttcccagtgatttcattcagcagggtattttctgccttgttggcaagtgacaaaaaatatgggaagtatttgctaccagttggtagatggtgcccttaatggtagaatgaggaaaatgtccgcaaaagcatgttttattatctttacttttttggggggttggagggggtagcctagccagaacatcattgtaatcttaaaacataagatgcttttattagatgatcaactaaaatagctggaagacagtactttagaaacagatagttgtaagattataaaatgcaaatgtaacttatgttttcatttttttctctgccttttttgtttgtttgttttctcttttccagtactgagcatctccacaaatgtctcctaactcagaaaatgtttcttttcttttcagttgagatttggttgcattcagggttgtaggttggccttgcttgctaaccccgccggttttaccgtgctttcattcctgaactttgtttatgcctttgtttggtttcttcgaaattgcagcagactcattgggctacatttagtacaggaaccacgtgtgtaatgttatacaacacagtctagtaatacaatcatccctcttagagtaaaaactacctctagattgtggtaagcttttactgtcccataaaacaggagccacagtaccttatgaatgcaaaactgtaacttcctacagtgtttccctacagaacattgtctttctggtgtcctgggctgttttgaaaaagtttccattaatagactttttagaaattattattagtagcattttttttccagctttgctgtcttcatcactcactctatgctcagactatgccactgtaaatattcttcctaacatctttaaatcgccttttcctcagttttcaaggggaaggtcatttgtaaagcacgttaggtggttaaatcagttattgcggttttctcttactgcaagcctttttaatcacccccaggctgcattttattctatatcgccttttttcttcaaatctgctccaatcactcacttctctcttataagctaatcctgcctcacaccttaaatctgtttcagtgatcaagggcagaactcattgtggccttatctttctttgttgtaattgttcactgtctctttcttacagaccacttatttctgagtagtagttattcctctctatggagtcatggcaggaatcattacacagtgcttttgttcagagcatggacatgttcctagtgctgctttgctttaacggccacaagtttcctccacttcctaggtttggtatttagttaaggaatcatattaaattaaccaataacaaaagagatacttttgaagaacaaactattccttacccatttttgtagctcaaaaataatttttcaagttcatgaccttattaaaatgaacttgtgtttttttaacaaacgtgtatgttttattttgatagtttctttccgtaagataattgaaatattatactgtaaacccttttcttttctttttttgaaaagtccaagaatgtacttatacaggcatttttccccacctatttttggccattctcataccacagactaaagagtgaaatgatttgtccattgtagcttattgtttatcagtagttcttttgtcagctgcttacattttttctttcatggttttgtgaatcattttcagtatgtaatttataggaaccttgtcctctggttatagtagactgtgtgccctcctccagtgatggcattattagacatgctggtcatttaccctcagaaagactctcttattagaatggtgagtgcttcagttatagtatgtttgaatttttaaaaaattctgttttagaaatgtatcttatgctctcatgactatgcagtttctaaacatacacatagaagctgagtctctgatccaatatgtttttatttgttccatttaatttatcacatagattgggaaggcaagctaaaagccttaaaaatgccctttatattttgagtgatttcagcgttgaacactagtatactatctaaatttgctgctcactttctttaaactgtggcaattaaaggcatgtttatacatgacttaatcgtgaaatgtttgtcactcttactgcacagacttatctgcaatcataactggttagtttttttgttttgttttgttttattgtttttaatgaaactggtaccatctgtgctttcacaaaaaacttccaatgccatttttgagaactaacctaactagtcatgctaaccagaaaatccactggggaggaggttccttttgaaacaaaatgctgttcagttagtaaccaagttactttgattgcaaaagcagctgtgtttctgataagtactgaacaaatgtgtgtaattttctgtgccagacttatgactttgttttcaagcactgtaatgtgggatggatggttagaaacaataatatattagggtttctgtttaaccctttcaggactgaactgtatctccttttgttaattttcccctgtgttgtgataaatgtttgccagcattcagtactgtgttggtccagatgtaggtttatatgctcatttttagcttatttcttgtaccttgcagcatgctctacgcattcagtccttaaggggtttattttacaaactgtgcgcctgtaaggtttattagcaataagatagaaaattgagcaagtttataccataattttgtagaaaaaaagaatctgctcagttccatatttcatccgtgaaaaacttgcaatacgagcagtttcaaggaataaataaaaaggaaatgtaaaccattgtaaaagtcttctgtcgaatgtgcctgatgcatgtattatcgtcttttatttcagaatacttcataaagataaaattaaattctatannnnnnnnnnnnn

SEQ ID NO: 12981 - DNA, 2750 bp, Homo sapiens
cgaattcaaccgcgggggggttctctcctgttcaaagaagctttcaccatgggcttcattatcttgtcagaagtgaattagtttccaccagggacccctttatcccaaacagcaacacaaaatacaccctaaacctaaaactattctggttttgttatacccatagggttgggggtagggatgggactgcccattgctggcaaggaactgggaacagtagcaagcatggtgagggctggagagctggctgggggggttctctcctgttcaaagaagctttcaccatgggcttcattatcttgtcagaagtgaattagtttccaccagggacccctttatcccaaacagcaacacaaaatacaccctaaacctcagagtaaaattgatgtggggctatcctttggctatcgggtcatctgtgctgctccccactcatttctgatgggtttgcaaaggtgccttttgccagggcaggacatagtatgcacatagggatattgttatgtgcctaggtttcaggcactccttctgtaggggaaaatgggaggagccttcctccaccctgatccttaggaacattcctctggcccagggacagcttgttcttctcaccaaacaggtgaagcctgcagtccaaggtgcctggagccagaggtcggggagtaagcacagctgcccctgcctgagaaggagcagcttgcaaggggagccggtggagggaaaggggtacaacagctttgggatacattctggatcttgaggaggatcttgtgattttggctgagccacggtcacttccctcgtgaaggacccgccctatatcctaaattctggatccctcaaagtccagccacagagtttgcatgaagcaaaaagcctagtaagtgagaaaggaaaggggccagggatgggagcagtgctgtgctgttatcactgtcttgcttggaatgaaaacatctgagcaccctgtcttcaagcggtacgctctccccttattccagcagggctactttcctcttcactctgatgaggggagctttatctgctttcaaaatggagcacgtcgcactggagtttcgtgccctctcgttaacctgtcaggagccacagggctccataaaacggaatcagtgtctcaatatacatgacctatgttcatagcaatgttcagccatttgggtttgaagaaaaccacattaaagccaagacccgtttggagcgaactgccttgttctttgctgtgtggaaggttctgtccctactgctgaactccagttcctccccaagcaccctggcctcagaaatcctggcttccccaagttagtgctgtctgacctgagccaggccactgcttggtgcctctacaggccactgtgcatgttgagaattgcccaaaaggattagtgaagctcctgaccctggcgaggccataatgaacactgaagtgcacaggccaagggatgtaattgaaaggcatttatttttgtgaagatgctataaaattagcatttaaatatcccattcccttctcttggcctcctcctatccccctatggtatttctcctcctctcctcaaggccaggctttttgtgaaaggcattggctcatctttgtcagcgtggtcctgacgttcacctctgggctgctggagaggactgagagatgtgtggtttggtaggaagggggtgtgtgtgggggttagtggggaatcccatttttttgcatcactgtgaggtagcttcaggccctgtccctggagaaataattgctgcgcagaagtcacaggccatactgggcagttctggtacaaacctgcccttattaataataacaataataataataactccatttgcatagaactgtcactcattcctgccagtctgctgtccctaccctggttttttgctggccccaaccactggccttgttgagtatcgatgggccctgagctcttctgtttgcttttggagctcttcagatgctgtcccccctgagaataccctaactctggggaaagagcagccaaaatcccaatacagtaaaactccacacaatcttgttagcaacagtgacccagaaaattttgagaagtccaatttcaccagaagaggcccagggctccctgtggtcacattttctacccagccattcttggcattgcaacctccatttctagctcctgttgaattttctccacccagaccccaaaaataaatggatccatgatgataattaagagaagagaaaaaaagatattatttttgttaggacaaaccattgtaggtttttagcaatgtgtatctgtgtgtccctcacaccttttcctattctacttttttttcctttttttaaaaatattatgtactatatttttagtctcaaacacactatatatacttctagtcgaactcggaagatacttcactattactgttttaaccacgtaacatagaacacaacacaacaaacgcggcgacccaccacacatacctccaagggaccaagcacacgcagaacccagtaacggacacaggcgacccaaacgacgaccaacataacgcgagcacagaccacacagacacagagccgcacgggaaagcagcaccgcggaacaccagagagaccactgcggagaacaccagcaaaaacagcaaagcaacacagcaaaaaacaaccacgccaagcaaccaagcaccccaagacagaagaaacaaaacacacgcgcacaacgcagcagaaccaaaca

SEQ ID NO: 12982 - DNA, 4020 bp, Homo sapiens
gcgtccgagggagcttgtcgacgctgtcgcaggggtggatcctgagctgccgaagccgccgtcctgctctcccgcgtgggcttctctaattccattgttttttttagattctctcgggcctagccgtccttggaacccgatattcgggctgggcggttccgcggcctgggcctaggggcttaacagtagcaacagaagcggcggcggcggcagcagcagcagcagcagcagcaatctcttcccgaacacgagcaccacaggcgcccgaaggccggaacaggcgtttagagaaaatggcagacgatattgatattgaagcaatgcttgaggctccttacaagaaggtgagaaaaaacatgtcggtgaggtttatatatttcttaatttagcattattcacgaaactactgctgaaatgtaaactaacctccccggagccctcttgatttatcttatcagagatgcattacgtgtaacttacaaaagtaaatatatgctattgatgtaataatattgtgcagtagtttcacttcagcgtgatgaataaatgcccatctatctctctttgtagacttgcctaacgatatctcacctctactcccatgaattcacctttgattccagtgtgaactgtcaatcataaggtagtaattgagtgacttatcgctgtaccgtggtcccctaggtaaaatgactcaactaagaattaccacctccagtttggtatagcaaaaaggtgaatgtagtggtttgggaaaaagcaggggtccaagaataacaaagcatgaccagtctgtggcaagttaaatcttctaatagtcttataagaagaaatgggtgagattttaaaatttatgtatctatgtaagactggtgatagtaaatcttaaaacagtccagtggcaatctgctgctcagttaataattactaaaattcttggatccctgaatagaaattaaaaaaaaaaaatacaagaggcagtagagtcaatacaagcttaatacaagcttagagtaaatacaagcttagagtcacttgatgactgttttactgttctccatattgtttttatttttaattaggccctaccatagtatttcacactaaaaacaaaggaattatattggctaatatagtctttgactcatttcggtatctcagtaaaagtaaactgtcttttcattgtttcaccagttggtggtgaaaatagcagtatgcatgcattatcactggtgtcacaaactgtaagctttgtaagttagcactttactcctatagctgatgtaatcaaactttaaaataaacatttcactaaaccttttaaaaataatacatttgttttggattgtatagcacgaccatgtggtaccaatttggatgaattcttgatagatttaaatagtgtatgtaattttgtaatgcttagactcttgaagagctactttctgttttaatgttaagattcttgtgtcttagttttttttaacatggatgtaattccatgtaaacaggtatggaagtaggaaatgtttaggctggacttggtggattattaattgactttcttgggttcttgggagtcaacattactaaagtagtgtgaatccctgtttgcttcagggcgagatgtgtgacagaggtggcatcaagctcttacagtcccaaccctccaacggaaatgggcgaagatctcaggaatggcatcggtcacaggaaatcgatagtggctggctgctagcatggccacttggggcttaggcagaaatagagccatggtactgaccaaagggaccatagcacatggaataaaactcaaaacaggacttcatgttttatggaaattatatttaaccacttcaacattgtaaatctggataacttttaatatctaaactatataagaaaggaaaatttaacatgttaatatggaaaatttttttatttttgtatcttgatgacttaaatgtaagcaacaaagtggttaaacacatacccatctaaatttttttatagccttccatgttaaactataagtaaataattagttttaaaattgttttgtattttcttattcctgttccctttaccctttgacaacttgaaatgttaccacttcgtcctcatgatgttcttctatcaaccctgcttaggatgagaacaagttgagcagtgccaacggccatgaagaacgtagcaaaaagaggaaaaaaagcaagagcagaagtcgtagtcatgaacgaaagagaagcaaaagtaaggaacggaagcgaagtagagacagagaaaaaaaaaagagcaaaagccgtgaaagaaagcgaagtagaagcaaagagaggcgacggagccgctcaagaagtcgagatcgaagatttagaggccgctacagaagtccttactccggaccaaaatttaacagtgccatccgaggaaagattgggttgcctcatagcatcaaattaagcagacgacgttcccgaagcaaaagtccattcagaaaagacaagagccctgtgagagaacctattgataatttaactcctgaggaaagagatgcaaggacagtcttctgtatgcagctggcggcaagaattcgaccaagggatatggaagagtttttctctacagtaggaaaggttcgagatgtgaggatgatttctgacagaaattcaagacgttccaaaggaattgcttatgtggagttcgtcgatgttagctcagtgcctctagcaataggattaactggccaacgagttttaggcgtgccaatcatagtacaggcatcacaggcagaaaaaaacagagctgcagcaatggcaaacaatttacaaaagggaagtgctggacctatgaggctttatgtgggctcattacacttcaacataactgaagatatgcttcgtgggatctttgagccttttggaagaattgaaagtatccagctgatgatggacagtgaaactggtcgatccaagggatatggatttattacattttctgactcagaatgtgccaaaaaggctttggaacaacttaatggatttgaactagcaggaagaccaatgaaagttggtcatgttactgaacgtactgatgcttcgagtgctagttcatttttggacagtgatgaactggaaaggactggaattgatttgggaacaactggtcgtcttcagttaatggcaagacttgcagagggtacaggtttgcagattccgccagcagcacagcaagctctacagatgagtggctctttggcatttggtgctgtggcagaattctcttttgttatagatttgcaaacaagactttcccagcagactgaagcttcagctttagctgcagctgcctctgttcagccacttgcaacacaatgtttccaactctctaacatgtttaaccctcaaacagaagaagaagttggatgggataccgagattaaggatgatgtgattgaagaatgtaataaacatggaggagttattcatatttatgttgacaaaaattcagctcagggcaatgtgtatgtgaagtgcccatcaattgctgcagctattgctgctgtcaatgcattgcatggcaggtggtttgctggtaaaatgataacagcagcatatgtacctcttccaacttaccacaacctgtttcctgattctatgacagcaacacagctactggttccaagtagacgatgaaggaagatatagtcccttatgtatatagctttttttctttcttgagaattcatcttgagttatcttttatttagataaaaataaagaggcaaggatctactgtcatttgtatgcaatttcctgttaccttgaaaaaataaaaatgttaacaggaaaaaaaaaaaaaaaaaaaaaaaaaaaaaaaaaaaaaaaaaaaaaaaaaaaaaaaaaaaaaaaaaaaaaaaagaaaaaaaaaaaaaaaaaaaaaaaaaggggggggcccttaaaataattaaaaaaaaaaacccccccccccccccccggaacccgaaaaaaaaaaggaacccca

SEQ ID NO: 12983 - DNA, 1368 bp, Homo sapiens
  misc_feature 1, 2, 1366, 1367, 1368: n = A,T,C or G
nngtagttcttcttctgtttgtgtgggtgttcggttgtcgtgtgtgtgctcggtctccgttattggtttcgtctctctttgtgttgtgtggtgtgtcttcttgcgttttggtttgtggttgtgcttcttcgttgttgtgtcttcgtcgctgagccggtgcccttgcgtgcgttttgtgtattgggtgtccgtgggctgcgtgcttgttcgcgtggtggccgtctcgtggtgatgtctcgtgtgcccatggttcttggttgtccttcctgtattcttcaggaagatgccgtagttctggtcctccgtctcctgctgcaccgacagctcctccagcgtggcgtccatgtccagctggttcgtctccagctgccgcaacagcgtctccctctgaagctgcaaaaatgggatattgaagaacttatgaaggtactttaggccgaagctgttcttcatggaagactcagcatagcggaagtaggaggaacctggaggtctgtccaggttgtcgatgaagtcacgcacgtcgtccggcaggatgactcggtgctcgcccatgtcccggtagttccccagcacgcacactggcacgtgggtgggcacttttggaagctcccggagaatgtaattgaaggtccactgcttggtaatgtcgaacatcatgaccaccccgttgcagttcttgtacacgtccaggaactcagcatccagggccatttcagactccgcctcctgggggtcgttctccatctttaagccgtcgcctcgctttttgcattttcctttgtctactacatcccagacttcaaccttcacgatgtcatccgtggtcttgtagctccagtggatgctggtgacctggatctcctgtgtggggatgtactcctccacgaacggccggccctgcaggcggtgccacagcgctgtcttgcccgtgttcctgtctccccggatcactatcttcatgttgtactgcacccccttggcgaagcgcctctgcaacgcctggttcatggactgcagcccggcggggatgttcttgtcccggcccggggcctggtccgaccccaccagcttcttcagggcggaaaacatcttcccgctcggacgtcccagcccgggcgcggccggcgagctcagcggcggcggggaaggggtgcgactggcaccatgtcccggcggccccggcccccccggaggccggagccggcgcggccagaggccggggtcccggcggcggagcgcagccccgagcggcgactcgggaacctcagccgcggctgctccgctccggcccccgcggcctccggcgcgaccgctctccaggagtcagcgccgccatcttggcgccggctcggcgcaaacgcgnnn

SEQ ID NO: 12984 - DNA, 1716 bp, Homo sapiens
gggagtcgacccacgcgtccgggcgccggaggagacgcacgcagctgactttgtcttctccgcacgactgttacagaggtctccagagccttctctctcctgtgcaaaatggcaactcttaaggaaaaactcattgcaccagttgcggaagaagaggcaacagttccaaacaataagatcactgtagtgggtgttggacaagttggtatggcgtgtgctatcagcattctgggaaagtctctggctgatgaacttgctcttgtggatgttttggaagataagcttaaaggagaaatgatggatctgcagcatgggagcttatttcttcagacacctaaaattgtggcagataaagattattctgtgaccgccaattctaagattgtagtggtaactgcaggagtccgtcagcaagaaggggagagtcggctcaatctggtgcagagaaatgttaatgtcttcaaattcattattcctcagatcgtcaagtacagtcctgattgcatcataattgtggtttccaacccagtggacattcttacgtatgttacctggaaactaagtggattacccaaacaccgcgtgattggaaagtggatgtaatctgggattctgctagattttcgctaccttaatggctgaaaaactgtggcatttcatcccagacagctggccataggcataggaataaacagcggagagaacataggacagactacaaagtgtaggctagctgtaggacgtggtagtcgaatagtaggccaggctgtcactctctacccaggcaatctgcaatccacgcaaatcgcggaacacctggacacatagatacgtgaccacactctggcacaggaacgtgcactcacgatcggccggtacgaacagtcgcctactaacagctcaatcaacagcatacacacagagataatacacaaactaggcgcctaatacgcgaatataacagaatgttggcatgaatagtgattaggcacatcccagtatacggaaaacaaattctaattcccagggatacccactccacgactgatcacaccccaacatgagaaacaagacgagggcgcaacggtacatcggccaccaagtcgccacacagatgcaacagcaccaccacataggaagaccacgtgacagcaccagcaaactaccccaccaacactgaaccccagtagcgcaccaaaaaccacaacacgacgcgcacaatacaacacccgaagacaggcagatcacaaacgaatgacacgccacgcacgagccaagaacccaaccgacaacaacgatgatcacaacatcacccacgcacggaaacaaatccccgcaaaaagcaactaacagaccaacctcgaagacaaacagagagaggcaactaagggaacggcgaccaacgacaaaaaaacacccacactacgcagcaaacacaccaaccccccagaaaacacaccaggcaacaagacacataacagagcgcacaggagcacgctgcaacactaaggcaaagtgaggcaccgaagcgacaccagggcacaggcagaaacacagaacagaaggaagacagacacaccaaagacaaacagcgcgagcaacaaaacacaacagacgaccactacaaccaatcacagagagaccgcgacaccagaagcaacagcaaccaggacgaagcccgcacgaagaacaccaacaacaccgaaacaacaagac

SEQ ID NO: 12985 - DNA, 3102 bp, Homo sapiens
  misc_feature 1: n = A,T,C or G
nccagcacaccccccgcctgtaccctctactttctctcccccacttttatctcgccccccctttttttttttttgccaatttccaggctttggcaataaaccggcaattattttgtaagaaaatagtaatttagtaatagcctgtacactttgaaaaacataccctgtactaaggccaacctcaagtcaatctacaagttattcaagcaaacctaaatcatcactgtgtaaactgcatttcataaaatatctgttgaaataaactccattaaaacataattatacagatattttaattgtatatatatcaggtacacggaataaaagtcctactctctagaacatgagaagtcaataaatagaaaagatatacaaagtggaatgaacataaaaatgactaagcatgtgatcttcacattcatacagtttttcaactaatcttttacaattaaaaagtcatttatttgaaactgtagagttgatatatgccatattagtttggaaccttacaaaacaactttagtggtgttatttatgtgtggagagaaaactgtgtatgtaactatcatgtttcaagggacatgacttaacagtgaagttttttatgttatagggaagaaaacaagtattagtatcagttatcttagaaatgctatctaaactagaatgacatttgttcagtatgatatgttctttccctaactccattctaattgcttaaaaactatcaagtgaagttacaaaagttaaaccactaaatgtggcatcttttcttacacaaagtatcttctcttagaaatgcggtatttaattaagtaaaccttcttggtgaccccagttataatcaaaagaggccacgaaactacagactactgacgaaaagtgtcagtgcagacactttccatcaatcaacaggcagtccaagggacgcaagagaacacaagtctgggtaacatgaatttggtaagaaagcaggctaaacctcctgtgtcttagtattcgaagtgagtcattctatagaatttttgactaatctgagaaaggccaaaaaaaagaaaaaagtattctgtttaaaggcagggaggtacatcataacttttaaaaacatgtcaaggcaaacatacattttacctagaatacctcattttctaattatgcatcattactgtacttatatttagtaaagtgaacagggtagtattataacctgtttatattcaaggaacatagtaaactagctgacaaaatttacctttcttaaagaaaaaactcagttggttgaaactgacaaggtaggattagctttccaatgtagaggacaactcttgccataacatgaatgttagtaaaggagctcactgccgtgaatgcttaggatacataggtacatggccaactccagacctaagagcaatataaagctactcaaaacaaaacaccccacaaataataaaaaccccattccctaacagagctttatttctcttatgttgtatcagcctcatagtacacccggcacagtgctgcattagggcggcatacaaaagcatcagtttctcttcccaactccgttagctgttccaatgaagacacacaaggataatgatcttttaacatatctggcaatttagaagttttctcttgaagacgtcgagaacgtctcactggtgttaaaaacttcagctctttaaatgcggaatttgttccatcaaactgcaccttttttttcacactttgcaagtatggcgtagtagacacattatatttaattaagcaacttgtcctcgtttctgtattgggggttttaacatcatgggttggatcttttgttttgttgtcttgctctttttcacaatcttgaaatagcaaatttctatgaagtttactctccatttccagtttttctggatctacatcaacacctgtatcttcaatactgacttctttgacttcttccttgcttgcacaagacttctccatattttctcctaaattagctttttcttgactcttcattgttagaatatctacaatcgtgtgtcgcatctcttcaataggctgagcccctgccagaatggctttctcatagattgcaataatattttcaataggacttgtgattggttcaataagtgcaagacatatccaatacttaacaagctttttggcatctggaatatttttaatcaggtcattcagtgtgaccagtatatcttcttttggacatccctcattaatcaagttcaggcattcagaaaatgtgttgtttactttttcagtaaataatctttgttcatcttcttctgccatggtagtccaaaaagacccaactggtttttcattttgtcctgcaggctcatgctgagtaactactgaattagggggcctttttagcactcttcctttgccagctttccactcactcagacgagcttttctctcttccgaggtttctttgggctgagctgatctactatcaacaattgcttttcctgcagtatgtcttcgctggtcaacgggctctgacttttccatcagtttatcattagacaatgaagcaggcctggctacaacttcagatgctatggatcttgatagagtcttatttcttattataccttgagaagaactggttttgacactagataaagctgtttttgattgtaatagttctttttcatgaggccctttccggattgtaacattggcagaggttctactgatgccttgtttcacagtgtcccgggtattactgtgatgacttctaataggaggtcgcacaagttgtgtgttctgagatgtagtgctcacaaatttagtagtggcagtcatattggaggatctattacttttcactgttacactgctggtgtttacaggctgaggttttgtggctttaggtatagtggctgaaagtttctttgttgctgcagaactctcatctttgacttgtagaggttttctaaatgaattaatcttagactgaacaatctggccacgataagatccaagcacaggtttcttgggcatgttagcatcttgcttttgtttttctgtagtcatttgtttctttttactattgtttttcggacgcgtgggtcg

SEQ ID NO: 12986 - DNA, 4340 bp, Homo sapiens
  misc_feature 1, 4336, 4337, 4338, 4339, 4340: n = A,T,C or G
ncgcccgggagcgcgggctgcggagaggcgggccgggccaagcggagccgagcgagcgggagcgcggcgtccgggaggcggcggaagaccggggctcggagggtcagcctcttatcgtagcaggtctcctcggcacgccccccttgtttcgccccacggccaagcccgccgcgggccggcgtgcgctggtcactgaggcccaggtcgccgccgcggcgcgtttttgaaatcatgaatcctgtttatagtcctggatcttctggggttccctatgcaaatgccaaaggaattggttatccagctggttttcccatgggctatgcagcagcagctcctgcctattctcctaacatgtatcctggagcgaatcctaccttccaaacaggttacactcctggcacaccttacaaagtgtcctgttcccccaccagcggggctgtgccaccgtactcctcctccccgaacccctaccagactgccgtgtaccctgtgcgaagtgcctacccccagcagagcccgtatgcacagcaaggcacgtactacacacagccgctgtatgcagcacctcctcacgtcatccaccacaccacggtggtgcagcccaacggcatgcctgcaacggtgtaccctgctcccatcccccctcctagaggcaacggggtcaccatgggcatggtggctgggaccaccatggccatgtcagcaggtaccctgctgactgctcactccccaactcctgtcgccccccacccggtcactgtgcccacgtaccgggccccaggaacgcccacttacagctatgtgccccctcagtggtgatcacctgcaaatgtttgaggacggagctgtgcagtcacattattggggattccacagctggtgctgcaggccttgcgcctccaaccaggactttcttcttaatgctctcgacacttagctaaacacgactatatcccggcccagcaggccccagcgccgttagtctccagctgactctgtgggttggtcttaaagcaaattctgttttgtggactgcctggcaattttttagctaactgtaatgataaaaagggagtattaatctattctgaatcatatctagttgaatgcatgtttaaaaaaacaaacacaaaaagcttgctcaatctacctgcagtgactgatgcaaaaccatcatatgcaaaatccaaaggaatggaaacgtattttacaacttgtatcactaatgcactgttgtaatgtatgcaaagtcttacagttataagtgttaaagtgaatttcttcatagagcatctgaaatatcttagatgattcttcaaccttttggggttgatgtgggttgccagttagggatgtggacattttagttttcagcgacctgtttctttggcactgactgtcctgggagggagttgcgaggtttgggagagagtagggaagccacagctgcttgggtgcagctggttcatggacatccctttgagtttaggcttggtggagtcagtggaacagggacatgcttaaagctcatcatgaaagattatggtagtgtggccagtgaaatttggggcgaggggggtggtttatgtgtcagcaaagcagtttctctgctatctaaattttcattacagttctcttagagagatgatgtttttatatgtctttattggaaaagtcctatgtaaaactaaattattttcctgggatggaagaaatgtgaaagagaaacagccatgcttgcaggaggtattgtcctctgctttatttagcttagaaaatcattccttttttttttttttcctggagaaatgtttgaatcagctgaaaacaggtaggcattgctgtttttccccaacaaagaagggcaaaggtttcagctgtatgttatgaagaaagtggtatatttaagaatgagttaaaagggaacaaaactttatttaaaattcctccaatttcttgtagaaaggcagggccgtggatatgtctggaaatgtagaaacctgtagctgcttctgggatcacccacctgatggtggtgacttgtctgctgaggccggctggaggggacgcttagagatggggcgagggggaggccagtgtctgttgtctgcgagcctctcctgccatctcttttgcagctgagggcacttggcacaaagcaagcacagacagcagagagggccaggcagtgctggagtgcgtttgctggcagggtttattgtgggagaggaatttgagtttaggatctgaatcttgtacataagaaatgaaaaggcttccctccaccccgcccccaaaatatgcccgtcctgtatccatgagagtgcatgtcggttctcagtgagggtcagagtgggggtgggggatgtaaggcctgggtccctttcagcggcctctagggcaggagcgtgcgtcttcttcccagtgcagtggtggtttgagtgctgtgggctctggtggggagggggctctgctcctcttcatttgctggtagctgggtcagggcactggcgcccagtgaggatgcccactagcattctgccccagttggttggtggggggacacctgaccactgagcctttggtaaccttattttttatagtaagtacttcttataattttctttttcacatcttattttataagaagtttaggaatatttttgcatggatcattgtaaacagcagattctttattcctgatgtctattaacatagaatgtttactgataagtactttaaattgcttcatgagcacttaatccatcttagtgtctatgtgtgggggcagacatttaccgcaggcacacagtttgtgcccctttcttcaagtctctgttggtaattccatctgtttagtggatggttggcaggattagtaggttctaacggttccaggggttcagctgaccaagtagcagagaagtcttttttcccaattgagtgctaatagattaggataaaatactcacaatgttagtgtatgcttttaaaaagccccacacaacaaaatggaaacatacatgtacaactcctgtgagggctggagtcttggggttcaggaggaggttagaagttacaggcatctcttcaggcttgcttggtacttggcacacacaggatggtgttttaaagagtgggctgcaccccccacacgccatttacatcagcttcataaacacttttcttcctccctgtaacttaaccttttttcccttttatgaagttgagaggctttatgaaataagtttgcattgcacatccgtgcagaaatctttctgactttgaaatttttaggacgtcagctgtcagatacgaaaggtagatatcaggtaagaatctggacttaggaaatagtcacaaaactgtcataggttgtaattttatcaacattcgcttctagtaaaattaaagtcaattaagaaatagaacttgggtcaaaattctgttacaaagcttcataatttgtcccgaagcatatggtggagcattctgagaaatttgctttttgtgtgtttgacattcctaatttgggagtccttcagctgaattactattcttttagaagttgagacagcaggtaagcaaaggacctagttcatgtaaacatggacatcatgatggctatttaaaaaatatttgttctacaccttctcccctgaggcttggggagtgtgttcagccgctgcagtttctctgctcatggaggtcttgtttggatctgtgctggcggctgagcatttagtgtgagccagtgacccatgaacttgccgctctgtgagggccagagtcagggccagtcctggtaatgggcctgaaggcacttccagaaccttttatgtctctcctgagcccattcgtgtttagaaaacggcgcctcatcagggaggggggagagacgagacccacacgtgctgcggatttgtggggacacctcttggtgggtcatgtccaacattgtgtcccacggcacagagggcggagccaacacacgcgtgggggaggcacccagataaaaaagaggattcccacccactcaccccaggggaagataaaacagactcactatcaccaagaggaaaaaccaaccaatacaggatgaaaaaagacagacgagacaaaaaagacatggtggttgtagagacaacccacacgaaagagacaaaaagtatctgagcagcgaacacaaataacgatgacaccacagacatataaaatcaatccaggctagaagcgaagagagtagtatagttgacagagacgaaacataacagacgagaacataagagctacatactgatcacctagccgtatcgtttacttctcatacgttgannnnn

SEQ ID NO: 12987 - DNA, 6153 bp, Homo sapiens
  misc_feature 6146, 6147, 6148, 6149, 6150, 6151, 6152, 6153: n = A,T,C or G
ccacgcgtccgcctgggcgctgcggcgcgtgcgcgagcggtgccgcaccggccgcgggcgcagggagtattatgggctgtgggtgccgctgagcaagatggagctgtctgcagtgggcgagcgggtcttcgcggccgaatccatcatcaaacggcggatccgaaagggacgcatcgagtacctggtgaaatggaaggggtgggcgatcaagtacagcacttgggagcccgaggagaacatcctggactcgcggctcattgcagccttcgaacaaaaggagagggagcgtgagctgtatgggcccaagaagaggggacccaaacccaaaactttcctcctgaaggcgcgggcccaggccgaggccctccgcatcagtgatgtgcatttctctgtcaagccgagcgccagtgcctcctcgcccaagctgcactccagcgcagccgtgcaccggctcaagaaggacatccgccgctgccaccgtatgtcccgccgtcccctgccccgcccggacccgcaggggggcagccccggactgcgcccgcccatttcgcccttctcggagacggtgcgcatcatcaaccgcaaggtgaagccgcgggagcccaagcggaaccgcatcatcctgaacctgaaggtgatcgacaagggcgctggcggcgggggcgccgggcagggggccggggcgctggcccgccccaaagtcccctcgcggaaccgcgttataggcaagagcaagaagttcagcgagagcgtcctgcgtacacagatccgccacatgaagttcggcgcctttgcgctgtacaagcctccgcccgcccccctggtagccccgtcccccggcaaggctgaggcctcagccccgggccctgggctacttctggccgcccccgccgccccctacgacgcccgcagctctggctcctccggctgcccctcgcctacaccacagtcctctgaccccgacgacacgccccccaagctcctccccgagaccgtgagcccatccgcccccagctggcgcgagccggaggtgctcgacctgtccctccctcccgagtcggcagccaccagcaagcgggcaccgcctgaggtcacagctgctgccggcccggcacctcccacggcccctgagcccgccggtgcctcctccgagcccgaggctggggactggcgccccgagatgtcaccctgctccaatgtggtcgtcaccgatgtcaccagcaacctcctgacggtcacaatcaaggaattctgcaaccctgaggatttcgagaaggtggctgctggggtagcaggcgccgctgggggcggtggcagcattggggcgagcaagtgagggggctccaccaaggaggggggcttgggggggccctcctgcccgaagtcatactcttgctcccaccccacccttgcccccagccctctctccctgtgctttgcttgtctcaaatggctcggtgttgacccagggatggggctgggtagttggggtcccagaaagccgggggtaggggccaccctggaatggggcaggggaagggcacaccccctgcccatgcatggtagcccactgggtggtttctggaaagccctagaaactagggttcctctgccccttccacatcccacctgtctctctagcttgcttcctgctctcctgtgcggcgtctgatttctcggtgctaacctggcagctgtggggcccttaggagccccccaccgagggtggacacagtccctttccttcctgcagatgcctaggcaggaggagggcttcctgcctgtttggcaaagtcccaggcagaggccaaggatgaggcctgactcggctcctccctccacatcagccagggcatcagaagttgggccagggcggggtcttccctgctcgattttggacgaggcctaagtagaccccctatgccctgccccagccctggctctttcctaaccccctcaacggtgggaggaactggcagagggtgcgcctggccacagcctccccgcatctaaaggccccttcagttcttgaccaaaggtgctacgagaacctgccgtggaaacttccagttgtgcgtctgccccactcgctgtgtttgtccgtgggttcatacatgcattgggtgctaggccccaggctgccgggtggcaccctttacagttcctttgaacaggggcattgaaggcctggactgcctctcgcctcagtaggcctggggaccaggcttgggtctggaggtttgctgtggaagtcaccaggcctcccctcctggcccaggtgtgctgggggcaccgtgccccccacccccctgccctcctcagggtggtcagcccaacctgtcggaccttcacttcacatcatggtggggaccgagatagagagggagaccccattccaagctccctcttcctcccggtgtttggggaggatgctgaagaatccattcccgagggcctcccggcttgtcccagcccctcttttgcttctgaccacggaggctttctcacagcccagcctgcctgaagcaaaggaggctcccgtgtcctgggcagcttctgtttccctctgctgcctgggagctgaggcacccgtgccagtggcagaggccacagccccagccttaggccaggccctgggagggcaggcaggcaaaggggagaccagagggtctgtgttctccaggagaatgagggtgttggtcccagaattgggaccggggccccgctggccagccctgggccacttcccgggtctccattgtgcgtgggtggcgtgttccaggcgtggctggagctggcttcctggctgtgctgccatgggcccctccctcagaagcacgttggcaggaggccgatcagaaccctagcgcctttggtcctaagaatgggaggctgccttccttcccaatctccctgccagggcccacagcgtggccctagccctcccctccccgggatgtagaacggggaccctcgcagggttggggcgggggctgatactcctcggcccctccctaccctgccctgtgtgttggctttgtggccgtccaagtgccaattggcttttcgcccaaataagggctggtatttctcctctgtccttggaggtgatttccccctgaccccctcccccaggtgagtgaccacctgggtgccagttacaggtgtttccagagaccatagaaatgtgttttcctgagagttcgtgtcattcgtgacttttttgtaaagaagttgtgttttcagaggtgattttatgacaggaaagtgaaagaattagttttgcaaaaaaacaaaaacaaaaaaagaggaataaaaaaagaaatagaaaaaaatattgtgggattcctatgggggggtggcgggggagaaagagctatttaagaaaaaatagtaacgcagtgattgcacaggtgaggtggcaatgtcaggatggggcggaggcctgggcccagctggcaggtcccctggcatcgcaggcactgtggagagggcctggacccagatctccacacccgtgcttgctcaaagggaaggacaacagcgggcccccgggagctaacccaagctgcaggtcccggcaagctgaggtttgggagggtgggggttgtcactggtgattttctccagggggctggtgagtgggcagtttggtttcttgcccccttctgttcctttcccagttgttgggccatctggtccccaccaccgccaccctatgggggagacctccctccccacgggtcaccctaaagcccacaacctctctgagcctccctggcctgaaaggggatgcaggcttcaggaggcaagaagctgggcccctgggggtggctggggagagggaatgcatttcccttgccacaggtggtctgcttctgctggcctgagctccaagtggagcagcccgggccagccttggtgcatgaagaggcaccaggcacaccgccttgaggtgggcagtgcccatgggggcccgagtggatgggaccgagggtgagtggagcctccttcctcccctctctagtacccccgcctcccacacacttgcacggatcggcctcccttgggagatcagcctccatgggcccctcgtccacccttgctgctttccatttgcctaattaccaagcagaagttgcaatctggtttgctttatttttgtatgtgaaataacccccaaagcccaatctcctcctacgttcaatattggttggggcatccgtcatctccccttaagtgcgccccctccccacccaagtatcataggaaaccggtgaggtctggtgtctctggtttgagacggtaagttgggacccatccctgtctgggtgcccactctgacctttagtttgcccttctgtgaaatgggtgtattgggtagcaagccctcttcagaaagcgctgctggtgtcagagcagctgcccagtaccaggtggggggtcaaggttgctggtactggggcccccagctgcccacaacccctctttgttctcaccctgcaaaggggtcaaggtcaaaatgagcctcatccttcctatgatctgggaagaggtgatgatcaagtccccaacttcagtgtgaggtggacagagttggggggatggcccctttttgaagaggtgaaaatggttttggagaagcgcagctgcttcactgggggaatgcggcagggactggggcccaggatgctttggcctatggggaaaagccctttaaaaggcagggcccaggccctggagccagcacaagactggcctcgagcccctgagccaggaggtcctggaggagagccaggccggtgggcccgcccaaggctggagggtcagccccaacagggagctgggttggccagggggctggactgctaccagcctctctggcctatggggacccaagaggacacatcccccttttgcccactcttctgtgtcattttgttgttttggtttgtggtggtttttcttttttcttttgtttttcttttttctttctttctttttttttttttttttttttttttttttgcacttcgcccacacaggacagtggagccccacctggtcagttccacttccgggctcccatgcacttgcccaaggcggcctctttgggacggggatggtttgaggaaacacttttaaagaaaaaaggaagacattgaaaggttttagtttcttccctatctgcatgtcctctcatatagaaagcccagaattaggggctagaactccaggagagggtctccccgactcatctcttgctgacggtcaccaggatgcagaaatagggagatggttagtgggggccaaagatgccccctcccaggccttcgtggttccctcctccgccccctgcaatctttggaggagtcagtgcctcactccagcagtgagtgcctactgtatgcaggtagtcagccaggcaaagagagactaacggtctcatgggggaaccctcttgcgggaggccaggtagctggagcgaagcgttccggctgcccttgctgctgggtggagtggagagggagacttctttttgttggttttaatttaaaaacacaaaggcctaaagaaatacgtatcttataatttttttaatttttgagacgttcatttaatgaattgtgcacgaatgaattctatatatataaaatatacatatatagctctatatttggggaggggcactgtctcttttttctctcatttttaaaatgaagtgttgttgcctttgtatgtggttcaaccatccagctcccagctggctaaactttgcctccagtggtcaaagatgggaaaagagtggggttggcaggagatggaaaacggaggtgccgccccagcatggggggcaggtcccccagtccaccctgcccctccccctgtggagaagacgcttagttgggggtgtgggtttgggctccattctggattcggcggttccgggggaggggtgggtctgtgccgattactctgtcttgtacgtttgttctgctgctcttcaatattgtatcaacgccaggaaaggggggtgaaaagcctcttttaccccccaaataaattgtcacattccgaagctgaaaaaaaacaaaaaaaaaaaaaaaaaaaaacataacaaaaaacggcaaaaagaacagagacannnnnnnn

SEQ ID NO: 12988 - DNA, 3838 bp, Homo sapiens
gggtggagtgtaggccagggggttggcggtgccgtgtcatggaggctcagtctctgagcagccattgaagcggaaggaactgcgggtgtgtgtgtgtatgtgtgtgtgtatgtgtgtgcgcgcgtgcgtgcgtgtgtgtgcgcgcgctagtgtgtggacaaggaggtgggggcagctgagttagagtcccaactcttggactccatttgctattctcttctttctcccccacacctatctggtggtggtagtgggcgtttatatttgcgttccttttcattcatttctaaatctcttaaaaattttgggttgggggtattggggaaggcaggaaagggaaaaggagagtagtagctgaagagcaagaggaggacatggagatgaagaagaagattaacctggagttaaggaacagatccccggaggaggtgacagagttagtccttgataattgcctgtgtgtcaatggggaaattgaaggcctgaatgatactttcaaagaactagaatttctgagtatggctaatgtggaactaagttcgctggcccggcttcccagcttaaataaacttcgaaaattggagcttagtgataatataatttctggaggcttggaagtcctggcagagaaatgtccaaatcttacctacctcaatctgagtggaaacaaaataaaagatctcagtacagtagaagctctgcaaaatcttaaaaatttgaaaagtcttgacctgtttaactgtgagatcacaaacctggaagattatagagaaagtatttttgaactactgcagcaaatcacatacttagatggatttgatcaggaggataatgaagcgccggactctgaagaggaggatgatgaggatggagatgaagatgatgaagaggaagaggaaaatgaagctggtccaccggaaggatatgaggaagaggaggaggaagaggaagaggaggatgaggatgaggatgaagatgaagatgaagcaggttcagagttgggagagggagaagaggaagtgggcctctcatacttaatgaaagaagaaattcaggatgaagaagatgatgatgactatgttgaagaaggggaagaagaggaagaagaggaagaaggaggtcttcgaggggagaagaggaaacgagatgctgaagacgatggagaggaagaagatgactagatcattctaagaccagattctctaatgtttctgggtgtgcaatagagtgatcacatctttgtttcttcatgtacgatagctatccctacagaagataatgtgtaactttttataggaaaagtgtggttttactatttttgccttatcattccaaataagaactagtctgttaatgatcatattgtatgtagagaaaaattttcattgactcccattgtggaattccctagcaatttatttagacttaattttttaaattcaagcttactgtattagtcatttttagcccataattaaaacatgatcacttttacacaggtgtagtatggtgcatttcattccttatttataaattaactgaaattacagtttgctataatataaaatgacaatagtctcttgagtggtaagttggttatttttttagaggtgatccaggaatctttagtttgaaggcagttaccttttttttttttttttttttttggactaagagtgtttggttgcttttttgtcacaagtaacttggaaaatagaagcagaatagtaaaggttctattcagcaacatagttcatggattttgtggaggttctattcagtaatatggttcatggatttagtggtgactgataagattttatttttgaaggaaaaattgcttatactaagtccagagacatgcaggtgagcccttttgtcaggctgcaaatcatgacatgccgatggttgtttattttgtttttaggtgtgcattctttttcttcttagcaattcctttatgatcaccttcccttcttgtttcactccctcccgctctctcaaaaggaacttgggaaacttgtgaaacccaggaaaacctttagtcttatacctcaactacctttcagtcctgtctgggttttaaataagtgaagtagaagaaattgagtattttctgacataagaatatattatcaatacagttttatgcagtaagctctccttaccataaatgtttcttggttgacaacatctaagacaatattagtgggatgaagaaagaaaagcaggggtgcttttggaagcagtgttagtgttcctcaaaagtcggaacaattgcctgttgatatattaataagacattaaagtcaaattttaatgttggcctctcaaatgatttggataccactctgcaaagtatttctaacctttaattcccagttttaaaacagatataataatagcatttaattggaatatactaggcagctggaaaagtatttgaaactaaattgacattaaaattaagatttgttttcaagtggatgtccattaaaagtagaaaaatatttgggataagtgagtgtgtgtttccttacatggctactaaataaaatataatgagtatacaagtatatctcctcttttgctatggaggctccatgttcaaggcaatggctttttaaatcttggctatctaaaattttttccctttgttttgaatatttgtaagtttttaagaagttagtgtcagcaaattaattgaagttatgcttctatactgggacatatttaaatactgagtatagtactgctgctactgcttctacaatgtaaaatgtatgacttggtgttttaaagtaaaaattatgatgttacttgtggagaaactaaaaatgttgtacaactgaccgaaagaaaacccttggggataagtttagtgaggggattggaatccccaaaaagataacatttttcttctgcttttaaaaactgaaattccctgttctagttcctaacaattctcattacatactatgccagattacaaaatacttatttttaaaatgaaatctatatattgactttcttatcaatcatcttactgtgcaatcaaaattagagtactttggtttgaaaacaacacttagagcctccagataacttttaagacttatttagctttgtgggtggtattttcatgcaaataagtaagggtgggttttatattttgtagaagttttcggtcctattttaatgctctttgtatggcagtatgtatatattgtgttaagttcctcaagaatctccttaaaaactttgaagttaatacttttgtgcaactgtgttttgaataaagccatgacagtgttaaaaacaaacaaaaaaatttgcagtactcctgattattcttttattgtttttgactgttccctgtttttttctgtgactgctgtaacttaaagtttttgaaactgaattgcttcaaataaattgaagatttgttataatgattataaaaaaaaaaacaaaaaaaaaaaaaaaaaaaaaaaaaaaaaaaagaaaaaaaaaaaaaaaacaaccaaaaaacggagggcgcaaaacaaaaactcagaagccagacaagaataccaaccaccatagacgaaagagaacaccaagggcacacaaagaacaaacagccgagcaagaaaaaaaacaaggagagaagaaaaagcacaatgcacagaggaaacatcctcggggggacaaagtaacacaaccaaacaagcacgcgacacaaagaagatcgtgaggccacaccacggcgcgaaccccgaaacaccaaaccccgcctaggcgagtaagccacggccgcccacaggtgggcgccagaccaaacagacggacacagaag

SEQ ID NO: 12989 - DNA, 1120 bp, Homo sapiens
  misc_feature 1, 2, 3, 1120: n = A,T,C or G
nnnagggttggagggtcgggttagttaatctactgttgattgtgttgtatggtgaaagattcttttcgtggtctgtactgatggagtgatttgactttggttgttaggttctaagttatggggtgtggcattccttgtatgtatgttaggtatggattttgtcgttgttctcatgtgccattttgtttgttgtcttgattttccatgtttctttggtcttttcagttgttttcttgcctgttgcttgtgtgttgtgtgtgtatgttgcggtggtagtgatttgttgtctgttcagtcgtcgttgtaggctatggtgtgcttctatgtaatgattattagtttgggatgttgtccaattgttgattggcctgtggatgtgaatgtgaccgatgcctgagtaaggatgtatagtattgttgacaaagtgtacctttgatagtctttgtacagttcggatgctcctccatggagttgcgtgtggattcttagaagcacacaggctacgtcggtcttaaagaatcagggagcgacttgttacatgtaacatgcctgctacagacgttatttttcacgaatcatgctacgaaaggctgtgtacatgatgccaaccgagggggatgattcgtctaaaagcgtccctttagcattacaaagagtgttctatgaattacagcatagtgataaacctgtaggaacaaaaaagttaacaaagtcatttgggtgggaaactttagatagcttcatgcaacatgatgttcaggagctttgtcgagtgttgctcgataatgtggaaaataagatgaaaggcacctgtgtagagggcaccatacccaaatattccgcggcaaaatggtgtcctatatccagtgtaaagaagtagactatcggtctgatagaagagaagattattatgatataggacaccatacccaaattattccgcggcaaaatggtgtcctatatccagtgtaaagaagtagactatcggtctgatagaagagaagattattatgatatccagctaagtatcaaaggaaagaaaaatatatttgaatcatttgtggattatgtggcagtagaacagctcgatggggacaataaatacgacgctggggaacan

SEQ ID NO: 12990 - DNA, 398 bp, Homo sapiens
aggtgcgaggaggtgaggctggagcgcggccccctcgccttccctgttcccagcttagtgtgtgccttgcctagtttcacttgatactcttcaggaattatgtagaaaagaaaagctcacatgtaaatcgattggaatcaccaaaaggaatctaaacaattatgaggtggaatacttgtgtgactacaaggtagtaaaggatatggaatattatcttgtaaaatggaaaggatggccagattctacaaatacttgggaacctttgcaaaatctgaagtgcctgttactgcttcagcaattctctaatgacaagcataattatttatctcaggtaaagaaaggcaaagcaataactccaaaagacaataacaaaactttgaaacctgccattgctgagt

SEQ ID NO: 12991 - DNA, 464 bp, Homo sapiens
ccgggtatttcttgctgcttggaactactttgcagtgattacttggatgcagtccaagtactctttggaaggcttgtttctcggccaagaatggtactccaagacagccatccatttgtagctattctcgagcctgtttgaggattagaaagaggatctttaataatcctgaacattccttgatgggcctagaacagttttctcatgtttggattttgtttgtttttcacaaaaatggtcatttgagctgtaaggcaaaagtgcagcctcctaggctgaatggtgcaaagactggagttttttccacaaggagccctcatcgtcccaatgcaataggactgaccctggccaagctggaaaaggtagaagccttggggaaatggacagatatcatggctgcagtgctgatgtcaactgtgctgtgtggcaggagtctgggatgaatcacactacaaggacaaaca

SEQ ID NO: 12992 - DNA, 1761 bp, Homo sapiens
gcgggcgactgaagcacgcaaaggcaggtgagccgacggggcatcggagagtgcctgaccgaggccagggaggggtggacgccagtgcgcgacaagagagcgtcgtgagtgcgcggcgacggacacagggagggggtgtcaggaggagggggagacaaggtgaccgcccgagaaaggccgagcgaagatccgggtacaatgggtgtgcacacacgtgacaggttggcccgtagatggcccagacgccatatatggtacacaggtgtcacatgtgtgtcaaatgaagttgtacaccccagggatccgtggtcgaaatgtgtatctagaagagccaggatcttcttgggaatcccggtggcattttacgtgggccgcacgttcttgggtgtttatgaaacccgaatgacgccgcctggttaagtccccatgacccagtttttcccgtgaggctgagaggcgctgggagaaaatgccgaaagtcggcgctatcggagatcgtctattttgttttgttttttttcgtttttgttattcggcacaaggggatatatgttgagggtacagagtgacactgaacagatcacaaagcacgagatacattagttctctccctccccagcgtctccttcgtctcctggttttccgatgtccacagagtgagattgtccctaagtaactgcatgatcagagtgctgtctttataagactcttcattcagcgtatccaattcagcaattgcttcatcaaatgccgtttttgccaggctacaggccttttcaggagagtttagaatctcatagtaaaagactgtagaaatttagtgccagaccaagacgaattgggtgtgtaggctgcatttctttcttactaatttcaaatgcttcctggtaagcctgctgggagttcgacacagtggtttgtttgttgtctccagatgccacttcagaaagatacctaaaataatctcctttcattttccaagtagaacacccttactttctggttgtgtagcattgggaataagatatttgtccaacagctcaacaaaagtagttctgaaggagtccaagcttcgtatacagagcaatattttcgaagagttgttttagaatgtggcatcctgaaaaactggttaagaggcagtaagtaccaagctcttcttcacattctttcagatgctcttaaaagttggtctacatttcatgaattatggaactttctctgctgcctttggaatgcatgacatacttcatctgaataccagatgtaccagaacatcattgcagatgtcctgcagttctgcctctatcttctcacggtactctttgcccatctgctgcttcttctcattcctctctgttttctgctcaatgctggagatgacacgccaggaagagcggcgggcgcctaccacattcttgtaggcaacagagagcagatttctctcttcgttggagagttcatgcccctgttctgtgactgccttcatggctgcagccatatcatcatagcgctcagcctgctcagcgagtttggctttctgtaccagctcacttttatccattgtcattcccgtgggagggctgcagggaacaaagacccttccgagcgaagctccgagcgagatgacctcttccttcctaagcccactactcaggcggcggcagcggtgcctgcagtggctgcagcggcggcggcggcggcggcgaccacccccgcgcgcgcgcgcgccgcccggacgcgtgggtcgactccctatag

SEQ ID NO: 12993 - DNA, 422 bp, Homo sapiens
  misc_feature 1, 422: n = A,T,C or G
nctatggactgattacgaatttaatacgactcactatatggaatttggccctcgaggccaagaattcggcacgagggagcagtgaactcagaggtgctggtggacgggctaggactttggggttaggccatggggctctttctctgaaggccactttcctgacgtactctctgtacataactcagcgtccgtgactgcagtaacagccagccctacccagagtatttctgagccatgaggggcccaccagattggttctgaattggattcatgcccagcgcattagcatagtaactcctttcagattttttggaggccacctccatgaggcatagtccaagacgacatctctcgtactgtagaccttgtagctttatctcaatctgcgatcatataggtgctcttcccgcagaattttgagn

SEQ ID NO: 12994 - DNA, 716 bp, Homo sapiens
ccacgcgtccgccaagaggttggccagctcctgggtcataaccccagggatgtataccagcagtaccggtcacttacgcgtcagagcagtgactttgatacgcagtcaggtttttccattaatagtcaggtctttgctgcagatggtgcctccactgagacttccgcatctgggacctcccaaggagaggcttcaactccagaggagtctcgagatgggaagaaagataaagaaggggaccgggcctctgaggaaggcaaacagaaaggcaagggcagcaaacctttaatgcctacctccactatccttcgtcttctggcagagttggtgaggtcctatgttggtattgctaccctgattgccaactacagctacactgtgggccagtctgaactgatcaaagaggactgcagtgtgctagcttttgttctggaccacctgctcccacatacccagaatgcagaagacaaggacacccctgccttggcccgcctgttcctcgcaagcctggctgctgcagggagtggcacagatgcccaggtggccctagtgaatgaagtaaaagcagcccttggacgggcactggctatggctgagagtacagagaaacatgccaggcttcaggcagtgatgtgtatcatcagtactatcatggagtcctgcccctccacctccagcttctacagcagtgccacagcgaagacccagcacaatgc

SEQ ID NO: 12995 - DNA, 926 bp, Homo sapiens
  misc_feature 1, 2, 3, 4, 925, 926: n = A,T,C or G
nnnnaagagtcgcgcccccggggagggagcagcactggcccattctgcagatggggacatcgagtcacgggctggctacgaactcctcgggggcgaaggtggcggagagggatgggttccaggacgtcctggcgcccggggaaggctcggcgggacggatttgcggtgcgcagccagtgccgttcgtccctcaggtgcttggcgtgatgatcggggccggagtggcggtggtggtcacggccgtgctcatcctcctggtggtgcggaggctgcgagtgccaaaaaccccagccccggatggcccccggtatcggttccggaagagggacaaagtgctcttctatggccggaagattatgcggaaggtgtcacaatccacctcctccctcgtggatacctctgtctccgccacctcccggccacgcatgaggaagaaactgaagatgctcaacattgccaagaagatcctgcgcatccagaaagagacgcccacgctgcagcggaaggagcccccgcccgcagtgctagaagctgacctgaccgagggcgacctggctaactcccatctgccctctgaagtgctttatatgctcaagaacgtccgggtgctgggccacttcgagaagccactcttcctggagctctgacgcacatggtcttccagcggctgggcaggggtgactacgtcttccgagcgggcagccagatgccaggtctacgtggtgcaggacgggcaatgatggagacccaggactgccaagggccctgaacgggaaggagaagcagagaaaaacggaaaggatacacggagagacaggggtacaagaacctcactagaatacatggaagcatacaacagggcagcaaaatccaaagggacgggtataccacgagccgaggactacacaacgaatgatgacaagann

SEQ ID NO: 12996 - DNA, 376 bp, Homo sapiens
accgcttatgccaggccgatcccgacctggactcagacaaggatgaaacaggcgcctatttaatcgacagagaccccacctactttgggcctgtgctgaactacctgagacacggcaagctggtgattaacaaagacctcgcggaggaaggagtgttggaggaagcagaattttacaatatcacctgattaaccaattctccagcattaggacttacctccttctttttgtaaggtctcttgtatgttgttaaatgtttggcttaaacaatttataaaagcctttctagaaggcagacttagccccagcagagcctgccttctagaaagactttctataaaatgtttggcttaaacgatttcccacgcgtccgcgg

SEQ ID NO: 12997 - DNA, 2511 bp, Homo sapiens
cgtccggccagcaaggccagagtgaaagcaaaatgacaactactcagaaacacgatctcttcacgccggagcctcactatgtccctggctatgccggcttctttccgcagctgcgctaccaggtggggaacacctatgggcgtaccacggggcagctgctcacagaccccagtgtgcagaagagcccctgctctgtgctgtcccccatgtccaaacccaagttcattgaggacttcagccagtccaagcccccgagggttccctgccaagacctgacggagccctacatcccccactacaccagtctgaagccctctaagaactttgagattctgggccagctcccacccttggaggtggacgcccaggagccgccaggggtagagaacatacccagacagattctgctgcctgcaggcttcacgcccgacaccccgcaccctccgtgcccaccaggcaggaagggagactccagagacttgggacacccagtatacggggaagaggcctggaagagcgccactcctgtttgcgaggcccccaggcagcaccagctgtaccactgccagagggatgagtacccaccccccgcccgccgccagcaggagacgctagatgtgggcagcttccagcggctgccgcagctggaccaccctaacctaatccaacgcaaggccatctcaggctatgctggcttcattccccgtttcacctgggtaatggggttgaattaccgagacggcgtcatgcaagccatggacgaattcgacaagagccagttcctgtttagaaacccccactgtgacctgggcgagaagctgcctggaacacactggcccagcaaccacatctacagcagccaaggcctgatccccttctacatggggttcatccccgccatgcaggacaactacgccctgacattcggcaacagcacccggagggcctactggaaggaatgggcaaagcgaaaccacacactatgaaaatgctttaatggtggtgtctgtacagcatggatgtggacagggaaaacagcaagtgcacacagtgggacaggccacaggacaggctgggagtgaataaagagttcacactgcttccctgctttccccagtgactgaaggctctaggccacctcctcctcagcctcctcctcgaactcgccctcctcctcggctgtggcatcctggtactgctggtactcggacaccaggtcattcatgttgctctcggcctcggtgaactccatctcgtccatgcccccgcccgtgtaccagtgcaggaaggccttgcgccggaacatggccgtgaactgctcggagatgcgcttgaacagctcctggatggccgtgctgttgccaatgaaggtggcggacatttttagcccccgaggtgggatgtcacagacagccgttttcacattgttggggatccactcaacaaaatagctgctgtttttgttttggacattaagcatttgctcatccacccccttcatggacatgcggcccctgaacacggcggcaaccgtcaggtagcggccatggcgggggtcgcaggcagccatcatgttcttggcatcaaacatctgctgggtgagctcgggcacggtcagcgcccggtactgctggctgccccggctggtcagtggggcaaagccgggcatgaagaagtgcagccggggaaacgggaccatgttcacagccagcttccgcaggtcagcattgagctggcctgggaagcgcaggcaggtgggcgtggtcagctttagggttctgaagcaaatgtcgtagagagcttcgttatcaatgcagtaggtctcgtctgtgttttctacgagctggtggactgagagggtggcgttgtagggctccaccactgtgtctgacactttgggcgaaggcaccacactaaacgtgttcatgatcctgtctgggtactcctcccggatcttgctgatgaggagggtacccatcccagacccagtccccccacccagggagtgggtcaagctggaaaccctgcaggcagtcacagctctcaagcactccatttcttctacaaacattccaagcaaccgagtcacaccaagcatccagcagccattctggtgtagtgccaccattggcccaagttgttcaccagcaccacatctgaccagaaaacgaagttgtcccaggccaggaagatcatgcaccagaagggccccagagcagcacaggagtccattggtgccagggcatccaagatccacgagcacggcagcaggggcacagtacattgccagccaggtggcactcattgtagttacacagttgatgcagttcacagctgcaggtcagcatgtccccagtggtaggtgcccagtggggtcgatgccagtgctcatcagctgatcacctcccaaaacttggcgccagatttggttgccgcactgcccaggcactgcaagtgcacgatttccactcatgatggcggcggcggcggcggggaagcaggaggaagtag

SEQ ID NO: 12998 - DNA, 1812 bp, Homo sapiens
  misc_feature 1812: n = A,T,C or G
gtcagactaactgcagatggttgctgtactttgccaacaagatgcgagtgtgtctggggcttgagtttcataggctaggtacgaggcctgctcacgttgcggccttcctcgcgtcacagccgggatgaagccgatcctactgcagggccatgagcggtccattacgcagattaagtataaccgcgaaggagacctcctctttactgtggccaaggaccctatcgtcaatgtatggtactctgtgaatggtgagaggctgggcacctacatgggccataccggagctgtgtggtgtgtggacgctgactgggacaccaagcatgtcctcactggctcagctgacaacagctgtcgtctctgggactgtgaaacaggaaagcagctggcccttctcaagaccaattcggctgtccggacctgcggttttgactttgggggcaacatcatcatgttctccacggacaagcagatgggctaccagtgctttgtgagcttttttgacctgcgggatccgagccagattgacaacaatgagccctacatgaagatcccttgcaatgactctaaaatcaccagtgctgtttggggacccctgggggagtgcatcatcgctggccatgagagtggagagctcaaccagtatagtgccaagtctggagaggtgttggtgaatgttaaggagcactcccggcagatcaacgacatccagttatccagggacatgaccatgtttgtgaccgcgtccaaggacaacacagccaagctttttgactccacaactcttgaacatcagaagactttccggacagaacgtcctgtcaactcagctgccctctcccccaactatgaccatgtggtcctgggcggtggtcaggaagccatggatgtaaccacaacctccaccaggattggcaagtttgaggccaggttcttccatttggcctttgaagaagagtttggaagagtcaagggtcactttggacctatcaacagtgttgccttccatcctgatggcaagagctacagcagcggcggcgaagatggttacgtccgtatccattacttcgacccacagtacttcgaatttgagtttgaggcttaagaagctggatctcctgccgggcgtggtggctcatgcctgtaatcccaccactttttttttaaggcaggcggatcacctgaggtcaggagtttaagaccagcctgaccaacatggagaaacctcgtctctactaaaaatacaaaaattagccaggcatggtggcacacgcctatagtcccagctactcaggaggctgaggcaggagaatcacttgaacccaggaggcagaggttgcagtgagctgagatcacgtcattgcactccatcctgagccacaagagcaaaactccgtctcaaaaaaaaaaaagaagaaggtggatctccaaccaggccagagaagattctcacagaaggttttgaactctaagaaataaattggtttggtaataaatggcttctggtcaaccagcacacacaaacacacgaacacacacaaggggggggcgcgcaaaaaagcccacagggagaggccagcatagacagacccccgacgcttgtggacaacaggggggcccaaaaagggagggacataaacgagaggcgcggcagccgtataaacagcgcggatagcggggaaaaacatcacaaggacatggagggaaccaaccggcgggcggcagcatggaaaccacacgaagataaaccgcgaaaacaacagagcacgacgaaaccgagggcgtgacagtgtcgcatacaacacgaaggacgan

SEQ ID NO: 12999 - DNA, 2650 bp, Homo sapiens
  misc_feature 1, 2650: n = A,T,C or G
naggggtcaggtacgaggggcgtcacgcgcgtgcgggtttccagaagcgctgccgccaccgcatcgcgcagctctttgccgtcggagcgcttgtttgctgcctcgtactcctccatttatccgccatgataagtgccagccgagctgcagcagcccgtctcgtgggcgccgcagcctcccggggccctacggccgcccgccaccaggatagctggaatggccttagtcatgaggcttttagacttgtttcaaggcgggattatgcatcagaagcaatcaagggagcagttgttggtattgatttgggtactaccaactcctgcgtggcagttatggaaggtaaacaagcaaaggtgctggagaatgccgaaggtgccagaaccaccccttcagttgtggcctttacagcagatggtgagcgacttgttggaatgccggccaagcgacaggctgtcaccaacccaaacaatacattttatgctaccaagcgtctcattggccggcgatatgatgatcctgaagtacagaaagacattaaaaatgttccctttaaaattgtccgtgcctccaatggtgatgcctgggttgaggctcatgggaaattgtattctccgagtcagattggagcatttgtgttgatgaagatgaaagagactgcagaaaattacttggggcacacagcaaaaaatgctgtgatcacagtcccagcttatttcaatgactcgcagagacaggccactaaagatgctggccagatatctggactgaatgtgcttcgggtgattaatgagcccacagctgctgctcttgcctatggtctagacaaatcagaagacaaagtcattgctgtatatgatttaggtggtggaacttttgatatttctatcctggaaattcagaaaggagtatttgaggtgaaatccacaaatggggataccttcttaggtggggaagactttgaccaggccttgctacggcacattgtgaaggagttcaagagagagacaggggttgatttgactaaagacaacatggcacttcagagggtacgggaagctgctgaaaaggctaaatgtgaactctcctcatctgtgcagactgacatcaatttgccctatcttacaatggattcttctggacccaagcatttgaatatgaagttgacccgtgctcaatttgaagggattgtcactgatctaatcagaaggactatcgctccatgccaaaaagctatgcaagatgcagaagtcagcaagagtgacataggagaagtgattcttgtgggtggcatgactaggatgcccaaggttcagcagactgtacaggatctttttggcagagccccaagtaaagctgtcaatcctgatgaggctgtggccattggagctgccattcagggaggtgtgttggccggcgatgtcacggatgtgctgctccttgatgtcactcccctgtctctgggtattgaaactctaggaggtgtctttaccaaacttattaataggaataccactattccaaccaagaagagccaggtattctctactgccgctgatggtcaaacgcaagtggaaattaaagtgtgtcagggtgaaagagagatggctggagacaacaaactccttggacagtttactttgattggaattccaccagcccctcgtggagttcctcagattgaagttacatttgacattgatgccaatgggatagtacatgtttctgctaaagataaaggcacaggacgtgagcagcagattgtaatccagtcttctggtggattaagcaaagatgatattgaaaatatggttaaaaatgcagagaaatatgctgaagaagaccggcgaaagaaggaacgagttgaagcagttaatatggctgaaggaatcattcacgacacagaaaccaagatggaagaattcaaggaccaattacctgctgatgagtgcaacaagctgaaagaagagatttccaaaatgagggagctcctggctagaaaagacagcgaaacaggagaaaatattagacaggcagcatcctctcttcagcaggcatcactgaagctgttcgaaatggcatacaaaaagatggcatctgagcgagaaggctctggaagttctggcactggggaacaaaaggaagatcaaaaggaggaaaaacagtaataatagcagaaattttgaagccagaaggacaacatatgaagcttaggagtgaagagacttcctgagcagaaatgggcgaacttcagtctttttactgtgtttttgcagtattctatatataatttccttaatttgtaaatttagtgaccattagctagtgatcatttaatggacagtgattctaacagtataaagttcacaatattctatgtccctagcctgtcatttttcagctgcatgttaaaggaggtaggatgaattgatcattataaagatttactatttatgctcgagtggccctctttccagggtgaacctctccggcacgccatgaggtggctccctggctggagggcccttgtggggagacctcgtgcccacagcggggccgggtatagggcgcccagagcgcgcacggggcgcgcggggggggcaaaacgcgacgctctttggctaagacggggggcgctccctaaccgcgcgcn

SEQ ID NO: 13000 - DNA, 141 bp, Homo sapiens
acttcccaggaactggggacctacgggatatcggggctggcaaaggcaagctggacgtccagttctcaggactcaccaagggggatgcagtgcgagatgtggacatcatcgaccaccatgacaacacctacacagtcaagt

SEQ ID NO: 13001 - DNA, 1694 bp, Homo sapiens
  misc_feature 1692, 1693, 1694: n = A,T,C or G
tcgacccacgcgtccggtcacgccgcggtgcgactgaggcgtggcgtctgctggggcacctgaaggagacttgggggcacccgcgtcgtgcctcctgggttgtgaggagtcgccgctgccgccactgcctgtgcttcatgaggaagatgctcgccgccgtctcccgcgtgctgtctggcgcttctcagaagccggcaagcagagtgctggtagcatcccgtaattttgcaaatgatgctacatttgaaattaagaaatgtgaccttcaccggctggaagaaggccctcctgtcacaacagtgctcaccagggaggatgggctcaaatactacaggatgatgcagactgtacgccgaatggagttgaaagcagatcagctgtataaacagaaaattattcgtggtttctgtcacttgtgtgatggtcaggaagcttgctgtgtgggcctggaggccggcatcaaccccacagaccatctcatcacagcctaccgggctcacggctttactttcacccggggcctttccgtccgagaaattctcgcagagcttacaggacgaaaaggaggttgtgctaaagggaaaggaggatcgatgcacatgtatgccaagaacttctacgggggcaatggcatcgtgggagcgcaggtgcccctgggcgctgggattgctctagcctgtaagtataatggaaaagatgaggtctgcctgactttatatggcgatggtgctgctaaccagggccagatattcgaagcttacaacatggcagctttgtggaaattaccttgtattttcatctgtgagaataatcgctatggaatgggaacgtctgttgagagagcggcagccagcactgattactacaagagaggcgatttcattcctgggctgagagtggatggaatggatatcctgtgcgtccgagaggcaacaaggtttgctgctgcctattgtagatctgggaaggggcccatcctgatggagctgcagacttaccgttaccacggacacagtatgagtgaccctggagtcagttaccgtacacgagaagaaattcaggaagtaagaagtaagagtgaccctattatgcttctcaaggacaggatggtgaacagcaatcttgccagtgtggaagaactaaaggaaattgatgtggaagtgaggaaggagattgaggatgctgcccagtttgccacggccgatcctgagccacctttggaagagctgggctaccacatctactccagcgacccaccttttgaagttcgtggtgccaatcagtggatcaagtttaagtcagtcagttaaggggaggagaaggagaggttataccttcagggggctaccagacagtgttctcaacttggttaaggaggaagaaaacccagtcaatgaaattcaatgaaattcttggaaacttccattaagtgtgtagattgagcaggtagtaattgcatgcagtttgtacattagtgcattaaaagatgaattattgagtgcttaaagaaaaacacaaaaaagggggggggccaaaataccccggggccaaacgcgcccctttttgaaggggccaaaggggatagaagagcggcggtaacgccgggaagcacgggcgtcggacacctggggtggcacacacacgcaaaatgtcacgccgtgtaagacacacccgagggatcatgtcgcatcnnn

SEQ ID NO: 13002 - DNA, 2500 bp, Homo sapiens
aaaatttaaaaagttagctagtcactgacggataacaggatgcacaaagcatttaatttcaaagccaaatttgcatttcaattatagtatttggctgacaaggcaagtatgtaaacaagaggaaaagttaaaaagaaaaaagccctaatagctacaatatcagcccagttctaaagagggatcttgtaccacattgtccacctaacaagtaatctttaattcaaaattcagcgtagttcttatgggtatttggaattgaatgcaagtgtgttctgtgagtataaacattatcttttattatatatgattgttaaactttgctttccacaacacttcataaccttggatgtaaacatgagaaaaaatgctaattaagaatccttacgcacccagtccagtgctcccttaattaatcaaactggtaagtctactgcttcttgattccatcctgaggtattaacttttgaaccaagacatgtttatcttttaccaacaacagggatggtcactgttaaagtttctaaataatttattagggaaataagttcccacaaagtcaggctgaactgggagctgattaacaaagctgtgtaagttagtgtgtttgctttaaggtattacaagaagtacacagagcacacatctgggttataaaagcccttttataaagccatttttaaacaaaacaaaaaaaaagtttacaaaagaaaaaaagatacagaaaaagaataacttgcttcatatgtcccaaaaagagaaaaaaataaaggggacaatgccaacatgctcaacaataaaggcttctttttcttatttttttaatacaaaatacaagcaaaggatacacatacttaaaacagagctcaggagcagacacgcagtcctggaaacccttcaataaaagcaaagcaggagtttgttttttctttgtctatgcagatacatacagagactgggatatgtaaaaattaagtatcacaaaagaccatcacacgattctaccaatgcatgttgcatctgtaattcacgaacatggtcaacaaaatcatgttcacttcaaccccatttcatttaaattaaagaaaaaaaccttttaaataaagtggttacattcaaactttaacttccttagtaccatgctgcagatttcagcactgttaaggtattgcaagaatgcccaaccctctggtgtctgatcatgtatctagcaacattgcagtatgaagaaaagagatgccccggtctcagcccatggactagttaatacagtgaagcaggttcctgtcttttacccttcctgctcagaacataaaagattaaggactaaaatcaaggaagactgggagttttagagctggcaaaatgaagtctaaaagataaatcaaggcaaacaattactgagaacttggctgttgcttaacctggcaagtctaaaagcctttctttaaccttgtaggaattagatgcataaggtttgctgcaacatgttcatggtaaacaaactaagtagagctcttatttacaaatcttgtaacaaatacttctggaggaaaaagagaaaagaattcactaagttccagaagacaaagctttaattgccagacgtatacaaacacacactcacacgtacacacccacacaatacttcaggggtttttatacatgttattttagggcataagctgagtactatacccccacaccccatcaaaaaaggaacaacaaaaaaatcccaattttaccctcccccaataatctagaaaaccctcccttcacccctgatgtacaaagtgtatgcacaacggtggcattctaccagccacacaaagcatgctcaaacagatgtcaccagttcagtcactccattggcatggcaacaggcaggtttacgggatgtttcccaatagtggttattacacagtcagcaccactgtgaattttgtgaatttgaaaaaaaaaaagtgtaatttatggattcaggattcaaaaagaatcattttgtatcgaatttaccccagacaaagggaaaactggttgcgactgaaacttggctatagatagcttgatgtcccaatattcaaacaataagccaactctccattttcaagtaaatccagcttcatccacagagaaacagacaattttctaacctcaagagcaaccagcttgttacattttccctatcctatggcaggaaatgcgtattacttctgttctgtttaagcatctcagtctaaatgccatgaagaccagagcccaggtttcttccttttcaaattcttaaggtgaaagttttttcctttcagtgcagctaccaatgatgcaggcaaagaactgttcaagccagcactcattcttcaaagctgcaacagtggccaccatgatcttttacaaagctttccccgttgctcctgatatttatttctgcttttgcctaacgctctcaaagcatctcgtaaactgaagtttaaagaaaagcacgattcccatccccaaccag

SEQ ID NO: 13003 - DNA, 3034 bp, Homo sapiens
agggagtcgacccaggcatgtctactaggatgttttgatgacatttaaactcagcatgttctgaatcaaactccttcgctttcttcctacagtcactccttgctctgtgttcaagtcacaatcaagggcattactgtccaatcaactgcacaaggtagaactcaagtgatcacccttgacaagttgctctccttcagcccctgcatcccatccatcaagttccttccatttaaccccctaaatgtctctcaaatctgtccacccctcttcatctctgcagaccccactgttgcaccctcattctcacatctcacttggattattcagatatcctcctggaacactgctctgattcattctccatagtacttccagagtgacgttttcaataccaaggccgacgggacccctaaagttctgcttctgtcggggcagcccgcctccgccgccggagccccggccggccaggccctgccgctcatggtgccagcccagagaggggccagcccggaggcagcgagcgggggggctgccccaggcgcgcaagcgacagcgcctcacgcacctgagccccgaggagaaggcgctgaggaggaaactgaaaaacagagtagcagctcagactgccagagatcgaaagaaggctcgaatgagtgagctggaacagcaagtggtagatttagaagaagaggtaaaactacttaagaaccaaaaacttttgctagaaaatcagcttttacgagagaaaactcatggccttgtagttgagaaccaggagttaagacagcgcttggggatggatgccctggttgctgaagaggaggcggaagccaaggggaatgaagtgaggccagtggccgggtctgctgagtccgcagcactcagactacgtgcacctctgcagcaggtgcaggcccagttgtcacccctccagaacatctccccatggattctggcggtattgactcttcagattcagagtctgatatcctgttgggcattctggacaacttggacccagtcatgttcttcaaatgcccttccccagagcctgccagcctggaggagctcccagaggtctacccagaaggacccagttccttaccagcctccctttctctgtcagtggggacgtcatcagccaagctggaagccattaatgaactaattcgttttgaccacatatataccaagcccctagtcttagagataccctctgagacagagagccaagctaatgtggtagtgaaaatcgaggaagcacctctcagcccctcagagaatgatcaccctgaattcattgtctcagtgaaggaagaacctgtagaagatgacctcgttccggagctgggtatctcaaatctgctttcatccagccactgcccaaagccatcttcctgcctactggatgcttacagtgactgtggatacgggggttccctttccccattcagtgacatgtcctctctgcttggtgtaaaccattcttgggaggacacttttgccaatgaactctttccccagctgattagtgtctaaggaatgatcccaatactgttgcccttttccttgactattacactgcctggaggatagcagagaagcctgtctgtacttcattcaaaaagccaaaatagagagtatacagtcctagagaatccctctatttgttcagatctcatagatgacccccaggtattgccttttgacatccagcagtccaaggtattgagacatattactggaagtaagaaatattactataattgagaactacagcttttaagattgtacttttaagattgtacttttatcttaaaagggtggtagttttccctaaaatacttattatgtaagggtcattaggcaaatgtcttgaagtagacatggaatttatgaatggttctttatcatttctcttccccctttttggcatcctggcttgcctccagttttaggtcctttagtttgcttctgtaagcaacgggaacacctgctgagggggctctttccctcatgtatacttcaagtaagatcaagaatcttttgtgaaattatagaaatttactatgtaaatgcttgatggaattttttcctgctagtgtagcttctgaaaggtgctttctccatttatttaaaactaccacattagcttggctctctgtctcagagggtatctctaagactaggggcttggtatatatgtggtcaaaacgaattagttcattaatggcttccagcttggctgatgacgtccccactgacagagaaagggaggctggtaaggaactgggtccttctgggtagacctctgggagctcctccaggctggcaggctctggggaagggcatttgaagaacatgactgggtccaagttgtccagaatgcccaacaggatatcagactctgaatctgaagagtcaataccgccagaatccatggggagatgttctggaggggtgacaactgggcctgcacctgctgcggactcagcagacccggccactggcctcacttcattccccttggcttccgcctcctcttcagcaaccagggcatccatccccaagcgctgtcttaactcctggttctcaactacaaggccatgagttttctctcgtaaaagctgattttctagcaaaagtttttggttctcttcttctaaatctaccacttgctgttccagctcactcattcgagccttctttcgatctctggcagtctgagctgctactctgtttttcagtttcctcctcagcgccttctcctcggggctcaggtgcgtgaggcgctgtcgcttgcgcgcctggggcagccccccgctcgctgcctccgggctggcccctctctgggctggcaccatgagcggcagggcctggccggccggggctccggcggcggaggcgggctgccccgacagaagcagaactttaggggtcccgtcggccgggttcggcgcggctgccaccaccaccatagctccagactacgcaccgcgcaccgcgcgccgcagccgcccagccggacgcgtgg

SEQ ID NO: 13004 - DNA, 2171 bp, Homo sapiens
  misc_feature 1, 2, 2171: n = A,T,C or G
nncgacccacgcgtccgcggacgcgtgggcgccgagctcgctgtggcccggatgttcggtgcagctgccagatccgctgatctagcgcttctcgaaaaaaaccttcaggcggcccatggatttatagcgcccgtcacaaagggcaggaccgctgcaaaaaaatggaatcttaaaactttagccatcgttcgctaaaggaaatgaaaggagaaattcaacagtcgcttggagcctgggttttgcttacatgccttggactttattgtgggaagaccctattatttaaaaatggctcaactgaaatatatggagaatgtggggtatgcccaagaggacagagaacgaatgcacagaaatattgtcagccttgcacagaatctcctgaactttatgattggctctatcttggatttatggcaatgcttcctctggttttacattggttcttcattgaatggtactcggggaaaaagagttccagcgcacttttccaacacatcactgcattatttgaatgcagcatggcagctattatcaccttacttgtgagtgatccagttggtgttctttatattcgttcatgtcgagtattgatgctttctgactggtacacgatgctttacaacccaagtccagattacgttaccacagtacactgtactcatgaagccgtctacccactatataccattgtatttatctattacgcattctgcttggtattaatgatgctgctccgacctcttctggtgaagaagattgcatgtgggttagggaaatctgatcgatttaaaagtatttatgctgcactttacttcttcccaattttaaccgtgcttcaggcagttggtggaggccttttatattacgccttcccatacattatattagtgttatctttggttactctggctgtgtacatgtctgcttctgaaatagagaactgctatgatcttctggtcagaaagaaaagacttattgttctcttcagccactggttacttcatgcctatggaataatctccatttccagagtggataaacttgagcaagatttgccccttttggctttggtacctacaccagcccttttttacttgttcactgcaaaatttaccgaaccttcaaggatactctcagaaggagccaatggacactgagtgtagacatgtgaaatgccaaaaacctgagaagtgctcctaataaaaaagtaaatcaatcttaacagtgtatgagaactattctatcatatatgggaacaagattgtcagtatatcttaatgtttgggtttgtctttgttttgtttatggttagacttacagacttggaaaatgcaaaactctgtaatactctgttacacagggtaatattatctgctacactggaaggccgctaggaagcccttgcttctctcaacagttcagctgttctttagggcaaaatcatgtttctgtgtacctagcaatgtgttcccattttattaagaaaagctttaacacgtgtaatctgcagtccttaacagtggcgtaattgtacgtacctgttgtgtttcagtttgtttttcacctataatgaattgtaaaaacaaacatacttgtggggtctgatagcaaacatagaaatgatgtatattgttttttgttatctatttattttcatcaatacagtattttgatgtattgcaaaaatagataataatttatataacaggttttctgtttatagattggttcaagatttgtttggattattgttcctgtaaagaaaacaataataaaaagcttacctacataaaatttcagaacggacaaagcaagaagaacacaggatgaaacgcggaggaacggcaccacacacaacaacagaagcgaagcagagcagagagagcgacacgcgcgcgccagaccagagcagcgacgacgaccgacaagcgcgaaggcgcacaagacaacacagacaaacaagacacaaaacaaaagcacacgacagcaccacaggcaaacacaaaggcagcggacaaaccgacaaggaagagagagacactggacagaaacccctacgcacggaagcaaaaaacaccaccaagaataagagacgacccaggagcaaggacaacaccaacgagcaaccgcacgacacccaaggaccacgacgcacgcagagcaccacn

SEQ ID NO: 13005 - DNA, 1546 bp, Homo sapiens
  misc_feature 1, 2, 3, 4: n = A,T,C or G
nnnncgctaggcgcgcgcacccagcgactcggtcccagcgcgagtaaatctggggcagcgtctgcggtaggagctgcgtggcggcctaggccccttcctgcgtccgcacctggccccgcgcgcccctctcgggcgtccggcttccggcgtcctggcggctcgggtggcggcggttcgggcggccgcctggctgctcctcggggcggcgaccgggctcacgcgcgggcccgccgcggccttcaccgccgcgcgctctgacgccggcataagggccatgtgttctgaaattattttgaggcaagaagttttgaaagatggtttccacagagaccttttaatcaaagtgaagtttggggaaagcattgaggacttgcacacctgccgtctcttaattaaacaggacattcctgcaggactttatgtggatccgtatgagttggcttcattacgagagagaaacataacagaggcagtgatggtttcagaaaattttgatatagaggcccctaactatttgtccaaggagtctgaagttctcatttatgccagacgagattcacagtgcattgactgttttcaagcctttttgcctgtgcactgccgctatcatcggccgcacagtgaagatggagaagcctcgattgtggtcaataacccagatttgttgatgttttgtgaccaagagttcccgattttgaaatgctgggctcactcagaagtggcagccccttgtgctttggagaatgaggatatctgccaatggaacaagatgaagtataaatcagtatataagaatgtgattctacaagttccagtgggactgactgtacatacctctctagtatgttctgtgactctgctcattacaatcctgtgctctacattgatccttgtagcagttttcaaatatggccatttttccctataagttttatgtagttaaatgcttcctagaaacctaaataagatctattaatttctgacgagaggtgttcttctagaattaattacttttatcttttgtcttcatttgtggccaaaattatgtttactagaggaaatttgggatcattctcagctaattccaaaatgtagtgctctattgcatggatccttggtaatcctcaagcatcagatgccataaggggaaacttaattctgctaaattaatgtttattttgtgagaagtgactttatcttcatttggggtagaaaaattatttctttatgtagtagagacaaattattctcattttgcaagtactttcaatttaagctacaaattgagaaaaccgttataaataagaataaaataggccaggcacagtggctcacacctgtaatcccagcactttgggaggccgaggtgggcggatcaccagaggtcaagagtttgagaccagttgggggaaaccctgtctcactaaaaatacaaaagtagttgggctgctggtggggcattcgtagccccacaatgggagggtacgggaggcatctgaccggcagcggggggtccaaaaacacaaagccatgagccaacggggag

SEQ ID NO: 13006 - DNA, 317 bp, Homo sapiens
  misc_feature 309, 310, 311, 312, 313, 314, 315, 316, 317: n = A,T,C or G
accattgttgattgataagtagagatacattttttatgatgttcatcacagtgtggtaaggttgcaaattcaaaacatgtcacccaagctctgttcatgtttttgtgaattctaggctggtgctgcactgaaatagagcagtaagcttgtgataaaggccaattccaggtagctcttgaaggtgatggccatctactttccagtggctgccaaccacatgaagtgccatataacactgaagaggctctatataggtccaagacaattcaacacaacccttgatgattaattcaatcaacttggatgagnnnnnnnnn

SEQ ID NO: 13007 - DNA, 2176 bp, Homo sapiens
gggagtcgacccacgcgtccggcttctccgctccttctaggatctccgcctggttcggcccgcctgcctccactcctgcctctaccatgtccatcagggtgacccagaagtcctacaaggtgtccacctctggcccccgggccttcagcagccgctcctacacgagtgggcccggttcccgcatcagctcctcgagcttctcccgagtgggcagcagcaactttcgcggtggcctgggcggcggctatggtggggccagcggcatgggaggcatcaccgcagttacggtcaaccagagcctgctgagcccccttgtcctggaggtggaccccaacatccaggccgtgcgcacccaggagaaggagcagatcaagaccctcaacaacaagtttgcctccttcatagacaaggtacggttcctggagcagcagaacaagatgctggagaccaagtggagcctcctgcagcagcagaagacggctcgaagcaacatggacaacatgttcgagagctacatcaacaaccttaggcggcagctggagactctgggccaggagaagctgaagctggaggcggagcttggcaacatgcaggggctggtggaggacttcaagaacaagtatgaggatgagatcaataagcgtacagagatggagaacgaatttgtcctcatcaagaaggatgtggatgaagcttacatgaacaaggtagagctggagtctcgcctggaagggctgaccgacgagatcaacttcctcaggcagctatatgaagaggagatccgggagctgcagtcccagatctcggacacatctgtggtgctgtccatggacaacagccgctccctggacatggacagcatcattgctgaggtcaaggcacagtacgaggatattgccaaccgcagccgggctgaggctgagagcatgtaccagatcaagtatgaggagctgcagagcctggctgggaagcacggggatgacctgcggcgcacaaagactgagatctctgagatgaaccggaacatcagccggctccaggctgagattgagggcctcaaaggccagagggcttccctggaggccgccattgcagatgccgagcagcgtggagagctggccattaaggatgccaacgccaagttgtccgagctggaggccgccctgcagcgggccaagcaggacatggcgcggcagctgcgtgagtaccaggagctgatgaacgtcaagctggccctggacatcgagatcgccacctacaggaagctgctggagggcgaggagagccggctggagtctgggatgcagaacatgagtattcatacgaagaccaccagcggctatgcaggtggtctgagctcggcctatgggggcctcacaagccccggcctcagctacagcctgggctccagctttggctctggcgcgggctccagctccttcagccgcaccagctcctccagggccgtggttgtgaagaagatcgagacacgtgatgggaagctggtgtctgagtcctctgacgtcctgcccaagtgaacagctgcggcagcccctcccagcctacccctcctgcgctgccccagagcctgggaaggaggccgctatgcagggtagcactgggaacaggagacccacctgaggctcagccctagccctcagcccacctggggagtttactacctggggaccccccttgcccatgcctccagctacaaaacaattcaattgctttttttttttggtccaaaataaaacctcagctaggctctggccaaaaaaaaaaaagaataaaaagaaaaaaattgggggcactaacacgaggacggaaacaaagagaaagtgaaggggacacggtgacaaaggagaacatgaacacaaatccgggcacaaggggagaaccgacggatcccaaaaagcagcacaatcacgcgaaagccgtgatacctgtagaagcgacgcaacagaagaagaaaagaagagagaagagacgcaaacgaagaggcacaaacagcagcaaaagaaagaagaacgacgacgaacatagacgaaccaacccacagagacccgaatagagcaaaacagacacaagaaaaacagaagacaaggaaaggcagaagaaagcaaaagagagacagcaagaagacagacaagaacagggggacacagttagcaac

SEQ ID NO: 13008 - DNA, 1974 bp, Homo sapiens
cgcgtccgcgccgcctctcactcacagcctcccttccttctttctccctccgcctccgcgagcaccagcgcgctctgagctgcccccagggtccctcccccgccgccagcagcccatttggagggaggaagtaagggaagaggagaggaaggggagccggaccgactacccagacagagccggtgaatgggtttgtggtgacccccgccccccaccccaccctcccttcccacccgacccccaacccccatccccagttcgagccgccgcccgaaaggccgggccgtcgtcttaggaggagtcgccgccgccgccacctccgccatggagctgatcaccattctcgagaagaccgtgtctcccgatcggctggagctggaagcggcgcagaagttcctggagcgtgcggccgtggagaacctgcccactttccttgtggaactgtccagagtgctggcaaatccaggaaacagtcaggttgccagagttgcagctggtctacaaatcaagaactctttgacatctaaagatccagatatcaaggcacaatatcagcagaggtggcttgctattgatgctaatgctcgacgagaagtcaagaactatgttttgcagacattgggtacagaaacttaccggcctagttctgcctcacagtgtgtggctggtattgcttgtgcagagatcccagtaaaccagtggccagaactcattcctcagctggtggccaatgtcacaaaccccaacagcacagagcacatgaaggagtcgacattggaagccatcggttatatttgccaagatatagacccagagcagctacaagataaatccaatgagattctgactgccataatccaggggatgaggaaagaagagcctagtaataatgtgaagctagctgctacgaatgcactcctgaactcattggagttcaccaaagcaaactttgataaagagtctgaaaggcactttattatgcaggtggtctgtgaagccacacagtgtccagatacgagggtacgagtggctgctttacagaatctggtgaagataatgtccttatattatcagtacatggagacatatatgggtcctgctctttttgcaatcacaatcgaagcaatgaaaagtgacattgatgaggtggctttacaagggatagaattctggtccaatgtctgtgatgaggaaatggatttggccattgaagcttcagaggcagcagaacaaggacggccccctgagcacaccagcaagttttatgcgaagggagcactacagtatctggttccaatcctcacacagacactaactaaacaggacgaaaatgatgatgacgatgactggaacccctgcaaagccagccagggggtgtgcctcatgcttctggccacctgctgtgaaagatgacattgtcccacatgtcctccccttcattaagaacacatcaagaacccagattggaccggtaccgggatgcagcagtgatggcatatagggttgtactcttgggcaaggaccagagccaagtcagggctccaaaacactagttataacaggaattaggcacaagactaaataaaaataatgcaagaacgcccagggatagatctgtagcagaggagtaaacggattgacacgtgcagagaagacatttgcaagcacaggtcgaaaagatgcgacaaagacgccaagtgagccccgcaaaagagcgactgggggaccacgagagagacacaaggggaacaacacgagggacgctcccgaagcgagagcgcaacgacaaggagcagaacggacaagcaaacacaagagagaacgagcagggaagaaggtagtagacaaagcggagagaaacagagcaaagaaaaagaagagcgaagaaacaagcgaacaaaagtgaaggagaagacgcgaagaccagagcaaacacaggacaacaagcgaaaaccatagctggaggcgcatgaa

SEQ ID NO: 13009 - DNA, 2309 bp, Homo sapiens
acatgtatttgcaaacatcatttggatttgggtcacaatagccaagcatatgaagccttaacccaaattcctgattccagcaggcaattagattgtttacggcagttggtggtagttctttgtgaacgctcacagctacaggatcttgtagagtttccctatgtgaatctgcataatgaggttgtgggaataattgagtcacgtgctagagctgtggaccttatgactcacaattactatgaacttctgtatgcctttcacatctatcgccacaattaccgcaaggctggcacagtgatgtttgagtatggaatgcggcttggcagagaagttcgaactctccggggacttgagaaacaaggcaactgttatctggctgctctcaattgtttacgacttattcgtccagaatatgcgtggattgtgcagccagtgtctggtgcagtgtatgatcgccctggagcatcccctaagaggaatcatgatggagaatgcacagctgcccccacaaatcgacaaattgaaatcctggaactggaagatctggagaaagagtgttccttggctcgcatccgcctcactttggctcagcatgatccatcagcggttgcagttgctggaagttcatcagcagaggaaatggtcactctcttggttcaggcgggcctctttgacactgccatatcactctgtcagacttttaagcttcccttaacgccagtctttgaagggcttgccttcaaatgcatcaaattgcaatttggaggagaggcagcacaagcagaagcctgggcctggctagcagccaatcagctctcatctgtcatcactactaaggagtctagtgctacagatgaagcatggcgactattatccacttacctggagaggtacaaagtccagaataacttgtatcaccactgtgtaatcaacaagctcttgtctcatggagtgcctctgcctaattggcttataaacagttacaagaaggttgatgctgctgaattgcttcgtttatacttaaactatgaccttttagaagaagctgtggatttggtgtcagaatatgtggatgctgtattgggaaaaggacatcaatacttcggaattgagtttccactgtccgcaacagccccaatggtgtggcttccatactcctctattgatcagcttctccaagctctgggagagaacagtgccaacagtcacaacatcgcactgtcccagaaaatacttgacaaattggaggactaccagcaaaaagttgataaggcaacacgggatttattatatcgtcggaccttgtgatttggattgtcacctagcctttgtaaccgcttggtgcctcttaggacttaagactaccctacaggaaccctgtactcaaggccgatttttgtaactgtaaatgatgtgtacaacattcaagtctgcattctgcacaagataggagggcggaagagtcagaggaccctgtgcttgctggtggtgctaacacaatttctggtgttcaaccttggtctcaaatagctgcttttgtatatgattcacgagcttttttagagtttatatttttttaaactaccgaagacattcattatctgcaaattaagactcaccttcactttccaaaatagctgagggttgttggcttgttgtagctgaccaccaaaagcagtcactgcaaatcttttaattcttccctatcaccttttgtattttaatgcaattattttggtccagaactgacctgtattttctgtattgtacacaaaagctaataattttgtgtactttttatttattttggaggttttatatgatcttcaattgagtattaaataatttgcctagattaagcctaaaatgatgaccagctaattaaagaagatattttgaatctggttctgagctaaagttgagtaaattcttagctaagaaaaaattggaaatccatcatctatattagcaacagattctcagagtaaattgttaacttctatgatttatgataatcaagctggacttgatcatacaagttagtctcataatgtattggaccaaaatgtaaacttcattggtcagatttagaagcattcatgctcacaagttttgggaaagtgaaaaataataaaatcatcttggattttattctgtatattaaaatttatcttttaaggaaacaatctgtatactacttgcttgtatagccttttgacccttcttgagtttttcagaagcctttaatttttatactttcaataccatatttacattatatactttaattaacaatgtgagtttctctg

SEQ ID NO: 13010 - DNA, 2674 bp, Homo sapiens
  misc_feature 1, 2673, 2674: n = A,T,C or G
ncaaaggactgctaaaggttctaccaaaactgcccaagcgtgtcattgtgcagagaattttgccttgtttgacttcagaatttgtaaaccctgacatggtaccttttgttttgcccaatgttctacttattgctgaggaatgcaccaaagaagaatatgtcaaattaattcttcctgaacttggccctgtgtttaagcagcaggagccaatccagattttgttaattttcctacaaaaaatggatttgctactaaccaaaacccctcctgatgagataaagaacagtgttctacccatggtttacagagcactagaagctccttccattcagatccaggagctctgtctaaacatcattccaacctttgcaaatcttatagactacccatccatgaaaaacgctttgataccaagaattaaaaatgcttgtctacaaacatcttcccttgcggttcgtgtaaattcattagtgtgcttaggaaagattttggaatacttggataagtggtttgtacttgatgatatcctacccttcttacaacaaattccatccaaggaacctgcggtcctcatgggaattttaggtatttacaaatgtacttttactcataagaagttgggaatcaccaaagagcagctggccggaaaagtgttgcctcatcttattcccctgagtattgaaaacaatcttaatcttaatcagttcaattctttcatttccgtcataaaagaaatgcttaatagattggagtctgaacataagactaaactggagcaacttcatataatgcaagaacagcagaaatctttggatataggaaatcaaatgaatgtttctgaggagatgaaagttacaaatattgggaatcagcaaattgacaaagtttttaacaacattggagcagaccttctgactggcagtgagtccgaaaataaagaggacgggttacagaataaacataaaagagcatcacttacacttgaagaaaaacaaaaattagcaaaagaacaagagcaggcacagaagctgaaaagccagcagcctcttaaaccccaagtgcacacacctgttgctactgttaaacagactaaggacttgacagacacactgatggataatatgtcatccttgaccagcctttctgttagtacccctaaatcttctgcttcaagtactttcacttctgttccttccatgggcattggtatgatgttttctacaccaactgataatacaaagagaaatttgacaaatggcctaaatgccaatatgggctttcagacttcaggattcaacatgcccgttaatacaaaccagaacttctacagtagtccaagcacagttggagtgaccaagatgactctgggaacacctcccactttgccaaacttcaatgctttgagtgttcctcctgctggtgcaaagcagacccaacaaagacccacagatatgtctgcccttaataatctctttggccctcagaaacccaaagttagcatgaaccagttatcacaacagaaaccaaatcagtggcttaatcagtttgtacctcctcaaggttctccaactatgggcagttcagtaatggggacacagatgaacgtgataggacaatctgcttttggtatgcagggtaatcctttctttaacccacagaactttgcacagccaccaactactatgaccaatagcagttcagctagcaatgatttaaaagatctttttgggtgaggtgtcttacttctattttgaaggattatttcagtttcaatcatgggtgagctgatttacatctttatatagttggcttggaggaagtacttctatgggaaagtgaacagttctgtgacaggaaacatctctgtccatgccagcatagtagttgtatggacttctaaccagttgagttttttaaagcattgaggattttttcctcttaccaactcctcttcaggtttttaaagacccagcccttcccaatctcaaagagaaaaaggaaactgagttatcttgaataacataactttttaatcaaatgtttattttggcttgtggatcttggtgttatttaaaaaattgaggtgatggtcattgcaagctcatctattaagtactatatggtacacagtctatgagtcattagtcttcattttaatatgtaaaaaatcttgatgctgtattgatttgtttgcatttaagatgacagtgagaaaatgataagcataaagagaagtatcaggttatttgctttttccaaacttttcagatgaactattgtttagtacagagactgagcaaatactacaaaattcaattaaccttcatttcattggtttaaatgcgttattaacatcttaagtgcaaactaatcattgttaatatattttagcctggtctgcctcaaatagtatgtattttcctgccttcacttggatatatttgaatcccttttttcctcctgtatcaggagaggatgtgccgatttggtgggatttgaccaggcccgagtgattccggataatactttattttttaattcactttcggtgtgttttatgggttccgaatttcgataccttttgtgcacgggtgcggtgttcacgagaacttgaaaaagggggcaattagggcacaccttcagaggctataaagcgccaaaagtagcttgacnn

SEQ ID NO: 13011 - DNA, 5279 bp, Homo sapiens
  misc_feature 1, 5279: n = A,T,C or G
nagctcaatccctgggcagggaaaagggggtcctcggggctccccgctcgctgtcctttttctggacaggcagttccttggccacctggtagggccgcgttgcctggcaacggcagggtccttcttggctcggcggcgctcggggcctgaggggagaaaaccgccgcggagggcactgggggtggcggcacggtccgggaggtggtcgcgcgactgctggagccaggtctccacctctgcacctgagagaagatgaacacggccgaccaggccagggtggggcccgcggacgacgggcctgcgccgtctggggaggaggagggagaggggggcggcgaggcgggcgggaaggagccagcagcggacgcggccccggggcccagcgctgcattccgcctcatggtgactcggcgggagccggccgtgaagctgcagtatgcggtgagcggcctggaaccgctggcttggtccgaggaccaccgcgtgtctgtgtccacggcccgcagcatcgctgtgctggagctcatctgcgacgtgcacaacccgggccaggacctggttatccaccgcacctcggtgcccgcaccgctcaacagctgtctcctcaaagttggctcaaaaacagaagttgctgagtgcaaggagaaattcgccgcctccaaggaccccacggtcagtcagactttcatgttggatagggtgttcaaccctgaggggaaggctttaccaccaatgagaggattcaagtacaccagctggtctcccatgggttgcgatgctaatggcaggtgcctcttggcagcactgaccatggacaatcgcctgaccatccaggcaaatctcaacagactgcagtgggtccagctggttgacctgactgagatctatggagaacgtctttatgagaccagttacaggctctctaaaaatgaggccccggaaggaaatctcggggattttgctgagtttcagaggagacacagcatgcagaccccagtcagaatggagtggtcgggcatctgtaccacccagcaggtcaagcataacaacgaaagccgggacgttggcagtgtgctcctggctgtcctctttgaaaacggtaatatcgccgtgtggcagtttcagctgccgtttgtaggaaaagaatccatctcttcatgcaacacaattgagtcaggaatcacctctcccagtgtattgttttggtgggaatatgagcacaataatcgaaaaatgagtggccttattgtggggagtgcttttggacccataaaaattcttcctgtcaatctcaaagcagtcaaaggctatttcactttaaggcagcctgttatcttgtggaaagaaatggaccagttacctgtgcacagtatcaaatgtgtgccactttatcatccttaccagaagtgtagttgcagcttagtagtggctgcaagaggctcttatgtattttggcgtcttcttctgatctccaaagcagggctgaatcttcacaattcccatgtcacaggccttcactcactgccaattgtctccatgactgcagacaaacagaatggaacagtctatacttgctccagtgacggaaaggtgaggcaggtgattccgattttcacagatgttgcattgaagtttgaacaccagttgattaaactctcagatgtgtttggctcagtgaggactcacgggatagcagtgagcccctgcggtgcatacctggccatcatcaccactgagggcatgatcaacggcctccaccctgttaacaaaaactaccaggtccaatttgttactctcaaaacctttgaagaagcagctgctcagctcctggaatcttcagttcaaaacctttttaagcaggtagatttaatagacctagtacgctggaagattttaaaagataaacatatccctcaatttttacaagaagctttggaaaaaaagattgaaagcagtggagtcacctatttttggcgttttaagcttttcctcctgaggattttatatcagtcaatgcagaaaaccccttcagaagccttgtggaaacccacccatgaggactcaaaaatcttactagtggattcgcctgggatgggcaatgctgacgatgaacagcaggaagaaggcacttcttccaaacaggtggtgaagcaaggcctgcaggagaggagcaaggaaggagatgtagaggagcccactgatgactcgctccccacgactggagatgctggaggccgtgagccaatggaagagaaactcctggaaatccaagggaaaatcgaagctgtggagatgcacttgaccagggaacacatgaagcgagtcttaggagaagtgtatctgcacacctggatcacagaaaacactagcatccccacccgcggactctgtaactttttaatgtctgatgaagagtatgatgacagaactgcacgggtgctgattggacatatctcaaagaagatgaacaaacagactttccctgagcactgtagtttgtgtaaagagatcttgccattcacagatcgcaaacaggcagtctgttccaatggccacatttggctccggtgcttcttaacctaccagtcctgccagagtttgatatatagaaggtgtttgctccatgacagcattgcccggcatccagctccagaagatcccgactggattaagaggttactgcaaagcccctgccctttctgtgattctcctgtcttctaaataatcagtgacgggaagatggaagggcatgatgaactctgccatagaaaacttcctccagcctgaagagaaggatgcactggaggaagccggaccctcacgagtggagagaagtccttggtgattgtaaagagggcccctggagctcatttctgaatcgcactctccatttccagagactaaaggatgtcctttgaaatggctggactcagagagttggagtcgttttgagatgagcattagccccagctttgtaaccaatgaggaacacttacttatttttaagtatcttgacagaagcaatttgaacacagtgtcccgtcatttctagaaacagaatggtctcttctagagagcttggataaggaccttgctgggttgagttaggttttaatccttgctttggtttggaactgccttcgggctccagaacttaaattgcttggtccgtggcatctgatgtaccaacagagattaaaagtgtaaagcaacacatgggctgatgttttgttctcagaaaatagctgctggtctgcatccctccattcttgttttttatgcatatggaaaacattttcctaaaactctatattcttaagttgaagccaagactaaaatttaatgtgtcaaatgatctggtgactattataatgaataattgtgacttatttttcattctctcctgggtcatcaggtttcctgacccaactccttaatccgtataaagatgtcaaatactgtagttcacccacgccacagccctgcttcagacttaactgtggtagcctagatgagctatttgtacacagaggaaaaaaagatattttcctcttttagtaataagactttcagtatttttaatgttgacatttccagatgtttcatttagtatccaggggtctgtctggagacttctagagagggacagctcagaagtgagacccttgagctctggtgctgtaagcttgtgcaattaagttgaacagagcctgggaatttctttcctctgcacagtcccttgatatttggaatccaggttctgcccccaacccctacccacccagtggtctgttaagatgtctcagatggggctgggcttggtggctcatgcctgtactctcaacactttgggaagcaaaggcaggcagatcacaaggtcaggagttcagcctaaccaacatggtgaaaccgtgtctctactaaaaatacaaaaattagccaggcgtggtggtgcacacctgtaatcccagcactttgggaggccgaggcagacgggtcacttgaggccaggagttcgagaccagcctgggcaatatggcgagactccgtctctactacaaatacaaaagttagcctggcatggtggcgcatgcctgtaatctcagttactcaggaggctgaggcaggagcatcacttcaacccaggaggcagaagctgcagtcagccgaggtggcaccactgcacttcagcctgggcaagactggagactgcctcaaaaaaaaaaaaagaaaaaaaatgttggtacttagatgataccatgacggcaacctccccacccccaccccgcattgataggtagtgcagaccagcccttggaggcacttctaaacagtctgctcagaaatgttttctgtttcctattcaaattgctgttttgtctcctatgtttaatcatgtatttgctattctgcttatttttctcatttggtggtaatttcaagaagagcgtttatccactattgattttcaagaaagaaaccaagcagcattgaaatcatgagtaacagaattcagaacattgtatggtggaagtcatttgtgtctgcagctgttttttcactttacaataaataagagtaaaaattgagatcatgtcaaaaaattattgcagttttaatcattatggcatagtttcacttcccctccccccattagaatcagtggagatttgttcttactagggaattttggactgctgccatttaaaacttaggtttttatttaaagcagttgtgcatttttgagaaaatgtattgggagtaactagagaggatctcccaaattttttgtatgtctctctaggagtaaacatggcaacagtttttctagaacgtggactcactgcagggactggacccaatggcattgttaagaccctaaaatctagccaccacctgcctcccccaggttttcacacaccagttggaaggtctttccctggccttgtccctgttcacacccatggaggttaagctacagagcccggggaaaccaggagattttgaggtacatggccggccccacaaaatagtggcttctgaaatctccgtagggtagcctacctcatggagggtgtgtgccaggaccctggacagggactggccaacgtaggggcccgagaacagaagatgccaacaggcaaatgaggagaatgagagagcgacggctagacgcaaactggcaggcaaagaggatggcgctaccacaaacaacaagacggaggggaggaaacacggcatatagaaaggcagcgcgcgccagtcacagcgagtaaccn

SEQ ID NO: 13012 - DNA, 1013 bp, Homo sapiens
  misc_feature 1, 2, 987, 988, 989, 990, 991, 992, 993, 994, 995, 996, 997,998, 999, 1000, 1001, 1002, 1003, 1004, 1005, 1006, 1007,1008, 1009, 1010, 1011, 1012, 1013: n = A,T,C or G
nnacggaagtgagcgacacactctgcgtcctcgcctcaccagagtcttgctgtgtggcccaggctggagtgcccggctggtctcaaattcctgacctcaagtgatctccctcctgcggtggctgcgggactggaggagtgagcgacacactctgcgtcctcgcctcacgaggaaactactaaagttcctggggaagcaaagtagaatttcataagaacaaaatggatggagaggagaaaacctatggtggctgtgaaggacctgatgccatgtatgtcaaattgatatcatctgatggccatgaatttattgtaaaaagagaacatgcattaacatcaggcacgataaaagccatgttgagtggcccaggtcagtttgctgagaacgaaaccaatgaggtcaattttagagagataccttcacatgtgctatcgaaagtatgcatgtattttacgtacaaggttcgctacactaacagctccaccgagattcctgaattcccaatgtgcacctgaaattgcactggaactgctgatggctgcgaacttcttagatggttaaactaaaataaattataataaactgttaactcttttcagtatctaatacctgtagttcagttagtaactttttcatatatagcatgttgcctgtatgcagttgaactatatacaagtccatcgcagagcagatatctgtcccccgcatagcactcaacagctgaaattcggtcggctacatcaacacattaacgacctttccacaaactgagaataacaatatggcattcaaaccaccaacacaacacaaaactgtgggggcgccgcaccccaaacctcaacaccctggggcgcgcgccagaggcacaggcccccggccaagacccgcaccaacgccgcgcccccaaaagccgggcccccccaacacgcgcgggcccggccacgcaacaccccccgccccccccccccccccaccccccccccccannnnnnnnnnnnnnnnnnnnnnnnnnn

SEQ ID NO: 13013 - DNA, 1273 bp, Homo sapiens
  misc_feature 1, 2, 3, 7, 13, 25, 27, 38, 55, 71, 88, 1261, 1262, 1263,1264, 1265, 1266, 1267, 1268, 1269, 1270, 1271, 1272, 1273: n = A,T,C or G
nnnactngcattnttttggaatccntncaggtaaatgntccaagtcactaaaaantccatttttgttgagnccttatgaagaaacaancagtatgaatcttgacggtttctgcccgtcctaatggcagagctctctgacttgggtgtatgctgccaggctgggtactttcatactttgttttcttgttttgctttaaaactacgactcagcatacattttcccacatacatttttacattgtaccttaggactcagtcatctccacttaaattgatgacacaagcagctaataaccatttctgggtttctgcctaaccccctaattgtctgttaaagccaattctctgggtgtcccagtgagtggtggctttttttctttccacattggcacattcacttctcccactcttggcatgtaagaaataagcatttacataattggaaaaatctggatttctgatgccaaagggttaaagcttcttggatttcatttcattgatatacagccactattttatttttgatcagtggcctttgggccactgttcagggtactgaccatcagtgtcagcattagggttttggtttttgtttcttttgggtatttcttttttggcacatgtgaatcttgttttgtgtaaaatgaaattactttctcttgttctctgatgatgggtttaaaattaaaagagcatccggttttggtatggggatgatccaggattatgttgtgactgatacatattagttacttgtgctttttttttttttttttggatctttgcaagggcaaaactacaagtaacgagttttatataattaatttaaatttgttacaggttttcatgttcaggataaaccatacttccaccttgggtgagaacacttgcaacagtttattaatgaggtgactttcaccttaggacaactgttgcatgccaagttttttgtgtgtgtgaaacacttcaaaactgatttaaaagatgtaaatttaaaattggttgtatctaatatgccccaggttcggtaaataaacaattctttttaaaaaaaaaaaaaaagggcgttagatctagggcactctactttaggtcagtatatacggttttaaaaaaaaaaacccccccccccccccccctaagggaaaaaaaaaaaaaaaagacccgggggggactgaattttttttcgccctttaagttggtgaaaaaaaaaagggctgatctcaactttccaaaaaaaaacgtttttttttccaatccnnnnnnnnnnnnn

SEQ ID NO: 13014 - DNA, 812 bp, Homo sapiens
  misc_feature 1, 811, 812: n = A,T,C or G
nagagccactcgtcctcgcctggtcatcccagttccggaggctgacctggggatgcgccctggacgccctgcaccgagtccttgcgtcgctgctagtcagcacgggttacccacctcatccgcatgctccaggacgccgcactccacgcgctgccgcaaggaggacgcgcagcctggtcaccatggaaacggtgccgcctccgtcacggctcaagcgagaggtcacaggtcagtccttgcaaaggttccggcttccgggttccgagatcctgtgtgttttctgaaaggctttgtggtttcggtgagctctcagagccgatttctagtgtccgtgccggggacaggtgtccagaggtcgactgctgcagacatggcggctccaccgcggcgggaagcagcggattcccaaagtggccaaggtaggcgatcgcgaggggcctgtaggaggtggcctaggaaaggggcatccctcagccctgagggtgcccgggttgggagagagtgttcccgccggggagaggctcaccctgagagatgggcagggaagggccgctgttggtgtgggcgcgggctcttgttcctcggcgggagcacgaccccgcgtgggggtgggccttcgtcctggggtggtatggctggcgagtggcactgggggtggtcgcgtgcagatttacctgatgccggcctctgcctggcgggttgggcaagctacgcctcgtcggctggccacacacggttttccacaccccgcgtttctgtttagacgcactggctgtgtttcccgggggcagttatttgcgcgggggcatann

SEQ ID NO: 13015 - DNA, 299 bp, Homo sapiens
tgcgggacgtggacggaagaaaaaagagagtgagcgagcgccggaatcagcccggcgtggagtgcggacccgcggtagtgccagggggcgaaggcggcggtggtgaggaagatactttggttagtgaccacatcgcagcatgttgagtcaagtttaccgctgtgggttccagcccttcaaccaacatcttctgccctgggtcaagtgtacttctcagcttcctggaccatacgttcaatgtcttccttgctcaaacggcccttgtcattagtgatagtaatcttgttctcttttcccgt

SEQ ID NO: 13016 - DNA, 3470 bp, Homo sapiens
gtccggctcggatccactgtaacggccgccgtgtgctggaattcgcggccgctgccggtaggcgtctgtgtgcgccgccaagtcggtggggcggggacgcgaggtgtggatggggggtcgccttgacctctgcctcagccagtagcgcagtctcggcctcgccgttacggagatggtgccctgggtgcggacgatggggcagaagctgaagcagcggctgcgactggacgtgggacgcgagatctgccgccagtacccgctgttctgcttcctgctgctctgtctcagcgccgcctccctgcttcttaacaggtatattcatattttaatgatcttctggtcatttgttgctggagttgtcacattctactgctcactaggacctgattctctcttaccaaatatattcttcacaataaaatacaaacccaagcagttaggacttcaggaattatttcctcaaggtcatagctgtgctgtttgtggtaaagtgaaatgtaaacgacataggccttctttgctacttgaaaactaccagccatggctagacctgaaaatttcttccaaggttgatgcatctctctcagaggttcttgaattagtgttggaaaactttgtttatccgtggtacagggatgtgacagatgatgaatcctttgttgatgaactgagaataacattacgtttttttgcatctgtcttaataagaaggattcacaaggtggatattccatctattataaccaagaaactattaaaagcagcaatgaagcatatagaagtgatagttaaagccagacagaaagtaaaaaatacagagtttttacagcaagctgctttagaagaatatggtccagagcttcatgttgcttcgagaagtcgaagagatgaattgcactatttaaggaaacttactgaactgctttttccttatattttgcctcctaaagcaacagactgcagatctctgaccttacttataagagagattctgtctggctctgtgttccttccttctttggatttcctagctgatccagatactgtgaatcatttgcttatcatcttcatagatgacagtccacctgaaaaagcaactgaaccggcttctcctttggttccattcttgcagaaatttgcagaacctagaaataaaaagccatctgtgctgaagttagaattgaagcaaatcagagagcaacaagatcttttatttcgttttatgaactttctgaaacaagaaggcgcagtgcacgtgttgcagttttgtttgactgtggaggaatttaatgatagaattttacgaccagaattatcaaatgatgaaatgctgtctcttcatgaagaattgcagaagatttataaaacatactgtttggatgaaagtattgacaaaattagatttgatcccttcattgtagaagagattcaaagaattgctgaaggcccatacatagatgttgtgaaacttcaaactatgagatgtctttttgaagcatatgaacatgttctttcccttttggagaatgtatttactcctatgttctgccatagtgatgagtatttcagacaacttttaagaggtgcagaatcaccaacacgcaattcaaaattgaacagaggtagcctaagtttggatgattttcggaacacacagaaaaggggagaatcatttggaatcagcagaataggtagcaaaattaaaggagtattcaaaagtaccacaatggagggagctatgttgcctaattatggtgtagctgaaggtgaagatgattttattgaagaaggtattgttgtaatggaagatgattctccagtggaggctgtgagcacacctaatactccccgaaaccttgctgcatggaaaattagcattccatatgtagacttttttgaggatccctcctctgaaaggaaggagaaaaaagaaagaattcctgtgttttgtattgatgttgaaagaaatgatagaagagcagttggacacgagcctgaacattggtctgtctatagaagatatcttgaattctatgtacttgaatcaaaactaacagaatttcatggtgcatttcctgatgcccagcttccttctaagaggatcattggccccaaaaattatgaattcttaaagtcaaagagggaagagttccaagaatatctacagaaacttctgcagcatccagaactgagtaatagtcaacttctggcagactttctttcccctaatggtggggaaacacaatttcttgataagatactaccagatgtaaatcttgggaaaattataaaatctgttcctggaaaactaatgaaagagaaaggtcagcatttggaaccttttatcatgaatttcattaattcttgtgagtctccaaagcctaaaccaagtagaccagaactgaccattctcagccctacttcagaaaacaacaagaagcttttcaatgatctgtttaaaaataatgcaaaccgtgctgaaaatacagagagaaagcaaaatcagaattattttatggaggtgatgactgtagaaggagtctatgattacctgatgtatgtaggacgggtagttttccaggttcctgactggcttcatcatctcttaatgggaactcgaatcctctttaaaaacaccctggaaatgtatactgattactatcttcagtgtaaactagaacagctatttcaggagcaccgtttggtctcactcataacacttctcagagatgctatattctgtgaaaacactgaacctcgctctctccaagataagcaaaaaggagcaaaacagacttttgaagaaatgatgaattacattccagatctgttagtcaagtgtattggtgaagaaaccaagtatgaaagcatcagacttctgtttgatggcttacagcaaccagtactcaacaagcagctgacttatgttttattggacattgtgatacaggaactgtttccagagctcaataaggtacaaaaggaagttacctctgtgacatcttggatgtaaacacttggatttggtatagaataacccattgaaatttctgctgtgcgagggtggtagaaatttacttttttgggtatattcttatatatattatgtacatcgctgtctgaaattttagttattttttgtttttaataaagactaacacaaacttaatgattaaaagtgattgagtctcatagtctttcatttgctagctgtgatccaaattttattagaacataagtcacttgttattgccatttttaaaagagaaaattcataatgatgttatggcaaacagataagactgataaacttcgtattgtatagctttgaaaataattatgcctagtatggagaaacaggaataagatctgattttcttagagttaatatattttagtagattggttttccttttttttattttgtacatagttaactgtgtatctataaataaagcatcctatatgag

SEQ ID NO: 13017 - DNA, 2731 bp, Homo sapiens
  misc_feature 1, 2, 3, 4, 5, 2730, 2731: n = A,T,C or G
nnnnnccgctcgcgatctagaactgagaaggttcccgacgcggcgatggcgagaagcagagaaatggacctggggaggggcgtgcggggtgcggtagggttggatggaagccttggcgggccaaaaccactgcggcttcaaaatccggatgcgccggtatttgaggcggaggcggggctgtggggggaggagggaggctatggcgctcagagcactgtgggacactgtaggccacgtggggcggaacggaaacctcgcagggtcagaccgtagcgacgcgggaagtccggacgcagtagctccctgaagcggaggcgaaggggagtttaagccccagcggcggcaatggcggagaggcccgaggacctaaacctgcccaatgccgtgatcaccaggatcatcaaggaggcgctcccggacggtgtcaacatctccaaggaggcccggagcgccatctcccgcgccgccagcgtcttcgtgctgtacgccacatcctgtgctaacaactttgcaatgaaaggaaagcggaagacgctgaatgccagtgatgtgctctcagccatggaagagatggagttccagcggttcgttaccccattgaaagaagctctggaagcatataggcgggagcagaaaggcaagaaggaggcctcagagcaaaagaagaaggacaaagacaaaaaaacagactcggaagagcaagacaagagcagggatgaggacaatgatgaagacgaagaaaggctggaagaagaagaacagaatgaagaggaagaagtagacaactgaaaagggcgggagactgtggcaccttggaaggtaccacttgaaatgagacgtgctacgtgtttctgtgaagcttttccatgctgggcagagtagtctcaggcaaaagtgcctgaaaagatcagaataaaaactgactagaaataccgtcaaaaccagcacttaccaaactcagagcatctgagtagcagaatcctgttttgcttcatcaatctgaaggttatggccttttgacaagagggattctgaacgactaaattagtcagtttgctcgcttttgttacttaaaaggctatggagacacgacgcggcacggagcaccagcgagacgacaaataggtgaccaggctaggtagtaagaattacgggatcaagcggatgaggcacgaggtagagtctagaaagcaaagaagagagacaatcgggtcatagcgacaactaggacggttcggattagtgcacaataacttagagtggaaagtctaggaaagagatgagctataagaagtgaatggagggtcgatatgaacctagagaaggggagaaactagagcagcctctcgtagcaagacaacggtgtgttagtaaggggacgcgaagtagaggtcaggcagtggatagaagagagggaggaggcggtcggcctgctggtgtggtagtaatctgatcacagatattcttaaatcagcagtgtggaatggtattagtcaaacatggtgccagtgtcttttacaaaaacagatggcatagtgtcagatgtaccttactactctctgctactgtacagctttaggatttgtcatcacctcccggaaggtgtaaaaccccaggcttcctcttcttgtagtccatctcccagacttgtgactatggcttttcattcttcaattcatgacgagtgccaaacttgattttctctaggcacagctttctccctctgtgcctcctgcttcctttctctctcctgcctctcctctgctccccatcccactttctcatctgcctccttttctcacttctgtcagtctgtaagctttgataacctgcttaatactccaaagtgtgagttcctctgatctcttgattccttagttctaatctcacgttttgtttttaagagatggagtctctcactctgtggcccaggctggagtgcagtggcatgatcatagctcattgcatccttgaaatcctgggctcaggtgatcctcccgcctgagcctcctgagtatctgggactacagatgcgtgccaccaagcctggctaattttgtctcatgtcttctaaaaattattttgtgaagccccttcacaaaaaaccttaagggaaatctgatggtgctcaggaatctaactctccctaaaccatcctctttaactgcttctaaaatatctctgttggcctttcttagcctttttctgtttccattcagtgctccaagcgctttttgtttctaagttgagtgcttggggtttgacaggtagtgacgtgtagtttgacactgttaacttgttaaatacagtgaaaagtttgtgagtgaagaatgctgagaagattgtaatgctttgtacaaataaaagtcttgttaaaaaaaaaaaaaaaggggggaagatccgggggcaataaaaaaacaaaagataaagaaaaaagaacaaaaaaaaaaggcaaaaagaaacaaaaaagaacaacaacagaaaacaaaccgcgaacaacacgacgcaacaaacacaactacatagaaccacaaaaacaaaaatagaaaaaagagagaaggcagacaaacaaactagaaacaaagactaaacacaaaaagaacaaaaagaagggcgtggagcgcgagcaccaaagtagggctcgagacgaccggagacaaagaagcaggagcacaactctaaccgagaacctacacgagctacgctactagcgagcgaactagccacgann

SEQ ID NO: 13018 - DNA, 394 bp, Homo sapiens
gacgtcgggggtggcgccgcatcatttgcccctggtaacgggggaggcagcaggaggaggaggaggaggagggactcggcgggaggatgggcttgctctcaattttgcgcaagttgaaaagtgcaccagaccaggaggtgagaatacttctcctgggcttggataatgctggcaagaccactcttctgaagcagcttgcatctgaagacatcagccacatcacacctacacagggtttcaacatcaaaagtgtacctcggccgaggtacacttgaaaccaaatttctaaaacttgtttttcttaaaaaatagttgttgtaacattaaaccataacctaatcagtgtgttcactatgcttccacactagccagtcttctcacacttcttctggtt

SEQ ID NO: 13019 - DNA, 1651 bp, Homo sapiens
tcgacccacgcgtccgggccgctgccgggcatcggcttccagtccgcggagggcgaggcggcgtggacagcggccccggcacccagcgccccgccgcccgcaagccgcgcgcccgtccgccgcgccccgagcccgccgcttcctatctcagcgccctgccgccgccgccgcggcccagcgagcggccctgatgcaggccatcaagtgtgtggtggtgggagacggagctgtaggtaaaacttgcctactgatcagttacacaaccaatgcatttcctggagaatatatccctactgtctttgacaattattctgccaatgttatggtagatggaaaaccggtgaatctgggcttatgggatacagctggacaagaagattatgacagattacgccccctatcctatccgcaaacagttggagaaacgtacggtaaggatataacctcccggggcaaagacaagccgattgccgatgtgttcttaatttgcttttcccttgtgagtcctgcatcatttgaaaatgtccgtgcaaagtggtatcctgaggtgcggcaccactgtcccaacactcccatcatcctagtgggaactaaacttgatcttagggatgataaagacacgatcgagaaactgaaggagaagaagctgactcccatcacctatccgcagggtctagccatggctaaggagattggtgctgtaaaatacctggagtgctcggcgctcacacagcgaggcctcaagacagtgtttgacgaagcgatccgagcagtcctctgcccgcctcccgtgaagaagaggaagagaaaatgcctgctgttgtaaatgtctcagcccctcgttcttggtcctgtcccttggaacctttgtacgctttgctcaaaaaaaaaaaaaggaaaaaaaaaaaaaaaaaaaacaacggtggagccttcgcactcaatgccaactttttgttacagattaatttttccataaaaccattttttgaaccaatcagtaattttaaggttttgtttgttctaaatgtaagagttcagactcacattctattaaaatttagccctaaaatgacaagccttcttaaagccttatttttcaaaagcgccccccccattcttattcagattaagagttgccaaaataccttctgaactacactgcattgttgtgccgagaacaccgagcactgaacttgggcaaagaccttcgtcttggaaaagacggtaagctcctggcagttaaggaggtggcagacactggctctccttatgtagttctcagaatgcgtaaagcagaacagcctcccgaatgaagcgtggccatggaactcaccagtgagtttagcagcaacgttgttccgaactctacattgttctgtagtggatgacgcgtagacagtcagacctgggaccaagtcgtgggggattacttacgcgtttcgaccacttgcggaagttggacaagctgctatgccccaagaagatcggctagcggggtgccgggcgtgtgtgcaacaggacacaggtttgcagtgcactgagatccaatgtaagcaagcgtcggcaaccaggactgcagacaacaccggttcgagtgttcacacttaccgaccaggtatacaggctgcaagttacccaactacacacgaga

SEQ ID NO: 13020 - DNA, 1271 bp, Homo sapiens
  misc_feature 1, 2, 3, 1271: n = A,T,C or G
nnncattaaggaggtggaggaggagaggcgagccaggagtggctactagatgctcctgagctccccgagggccatctggaggactggctggagaagagagccaagcggctgagctcagccccaagtagcagggctgaacccatcagaaccactgtcttccagtaccccgtgggctggccaccccccagccaggcagcaaagcacctgctctgagtggccatggggaagcgatacttctgtgactactgcgaccgctccttccaggacaacctccacaaccgcaagaagcacctgaacgggctgcagcacctcaaggccaagaaggtctggtacgacatgttccgagatgcagctgccatcttgctggatgagcagaacaagcggccctgcaggaagtttctactgacaggccagtgcgactttggctccaactgcagattttcccacatgtcagagcgagacctgcaggagctgagcatccaggtggaggaggagacgcgagccaggagtggctactagatgctcctgagctccccgagggccatctggaggactggctggagaagagagccaagcggctgagctcagccccaagtagcaggccgcatggcattctctgctgtggacgtgcatatgtattgaatcagtcccccacaggtggacacgaaggttattcccattgtctcgcagctcaatgtctgcctgcaaccccgctatttccttgggctcagttcctagagggctgaacccatcagaaccactgtcttccagtaccccgtgggctggccaccagttcaggagctgcctccatccctgcgggcacccccacctgggggggtggcctctgcagccagagtccagtggggctgagccccttgcccccgatgacccccacgtggtcacttttctcatcagtcacaataggaagccaagcccggttcttggtaagccccatggagggtcgaaaacatttggccaagctcaatgagggtcaaggaaacggccacaccaagtgcagccctcgtcctgggtctgcaccgggcagctctcccctcactctcctccacctgcccccctgcttcttaagaagatgggggagaaaacttccaaatgtttataaagaaagtctgtcaccacagtggtctggctgtgtttccctacactgggtgctctgagctctgttctccagcccctagcagaggtcgggcaaggagggaatcagatgagattttccccaggtgacccacgctcactcacttctcccggacgcn

SEQ ID NO: 13021 - DNA, 2297 bp, Homo sapiens
  misc_feature 2294, 2295, 2296, 2297: n = A,T,C or G
gaaagaagtagacatgggagacttttcattttgttctgtactaagaaaaattcttctgccttgggatcctgttgatctatgaccttacccccaacctggtgctctctgaaacatgtgctgtgtccactcagggttaaatggattaagggtggtgcaagatgtgctttgttaaacagatgcttgaaggcagcatgctccttaagagtcatcaccactccctaatctcaagtacccagggacacaaacactgcggaaggcggcagggtcctctgcctaggaaaaccagagacctttgttcacttgttgatctgctgaccttccctccactattgtcctatgaccctgccaaatccccctctgcgagaaacacccaagaatgatcaattaaaaaaaaaataatataataataattcttgtcctcttattttacactcataatgagaaatcacaagttctttcttgatgatctgtgctatagatttctactctgtctcctcaactctgttgatatttggggaaaattctgtttttcatagattctttgagatgctgatggaccagcttcagcatgtttgaggttgtctgaaatggagatcactgtaaaactgtctttttcttttaaattacaagtacactggggttaactgtattgctggaaaaacatcaagaatgacagtcttatatttaaggcaccagtcattgtttccatttttttttttaattcttcccttggattaatattttctactgaaaagaaatgaaatctcagttccactatgataaaagaaacgaatcaccagtgtctgtcagtgcccccactgctcctcctcataccagcattgacactggtagctgaggaaggggactgctcaatttctaatgtgatctattcaagaagccacatataaaaaggcattgagggctcactgtccagagaattgcttttgtaaatgctccacaacgtatgggcaaaagtttaaggactactgcctgatgtaccaggaatcctgagttctgtgaaaatctgttcattccaaatctgttaagcatttccaaacatccagagaatggtttcactgttgagggtgcatgtggcagaatctgtctctctctgcacctgtcttctgttaccatccctggacagtgacagattttaagccagccaccagaattcttttcgagttaaccatttcttagtttctgtaaattcatgacttgtcttactgaactacagcctggtttgtagacttccaacatctacactgctgctcttcaccattggaattcactgtggtatttatagtattggcttcagtccgagccacaggcaataaaaggatatcagctgtagttctcagctacatcatggtgtatagatgctgttattcaggcgaacttgctcatgggtggactaacacctggtttggtacagagactgagaagtttttcattctggtgtcaaagttttgttacattatgggtgtgaagggcatttgatatatttttcttaactatggggtttatttttctaaatgtgggttgattgactgttaattgattcagggtacccttaaaagaaaagaagttttcccattgtgaaccttaaatgatcagagaagtaagttcattgattaaattctctgttgggagaacaaaacttttctcccttgacactttattatctttgatttttcaaagggccttgattggtggttgtgtctcggttaaaatttatgggactttgctatgtagttggcatttataaaatctgaagtatcataaataaagttatttatttaattatactaccagtcttttttactggtctgattcttttgtgcattcattaaagctgatttgtgtgagagtgaactgggacacaagctagtctagctcactgcagcagcaaaccctgttgatggctgatgggcctttccattaggggtttgctatgtggagaatgggactattgtgggtattttctttattgaaaataaacacgttctcccaggaagttaagggtgggattgagttggggttggatagggctgagaaccttcgtgtgcggcagtatagggtgcgcgggcctttaaaagaaggccagggttcctatggtgtttcgagaagacccacggaagagagttgtcccaggcgccggggccaagaaaggttacacccatagcttatatgtaccaggatctctctgtgtgagagagcacaaagagagatttgtacccggggatgcacactactacgagacgatttactaaataagaatgtagtagagagctcgnnnn

SEQ ID NO: 13022 - DNA, 1361 bp, Homo sapiens
  misc_feature 1, 2, 3, 4, 5, 6, 7, 8, 9, 10, 11, 12, 13: n = A,T,C or G
nnnnnnnnnnnnncgaaagtcttctagaattaattaacgcgggggagagagaaaaagagtgagaattggcagaaatgcaagagagagccaaaatttcagaaaacaaaagactgagttataccatattccaaactgctttggagaagcatcactgagcagtgcactcacccagccagccatccgccagccatccaaatatatatgcatacataagaacacacagacatacatttgaccatatgcaaccattcctactaaaaacacagtagcataatatgagctatgaggaacataaggacgagtgagaaaccatgtcttgttgcttcaatgaggaagcaaagcttatatatattcttataagggatgcagggatgtatcactgtaatatggggtttgctgccacatgtgctgtgaatagaaggacaggcagtaccgcatgctggatatggacagcagccttagttcagaaacatactccaagcaaatcatagagaatgtcacctcctttaagcttccatttctttataagaaaaaaaaaaaacattttgtagggttacataagaaggcaataaaataataaagagaaagcatagagcctggcatataccacatgttcaatatgggacagaatgtaagcaggagcaataacaaaagtggtagaaatttggataagtcaaagaataagatgtggaaactcgggaaagggagcgattaattctgacctaggctgcacctagccattttggagaaagtgatacaaatagaattttcaggtaacaaaaacgtgtggggtggcatgttgagaggggaccaaggactgtgctgcagggcacgcaaacaaatcacttcagtgttcctagagagtaagacagtgggtgaaccacacatagtacaaggagggcatgtcaaattcacagtaaaggagtctaaagcgaggccattatatgcttctcttctacctatctcatatatgccatttatgagcccacttaatataggacctgccctcaccataacgctcaggcctataagaactctcatacctacaaagacttcctcacacctttgccttctgctctataactggccatgtctgtattctgttcagattagagagaggtccactgaagctttccccaaaagttaggagacaaaataacaatgcccctagtaagctgacaaagggaaacattgaaaacataaatgagggccaggtgcggtggctcacgcctgtaatcccagccctttgggaagccgaggctggcagatcacctgaggtcaggagttcaagaccagcctgaccaatgtggagaaacgccatctctactaaaaatacaaaattagtcaagcatggtagtgca

SEQ ID NO: 13023 - DNA, 1454 bp, Homo sapiens
  misc_feature 1, 1453, 1454: n = A,T,C or G
ngattgttgttgctgtagcctatgtgtgttccccccttctttgtggttgttctctcggttcttgtccgtgcgctctttgttgtccttcggtcttcggggtcgcgtcgtatttcctgttgtcgtattccatgtgaccttatatcccgtttttgtgtaatatgttgtttgggcctgcccgcggaatcggtgccctgactcccatccagtcagttgcttgcagtaccacttagggcttaggcacacgggccaagtcagaaagaccatgacataaagagagatggcgaaactgaaacggattatttcttttgtcttcaaaacatctcatcaatttatcactcatccattctacctgggacttagaaaactccaccacattgtaactgacattatttaggagtgccaatgagtaaacacccaatcctgcatctttagtcctccaaatctgatcaagaagttgagcaagttccaaaactctgcctgctgtgtccactgctattaacacatttccatcacctcgaagtgtttccaggacatttgtcagaagctgctcatctctctgttttcttctaggctgtacatatgtagcattgaatgaatctgtgataagtagggaaggcctgcttagcatttccagggaacatccatttaaatggatctccctcttgtggttgaagtcaactgcataaacaatttcttcttctccatctttgactattttccatattgttccacctatcatatgaccagctggcagaggtgtgatagacaggccatgtcctttacctttcaaattcacaatctgagagaattttagctgctgtattttatcaaaggctgcatccacatcatctaatgtaaagagtgtaaaatcttctgtattgtgtcgagactgataaagatcatacatgaacatctgtcccattttataaacaggaatggttgcatagatagcacagttcagacccaactttccgacagcatacgggagggcaccaaggtggagaggatcagggtgagacaacagcactgcatcaatctggtgaacatgcttcctcagggaatcaataatatccatagaaaagtgctcatcccagccacagtccaataaaaatctaaactcatcaacttggagaagatagcaaagggcagattcttcttggaccccagaaagggtagttaatttgataatagacgtcattttttttggtccagaaacagcaagctagaagagttgatatcttagtcgtatatatgatgaaacaccaggaattctgaagagttctttattaatctcgtcaggcctcccccaacgccgtccacagcccttcccaacccctaggcgaatccaggttcaagacgtagaaaagccgatgctgggtcagcagcgccagggactaccggccggcagaagccccacagtggcagccgccattttcggactcggacgcgtggnn

SEQ ID NO: 13024 - DNA, 349 bp, Homo sapiens
acagatgatggagagtttggcctcaagtttttataaactgagcgagactagtgttcaggatctcctcccttgtttaaatgtcaataaatgccccaactgcttattaattgactgtgccttgggaaacagtgggaagtaacttggtgcagcactggggtattgttggcttcttgtgttggaaactttgtaatgtaaaaggaaaaactggaaatccccacgccctgtttccctttatcgtcttgtggttggactggttcaattcgtttaactcgaattcttgctcctggccgtggttaagctgtgtactcctcagcagagctggaggacagcaaggccaggaccagcccca

SEQ ID NO: 13025 - DNA, 2696 bp, Homo sapiens
  misc_feature 1, 2, 3, 4, 2668, 2669, 2670, 2671, 2672, 2673, 2674, 2675,2676, 2677, 2678, 2679, 2680, 2681, 2682, 2683, 2684, 2685,2686, 2687, 2688, 2689, 2690, 2691, 2692, 2693, 2694, 2695,2696: n = A,T,C or G
nnnnggccctcgaggccaagaattcggcaggcgggactcggccgacgcgagcgccgcgcttcgcttcagctgctagctggcccaagggaggcgaccgcggagggtggcgaggggcggccaggacccgcagccccggggccgggccggtccggaccgccagggagggcaggtcagtgggcagatcgcgtccgcgggattcaatctctgcccgctctgataacagtccttttccctggcgctcacttcgtgcctggcacccggctgggcgcctcaagaccgttgtctcttcgatcgcttctttggacttggcgaccatttcagagatgtcttccagaagtaccaaagatttaattaaaagtaagtggggatcgaagcctagtaactccaaatccgaaactacattagaaaaattaaagggagaaattgcacacttaaagacatcagtggatgaaatcacaagtgggaaaggaaagctgactgataaagagagacacagacttttggagaaaattcgagtccttgaggctgagaaggagaagaatgcttatcaactcacagagaaggacaaagaaatacagcgactgagagaccaactgaaggccagatatagtactaccgcattgcttgaacagctggaagagacaacgagagaaggagaaaggagggagcaggtgttgaaagccttatctgaagagaaagacgtattgaaacaacagttgtctgctgcaacctcacgaattgctgaacttgaaagcaaaaccaatacactccgtttatcacagactgtggctccaaactgcttcaactcatcaataaataatattcatgaaatggaaatacagctgaaagatgctctggagaaaaatcagcagtggctcgtgtatgatcagcagcgggaagtctatgtaaaaggacttttagcaaagatctttgagttggaaaagaaaacggaaacagctgctcattcactcccacagcagacaaaaaagcctgaatcagaaggttatcttcaagaagagaagcagaaatgttacaacgatctcttggcaagtgcaaaaaaagatcttgaggttgaacgacaaaccataactcagctgagttttgaactgagtgaatttcgaagaaaatatgaagaaacccaaaaagaagttcacaatttaaatcagctgttgtattcacaaagaagggcagatgtgcaacatctggaagatgataggcataaaacagagaagatacaaaaactcagggaagagaatgatattgctaggggaaaacttgaagaagagaagaagagatccgaagagctcttatctcaggtccagtttctttacacatctctgctaaagcagcaagaagaacaaacaagggtagctctgttggaacaacagatgcaggcatgtactttagactttgaaaatgaaaaactcgaccgtcaacatgtgcagcatcaattgcttgtaattcttaaggagctccgaaaagcaagaaatcaaataacacagttggaatccttgaaacagcttcatgagtttgccatcacagagccattagtcactttccaaggagagactgaaaacagagaaaaagttgccgcctcaccaaaaagtcccactgctgcactcaatgaaagcctggtggaatgtcccaagtgcaatatacagtatccagccactgagcatcgcgatctgcttgtccatgtggaatactgttcaaagtagcaaaataagtatttgttttgatattaaaagattcaatactgtattttctgttagcttgtgggcattttgaattatatatttcacattttgcataaaactgcctatctacctttgacactccagcatgctagtgaatcatgtatcttttaggctgctgtgcctttctcttggcagtgacacctccccgacctgcgctcatcatccggctgcaatgacacaacgtcgccagcagcgcctcccggcacctactaccctcgaccggcactccgccaaaatacttggtgaggaaaagatagctcaggttattgctaatgggttaatgcaccagcaagcaaaatattttatgtttcgggggttttgaaaaatcaaagataattaaccaaggatcttaactgtgttcgcattttttatccaagcacttagaaaacctacaatcctaattttgatgtccattgttaagaggtggtgatagatactattttttttttcatattgtatagcggttattagaaaagttggggattttcttgatctttattgctgcttaccattgaaacttaacccagctgtgttccccaactctgttctgcgcacgaaacagtatctgtttgaggcataatcttaagtggccacacacaatgttttctcttatgttatctggcagtaactgtaacttgaattacattagcacattctgcttagctaaaattgttaaaataaactttaataaacccatgtagccctctcatttgattgacagtattttagttatttttggcattcttaaagctgggcaatgtaatgatcagatctttgtttgtctgaacaggtatttttatacatgctttttgtaaaccaaaaacttttaaatttcttcaggttttctaacatgcttaccactgggctactgtaaatgagaaaagaataaaattatttaatgttttaaaaannnnnnnnnnnnnnnnnnnnnnnnnnnnn

SEQ ID NO: 13026 - DNA, 2669 bp, Homo sapiens
  misc_feature 2667, 2668, 2669: n = A,T,C or G
gcgggcggcccgcgcgcacagttcccgcaggcggcgacagcagagcgcccactgcctccagcagattaatattaagattggaagtttgtgtcttttgctggatattggaaattgaatgtaatggcaacagaatttataaagagttgctgtggaggatgtttctatggtgaaacagaaaaacacaacttttctgtggaaagagattttaaagcagcagtcccaaatagtcaaaatgctactatctctgtacctccattgacttctgtttctgtaaagcctcagcttggctgtactgaggattatttgctttccaaattaccatctgatggcaaagaagtaccatttgtggtgcccaagtttaagttatcttacattcaacccaggacacaagaaactccttcacatctggaagaacttgaaggatctgccagagcatcttttggagatcgaaaggtagaactttccagttcatcccagcacggacctagctatgatgtgtataacccattctatatgtatcagcacatttcacctgatttgagtcgacgctttcctccccgttcagaagtgacgagactgtatggatcggtttgtgatttaaggacgaacaaacttcccggttcccctgggctaagcaaatctatgtttgatcttacaaactcatctcagcgattcatccagagacatgattcattgtccagtgtacccagtagttcttcttcaaggaaaaattctcaggggagtaacagacggctggatacaattactctatcaggagatgaaagggactttgggagactgaatgtgaaattgttttataattcttcagtagaacagatctggatcacagttttacagtgcagagatttaagttggccctctagttatggagacactcctactgtttctataaaaggaatacttacattgcccaaaccagtgcatttcaaatcttcagccaaggaaggttccaacgctattgaatttatggaaacgtttgtatttgctattaaacttcaaaatctacaaactgtaagacttgtatttaagattcaaacccagactcccaggaagaaaaccattggagaatgctcaatgtcactcagaacccttagcacacaggaaatggattactctttggatataacaccaccttcaaaaatttctgtttgccatgcagaacttgaattggggacttgttttcaagcagtaaatagcagaattcagttacaaattcttgaggcacggtaccttccaagctcatcaacacctctgactttgagttttttcgtgaaggtgggaatgtttagctcgggagagttgatttataagaaaaagacacgcttactgaaggcctccaatggaagagtcaagtggggagagactatgatttttccacttatacagagtgaaaaagaaattgtttttctcattaagctttacagtcgaagctctgtaagaagaaaacactttgtgggccagatttggataagtgaagacagtaataacattgaagcagtgaaccagtggaaagagacagtaataaatccagaaaaggttgttatcaggtggcacaaattaaatccatcttgaagacttcacacattaatttggtgaagaacttgacattcttttagaagacttatgatttcaatttgctaccaatgagaagaggcaaatcaacaaatttgtcaatttatgggggctataattatggtatataatgtatctgatagaaaatttgataagaaaatgtaatgaattttatcagatatccaaagtaaaggaaatgttttaaaactgcaacaagagacacagacagtaaaatcaaagtattattaggatgactaaataaattataaagtctgtgagaatatcaaccatagatagttctttctatattatgtttttgcttttgtattttaagctttacttagatattcaaaacctggtatatcaagtctctgttagtactattggcatttagaagactttaccattatttcagtgctaggcattattgattaggtcttggctccactgtttacctcttgctatgtattttctcccggtaaaaatgaattgaaccatttcaactattttctatatttggagaaagtttgtgccctgtgttttataatttttttacccataagacatcacattatccctttgtaagctacttatctccaaaaaacttcagaaatagaaaactacattttggcaggaataattgaaaacaccagaaggttgaagtttaattggaaacccagaatatacatactttgctgttttcttccctcaaatattttactatttgttttatttggagttaaaataagagtatcatccatatggtccatcctaattcacagaattaaatgagcttaaatagaaaattcagtattttatgataatcacttcgtttttagtttttaaaatttagattattctataatttaccgtgtttgagtattttctcatttttttcataaccatacctgattatactgtgtaacaaatattttctattgcagttttctttccagtacttattagaactcagtatttggaaataatttcagcttaattgaccataagaactgtggccaaaaagaacagtttttcggagaggcagatgacattatacctgattttagaaaatcnnn

SEQ ID NO: 13027 - DNA, 674 bp, Homo sapiens
  misc_feature 1, 2, 3, 4, 5, 6, 7, 8, 9, 10: n = A,T,C or G
nnnnnnnnnncaggtacttcttttcatcatcagcaagcttattcagattctcctcagagtctgaataagcttgctgatgatgaaaagaagtacaggggtggcaaaatatgcctgacggatcatttcaaacctttgtgggccaggaatgtgcccaaatttggactagctcatctcatggctctggggctgggtccatggctggcagtggaaatccctgatctgattcagaagggcgtcatccaacacaaagagaaatgcaaccaatgaagaatcaagccactgaggcagggcagagggacctttgataggctacgatactatttctgtgcatcacacttaactcatctaactgcttccccggacaccctccacctctagttgttactaagtagctgcagtaggcattgctggggaagaaacaaacacacaccaaacagtacctcggccgaggtacgcggggtaacaagtagcccataacatctgaagggacttcattgaaatcacagaggttctttagttctttacctcattagtaggcattagggaagcacatcaactttctaatttaataaggtgcctgttgctttgaaaaactgctcaaaaaaagataggagaggcttacttaaagatatcactataggcgtggcatgctgcttcacgcctgtaatcctagt

SEQ ID NO: 13028 - DNA, 3707 bp, Homo sapiens
  misc_feature 1, 2, 3707: n = A,T,C or G
nncgacccacgcgtccgattttaatagaccagtacttaggtcttaatatttgtgtttttcaaaaatttatgttaaaatcctaacccccatgactatagtattaggagatagggccttttggaaggtgactggagaggggcagcaccttcaggaatagaattagtgcccttataaaatagacccaagggaactttttcatcccttacaccctgtgagaacatgatgagaaggcaccatgtatgagccagagaatagatcctcaccacacactgaatctgctggtgccttgatcttggactttctagcctccagaactgtgagaaacaaatttctgctgtttataagctgtccagttaatggaattttgttattgtagcccaaatatactaagacaacaaccaatatagttaaaattactatgcatgttctactttatattaagttctagtgtacgttgtataatgcttacatcaaataaaaggtaaggttaatttacataaaacatgtttaggtaggataattgtaaaaattatttattagagaaattggtaaaattgtggctttgcatagaggcaggagaaagaaaagagcaaggcactagtgagaaaaattgctatggagaatattgagaatagatacaaggagacctacaggtttacaacattaatattggccaatacttgattggacagtttaaatttttcaacctgaaaggcctttgtgccccaaagtttggtaaggagattttgtaaaaacaaacaacaatagcaataaaaaatcagggaagattaagagatttcataaggagcaagaatttataggtaatacttaaaaggtataggtatgattactattttggtgaataataggcacatggtagactgaaattcggcaacagctactgtgcaaataagcatatctgtgattatggcttatatctggttggggacccctgttgtaagccattctttttagtacaggttaagctccatttctcaatcacagttctgttattttcatctgtgggaaataatgaattctgtttcagattttgattgtcttttgtgttctttgtcatccaacagaattgcacatttcactttgtaaaatttttataactagtgtttgacacttgaaactggcttttgagtcttctataatagtttgtgcagaagtctgaggtttaatgttatgatggccttattcatactgtagaaatatatactgcagcaatatgcacccaaatggtcaaatggtcagtaagctttttaaatgaactagctagatttttagttttgattttaattcttggtttgaattgctaaaagctatcttgaccttaggaaaatgaaagcttacatgaggtttagccacttaaaacaaagtatttctttgtgtctccagttcatgtgaaacctgacttttatttacaatatttatgttaggagcacttttattaggatcttttgaagcctttcaagagttttctttcagttattattaatagtactaataaagaaggtgagcaggatttaaagctgaaaggagcatcagagataattgaactttgtttatgccattcattgttaccctatgcaatgtcttttgtttgtttttaattaattgccaatatttaagaagagggtcatagaacagtcattattccagattctcttgaaaaactggaagatctggcaactacaggtttatgttcttgcatgttaacaatatacaggggctggaattaacctgctctgagtccctttagatgtgcatactctctccgatttgccacagttcccaccaattcttatttctcctctctttacttggcccacatcattgggcctatctcattaatttctattaaatattttattactgaggccattagtttatgacccctgaggccaagacagctgttaagaacttgcattactggtggcaaaattatacctttacgattacttactaggttttagaaatctcacttttctaacaagaggtattatggtaatcataagttcaaaataattaaagttcatttgagataattaaatcaaaacctctagtctgggttggagggtgataaagttatctggcgaaatatatgaacttctgttaccttcctcttctgctaaatgaatggtaaaatgaatcctgatttgtttaggcagtttacttatgaagttgggagaatttttttttttctttaaaggactgagtctggctctgttgcctaggctcaagtactgtggatcttggctcactgcagcctccacctcttggattcaagcagttctcctgcctcagcctcccgagtagctgggagccaccatgtccagctgatttttgtatttttagtaaatgagttttcaccatgttggccaggctggtcttgaactcctgacctcaagtgagctgcctacctggcctcccaaagctctgggattataggtgtgagccactgtgccaggcctgaggttgggagaaattttgtccatttctttagaaccaaaattggcaaccagagagtatttggatgttacacaaaatatttagtttccctttctagcctaaattgggttgtttatagcacccgtctctccatttgagaaaaatggttaggatgctggtgcagggatgaggccttattaaaacagagaaggtacccaaatggtggttcaaacacaggctggctaataagctgtgaggtgacttaccaaaaaacaacaacaacaaaaacccttgaacttctgctttcaacttctactttatgctagattatttggtccaatcttcctggtctaacacctggctacatataacaacaaacatctgcttgaatgtgttggaaaggtgatgattaattgccaggctgatatattaaataaaatggaaatctcaaaagttaaaaaaaaaaaaaaaactgcttttgctctggaggggggatttgttagccaagaagaggctgaaaacatgagtagtgtactttgggagactagaaggacgaacgttaaaagtatacgacctccaaggttgtgactctggtagaattctttggttagagatcctgaaggacagcatcctagggataatggtgaaacagaagtagaccattcacatagagtgtagtttagcattaaatcatcaaggtggattagtaaattgtgagattttggaagtggactaaggtgaccttaggtttctaatgcccctaggaacctgaaagatagaaacctggaggaagaatattttcctaggcctcaaattatttgggtactttttcaaatacagtatctccacataccctggatacaggaggagaaaggcggaatgaaaactggcagaaacagtagacccaaaggggcaccaaataattgcattgtgaggtagactttaagtatgtttactgtattcaaggagataaaagatggaaaatttccatatagaattggaaactataaaaaagtcactgcagatttgaaaaaaaaaaaagccaaattttaatttgaaaacttgaaaaaccaaacagtgaaaattaagaactccaaatgtgttagttatctattgctgtgtaacatactgctcaaacttgacttaacatacgttaattatctcagtttttgttggtcaggaatccaagcatggcctaagtgggttctctgctttaggctgcaatcaaagcattggtcggggtagggtcn

SEQ ID NO: 13029 - DNA, 3600 bp, Homo sapiens
  misc_feature 1, 2, 3600: n = A,T,C or G
nnatagggagtcgacccacgcgtccgcggacgcgtgggtccgaaccattactgatagttttggagagggagttgagtttgatctgcacacgagagtagtgtaaacaccgccaacacttatgaagtgtcccttctaatattgtaatacaaataacataaataacattaagctatggtaactttacggacttttctcgttccctggagtacattggaataacccttctcagggggagccgtgggggggtccggtaacaacatggcggcgtccgtgaggggctcctttgggcaggggtagtgtttggtgtccctgtcttgcgtgatattgacaaactgaagctttcctgcaccactggacttaaggaagagtgtactcgtaggcggacagctttagtggccggccggccgctctcatcccccgtaaggagcagagtcctttgtactgaccaagatgagcaacatctacatccaggagcctcccacgaatgggaaggttttattgaaaactacagctggagatattgacatagagttgtggtccaaagaagctcctaaagcttgcagaaattttatccaactttgtttggaagcttattatgacaataccatttttcatagagttgtgcctggtttcatagtccaaggcggagatcctactggcacagggagtggtggagagtctatctatggagcgccattcaaagatgaatttcattcacggttgcgttttaatcggagaggactggttgccatggcaaatgctggttctcatgataatggcagccagtttttcttcacactgggtcgagcagatgaacttaacaataagcataccatctttggaaaggttacaggggatacagtatataacatgttgcgactgtcagaagtagacattgatgatgacgaaagaccacataatccacacaaaataaaaagctgtgaggttttgtttaatccttttgatgacatcattccaagggaaattaaaaggctgaaaaaagagaaaccagaggaggaagtaaagaaattgaaacccaaaggcacaaaaaattttagtttactttcatttggagaggaagctgaggaagaagaggaggaagtaaatcgagttagtcagagcatgaagggcaaaagcaaaagtagtcatgacttgcttaaggatgatccacatctcagttctgttccagttgtagaaagtgaaaaaggtgatgcaccagatttagttgatgatggagaagatgaaagtgcagagcatgatgaatatattgatggtgatgaaaagaacctgatgagagaaagaattgccaaaaaattaaaaaaggacacaagtgcgaatgttaaatcagctggagaaggagaagtggagaagaaatcagtcagccgcagtgaagagctcagaaaagaagcaagacaattaaaacgggaactcttagcagcaaaacaaaaaaaagtagaaaatgcagcaaaacaagcagaaaaaagaagtgaagaggaagaagcccctccagatggtgctgttgccgaatacagaagagaaaagcaaaagtatgaagctttgaggaagcaacagtcaaagaagggaacttcccgggaagatcagacccttgcactgctgaaccagtttaaatctaaactcactcaagcaattgctgaaacgcctgaaaatgacattcctgaaacagaagtagaagatgatgaaggatggatgtcacatgtacttcagtttgaggataaaagcagaaaagtgaaagatgcaagcatgcaagactcagatacatttgaaatctatgatcctcggaatccagtgaataaaagaaggagggaagaaagcaaaaagctgatgagagagaaaaaagaaagaagataaaatgagaataatgataaccagaacttgctggaaatgtgcctacaatggccttgtaacagccattgttcccaacagcatcacttaggggtgtgaaaagaagtatttttgaacctgttgtctggttttgaaaaacaattatcttgttttgcaaattgtggaatgatgtaagcaaatgcttttggttactggtacatgtgttttttcctagctgaccttttatattgctaaatctgaaataaaataactttccttccacattacaaaaaaaaaacaaaacaacaaaaaaaaaaaaaaaaaaaaaaaacaaaacacacaaaacaaaaacacacaaaaacaaaaaacaagcacagaacacacaacaaaacaaaacaacacaagcgcagacacccacccacccccacgacacacccgcacccaacaggaagagacacactcacacacagacacggcgcatacacgacacccacagcacacaagcacaaccaacaacaaacaacatcacacacagcaacagaacggtagacatcaacacaaaacaaacagcacaccagagaagaaagacacaaaccacactcaggagcagaagacaaaagagaacaacacaacaaacagaaagaaacgagacgacggcaacaaacacacatacacaagcgaaccgaggtgcagacacactacactcctgtcgcacctcacaaaacaagacagtcaccacagagcaagaatcgcaccaagccaaacaggacaccagaaaacaacaagcacaccgcacgatcactcaccaccaatagaccaacaaggacgacaccggacacaaacatcacaaacacgcacagaacaagccaaaacaaacgtaagcacagtagcgccaccaaccaacacacgcaacacaacagacgccagcacacgcacaggactatcgaaaacggcagagcacaccagccacgcaacgacacgacacgaggagaggagcacgccacaccggccggcaacaacaaccacacgccaagcaacacgcaccgagacgcacaggcacacagcacagccccgaacagcaacgaacaacaccaaaggacagccccatcacgacgacgacccaacgacacaggcacacgccacgcaccaagcagcacaccagaaggaacaaaagaaagaaaaagcaggagacggaggaacagagagaggaaggacgaggaaaagaacacacaagagagaggcacgcgaaaagacgaggaggatcggacaagggagacaagacaaccaagagaaaagaggagggcaagagacaaggggaggaacagaggaggacgcgaggacagaacagcagggaccagagaggcacgccggacgcgccgcccgacagcagaagacgcgagggcggcacagccgaggagcaggacgagcggcccgcgacggccagaccggagggggacgaaggggcggagaacgaagaggcacgcgaccccgccagccagcggacagcgggacgaagcgcggggagcgcggcacaacacacacacgagcgaaggcgcgcgcggagaagccaagcgcacagggcacgagcgaagggcaggggcgcgacaacaggcagcgcagggaacacacaaacgcagcaacaacgcaagggagggacaggcgaaagaagcagcgaccgacggagaggcagaagcacgaaaaacaagaacaagagaaggaaaacggaaggagagaagagcaaaaacccacgcacagaan

SEQ ID NO: 13030 - DNA, 442 bp, Homo sapiens
ggtggtctggggataagagaatatggtggttgctgagtgtggtgtaattccagctactcaggagttgggaggattgtttgaacctgggagtgtgaggccagcctgggcaacatggcaaggtctcatctcttaaaaaaaaaatacatgtgtgatgggcttttcttttgcttttcagtctcttctcggcaaagtgaaagaagcggtgaaggtggccattgatgcagaatatcgccacattgactgtgcctatttctatgagaatcaacatgaggtgggagaagccatccaagagaagatccaagagaaggctgtgatgcgggaggacctgttcatcgtcagcaaggtgcacatggcgcatttggtgggaggccttcacttcaaggcaggcagaagtatctggatcgggtgggcagcaagaactctgtcggccttttctacgtgt

SEQ ID NO: 13031 - DNA, 603 bp, Homo sapiens
  misc_feature 602, 603: n = A,T,C or G
acttttttttttttttttttttttgccactggaaaaagaaagggaagaaggagaaggagaataagaaccagagaattctcctacccttgaaaatttagcaagggcagattataacagcaaaactgacctgtggacccaagaactggactgcatgtaataagaaacattctgaaaatttaacaagtggaaaaataacctgctgggcctctttgtgaacaagctgctcaatgtcaacaagcccaaggcaccactaaatatcacaaggtcaattccactgaaatagggtttttatatattgtcagattttttgtttagttgttttgaaaacagaatattttctattgatatcttctttttcttattttaaatccatggtctggttttaactgcaaacaggacccttggttaagcaccagcacatggagacaaggtggagacgtcagagcttctctagcaaaacgactggaggtgtttagggctgacgggtctatcagaatcaactctggctaatttgccttcttgatgaccttgacagggaagaaaacaatctagacctgtaagatgagtatcaaagcctgaaaaagaatccatctgaggtcgann

SEQ ID NO: 13032 - DNA, 430 bp, Homo sapiens
  misc_feature 1: n = A,T,C or G
naggatagataactttcacagtacttctacagttggagagggagtactgactgctgatctggaggctgggacaaagacttctggtgcacaagcaaaaagaagccttatataccatttacctgtatccaaatttccagcagccaacgatggcgaagagcctcatagcagatgtggcagtggccgccacttcccatgacaaagggaggtaggcatgattcatctctagtgcatggggacggttgccttttgccccaaatcaactcaagacccctttccaccatatgtctgtatgtaactctaaatgcatctctaagacttaagaataaaaagccactgctacctggcaagtggatgaggcaaaagagaagacataccccaaagaactatagcactctgctccaaattacagaactttctaaactatgttagt

SEQ ID NO: 13033 - DNA, 1922 bp, Homo sapiens
caaaatgacaacatttaatgggatgataaggaaataagacttgtcaagaaaccatagcccactgcagactgttcacgatgtcagatggttcatgatttttttccaggtttgatacagaagaatcagtttgttaaaagaaatgcttctccacctgggatttaaaacatcatttaaacaataaacacatttgtatgtatatataaatagatatttagaaataaaaacatgcatatataggcacatagacatgtatatacatatacacacatatgtacaaatatatatgcctaaatttttactgacctgtcaacttacaaaacaaaaatgagagatttataaaaggtacatatatagctgtgaattctttaaagctatttttaaagaaattaatataatcttaatgattatcagattactcatgcagtacacagctacacaagtctaatgaagtaccagagacttttctttcttcaactattgtcctatcttattcaggttttcattttcttactagatgtgttttcaatggtttatgacgtaataaaatttctttacttcttccagtaattgctttgtctcactcggaaactgaactactgttgatgtggtaaaaagctagggcatattcttctgaaaaaataaagggaacatgtatttttattaaatagatgatataagcacattagatctaatccttccaataattttgaaatagagacaattactttcccattttatacattatgcagaaatatgctaataatatttaagacacttgatgaaatatattctattagtaaatgatagagacagaattcaaacactccacaaacttcacacagcattcaacaagaaataaatagtaccaaccttccagggaacagttgtatggtctctacaacattttagtatatgttttagaaattaatctatcaaatttttaagttaacatttcagaatattccccactcctctttttaagtcaaagtccacagaagtagcttggaacagtcagtcttagcatgaacaacaatgacaataacaaaaagacctggaagcttagtgtggcttgtatttcaagttcaagtggagccctgtcaggttatattgcaaggattctggtgttgaaaaactctggtaactggaaaatgggttcagtcagaagacacatcatgggataaagaaaccagtatacaaagtaatgccatttattgtttactctgtgaacacagaggttgattttggaaagtttagtagctcagggaatgttagatataaataccacattcaataaccttagggcatggctgttgcttgcctacctttttcgtactaatcgtagaccatgcctggggctggctgaatgttgaacacaaggttgctctgctcagcagaaaaagtgaaactgtctgctcgaccaaaaacattttccaagtagaaaagaacatggtcattcttgacttcagtcttcatcacttggcccttgttttcaagctcttcaatggatgacatggttggagtaaatcctgatagcatttttacatctataaccaccatactggatttattgcgaattccagtgtatttgaggttcactgtgaggtcaaaaacagtcaaagagtagttctttactatttccaaggaaagagaaaatccagatgccttcttaggtaggagaacattgtacttaagggtggcctggaggactgtgggtatggggtgtccaagaagaaagctcagatctgcccacggcaggtaccttactgggatttactatccgacaagggtccgaacgcagctcgggatcagaaaaaaagcaggtcatttgcaatctaccagagccagcccctcttcccccacttgctcttaggacctccatcgcagcggggcccccgcgttaattaattctagaagacttccga

SEQ ID NO: 13034 - DNA, 545 bp, Homo sapiens
  misc_feature 375: n = A,T,C or G
acaatacatcatatgaaatagagaaaactaactataaaccagtatattacaaatccttgataccgttctcaaatgattaattcagtggtcttcaaatactaggtcttgtatgaccctcacatatatttaagttgccatctaaaactttatcataagcttcctagttataaaacatggagtttcctgtgtacaaagcagactgcccgcaaatcgaccggtggtaaagcacccaggaagcaactggctacaaaagccgctcgcaagagtgcgccctctactggaggggtgaagaaacctcatcgttacaggcctggtactgggaaaagatctaatctgccgtgggcctgtcgtgccagtcctgggggcgagatcggngtagaaatgcattttattctttaagttcacgtaagatacaagtttcagacagggtctgaaggactggattggccaaacatcagacctgtcttccaaggagaccaagtcctggctacatcccagcctgtggttacagtgcagacaggccatgtgagccaccgctgccagca

SEQ ID NO: 13035 - DNA, 711 bp, Homo sapiens
  misc_feature 1, 2, 3, 710, 711: n = A,T,C or G
nnnctcgcacattcttattatccaattcctgagatcttgaggtcagtgaggcccggcctttcacttctcccttctctccagctaaaaccctccctgtccttccctttgtcccggtcgcgctctcggtccctgtctctcagtctctccttctctttccccccctcactctttctctctgtctccttcttgcgttcggagtctctgtcccgctccctgttgcctctgtctttctgtcgctcgttgtctggcctggcccgggctttggctctctctctctccccgtacgacaataccaagaacatcaacaggcaacggaattgttaaggcaagcacatatgcggcaaatggagagacagcgagaagaccaggaacagctacaagaagagattaagagacttaatagacaattagcccagaatggaaatgaaaaccaaggagaagttgaagaacaaacatttaaagaaaaggaattagacagaaaacctgaagatgtgcctcctgagattttgtctaatgaaaggtatgcactccagaaagctaataatagacttttgaagatcctcttagaagttgtaaagacaacagcagctgttgaagaaacaattggtcgccatgtccttgggattctagatagatctagtaaaagccagtcatctgccagcctaatttggaggtcagaagcagaggcatctgtaaagtcatgtgtccann

SEQ ID NO: 13036 - DNA, 1571 bp, Homo sapiens
  misc_feature 1571: n = A,T,C or G
accaatgtcttggggggagggagccagctgattgtgagatgtaagtttgtgattctgagatagcagctttgcaaaaaactgcaatttgtcaattcaccaatattgataatgtgcaagcttggtgagctgagaatattcctgaaaacctttgttcccactgcgaattcctggggacagttatgagttcctaatgacgtcaccacaaagacattttggagtgtttggtaaaggctgtttcttttcagtgattgctggaagcagatgggatcaaataaaaatagaacattgtgggctcccaaggctgaggtggagccgcgggacgccggcagggttgtggcgcagcagtctccttcctgcgcgcgcgcctgaagtcggcgtgggcgtttgaggaagctgggatacagcatttaatgaaaaatttatgcttaagaagtaaaaatggcaggcttcctagataattttcgttggccagaatgtgaatgtattgactggagtgagagaagaaatgctgtggcatctgttgtcgcaggtatattgttttttacaggctggtggataatgattgatgcagctgtggtgtatcctaagccagaacagttgaaccatgcctttcacacatgtggtgtattttccacattggctttcttcatgataaatgctgtatccaatgctcaggtgagaggtgatagctatgaaagcggctgtttaggaagaacaggtgctcgagtttggcttttcattggtttcatgttgatgtttgggtcacttattgcttccatgtggattctttttggtgcatatgttacccaaaatactgatgtttatccgggactagctgtgttttttcaaaatgcacttatattttttagcactctgatctacaaatttggaagaaccgaagagctatggacctgagatcacttcttaagtcacattttccttttgttatattctgtttgtagataggttttttatctctcagtacacattgccaaatggagtagattgtacattaaatgttttgtttctttacatcagaaggtcctggatctgaaactgtctgacactcacaaaatacaactgcttaaccggcacctagcttaacggcgatattcgagtggatagcagacaggcattatcgacagtaaaatgcgcctaccacgtgaccaagagtagcaaagtagtatatgaaaatcgacaagtgaattcggtgcaacgaggtcgcagtaaccaactacgaggcggcgcagtatacgagtcacagcaacaagcaacacgatcaaaaaacaagggaggggcacactaggaggcagcacaggaaggtagtcggttcctcccttctcctctcgttcgtccgcccgactgccgacggacgccgcgccagcaaaacctggagcgagacgatggacatacggtcacgtgaacagtagcagaaccggcccgtagcagacgacgaacacaacagcgacggaagagccagcgaacaagacagaggaacgctggtagcaagcgacagacaagctcacaacacgaccagaaccgcgaacggaagcaacaacacagaaacagcn

SEQ ID NO: 13037 - DNA, 795 bp, Homo sapiens
  misc_feature 1, 2, 3, 4, 793, 794, 795: n = A,T,C or G
nnnngagcactacatgcttgaagctgtcatcagtgttctcttgtcagttgtcacggcctcctctaattgtggtagtacctgcccgggcggccgaggtacgcggggaggtcccagtggtttcttcctccagttaggagccttgatgccggaggggacagtgggtcgccgagagcgcccggagggaaccgcctggccttcggggaccaccaattttgtctggaaccaccctcccggcgtatcctactccctgtgccgcgaggccatcgcttcactgggggggtcgatttgtgtgtagtttggtgacaagatttgcattcacctggcccaaaccctttttgtctctttgggtgaccggaaaactccacctcaagttttcttttgtggggctgccccccaagtgtcgtttgttttactgtagggtctccccgcccggcgcccccagtgttttctgagggcggaaatggccaattcgggcctgcagttgctgggcttctccatggccctgctgggctgggtgggtctggtggcctgcaccgccatcccgcagtggcagatgagctcctatgcgggtgacaacatcatcacggcccaggccatgtacaaggggctgtggatggactgcgtcacgcagagcacggggatgatgagctgcaaaatgtacgactcggtgctcgccctgtccggtaaggccgcgggaccgacggggcggacgcgcccttgaccgaggtggcggggtggcgcgcgtgggagagccgatgccccacggctgggggccctaggttgccggggagcnnn

SEQ ID NO: 13038 - DNA, 3436 bp, Homo sapiens
  misc_feature 3433, 3434, 3435, 3436: n = A,T,C or G
cgtccgcggacgcgtgggtgccaacagacactacattaccctaatggcatcttttttggcatctgcaattgaaagagagggttagaaaaagaagccaacagacactacattaccctaatggctgctacccagaacctttgtataggttgttcttaatctttttgttggtggtgttcaagcttttcctttcttttttttcttggtgtttgggccacgattttaaaatgacttttattatgggtatgtgttgccaaagctggcttttttgtcaaataaaatgaatacgaacttaaaaaataaaagctggtatcttaaaatgtaagagagtaagactgtgaagcctaaaatgactggctgagaatgaaccagaaatgccatttgccaaacagttgtaactagaaatttgattctcacagtccattcttttctttgtccttaagatgacattgttagtgttcacgtcccatgttcagtgtccaaaccggcaatgtaaaaagtatcctgtgtggcttaacaggaaatctgtttatgtctctttatttgaaaccagttttactctcagtggttctttaagttcaatgaagtctgccaggaacattggttggtagtattattccgacacctttaatttccaaaatctgaagttcctgctagtttaccaccttcatgatcttcttgaactggtaactgattaggttgaacttatggaagatttgtggacttaactcaaaagtaacctctcagtgttctatagaacatgtatttgtgtaactgaacctaccaggagaaatgtttggaattctatatgtgcaatttttcaacaaatgcaaaaaaaatacagcacatgtattgacaagcttctgtcaagcagcttgagttgaaatttgatttaagaaaataaatcatgattgttcaaagctgctgggacgttagaattaggccatgatactggtctcattttaactacagtggtatttggcactagtgtaaacttccatataaatcactcttttggaacaacaaagggggagggagaaaaatcacggcctgttaaatgagtaccaaagccgcccaacagtaatgagatgttctcatccttgattctcccagcctcaaacaacacagcttactttttttttcccttgctcagaaagtacctgtaatttaacaaacagactgcctgtaggtatagtgcaattacaaatgctctaatcattgtacatacatctctcttgatattgcagcatccatactggctttgtaatcattaattttttggcagattgaatgtgctgtattgatatgtatctatgtaattgtattgtatgtctatagctaattcacgttttgaataatgttattttatttacttttttaagagaggagaatgtaaatttgtcagtttatttctgactagggatattttctttccatttagaaaagaagaaaaaaaaaaaaccttactgtcatacagagcggtactagcgtcgtgctgtataaaatcatttgcacattcctgagtagaggtatactgattataagacccaaaggtaatttcatagcaaaatacataaaatcagtcggagcttttatacaaacatggaaaccaactttgtagaacttttgccatttgatctaggattggaatatgagcttttatacaattcatattcttatttggcaaatgcacagtttagtattacctctctgatggcctttactagaaaggcagttttagaagctattgtgatccactaaggaaatgttttaacagctagagaccactgcttgcctgaaagggcgttcttaaatttggtgcagcaaaaaaaaaaaaaaaaaaaaaaaaaaaattaaacaacaacatttgaaggcctacagtgtgtatagagaaaacctcatcacaagatcataagtgttacagttttagggaatcaagatattctatttaatagagctatagtaaatgtagtcaattaaacctgatctcaaagcttgaagaagctgagcaaaacagggaaagattgttatatttgtctttatgaaattgggatggaatttgctatgcagaattgaggtttgtggctttgctgttcctgtagggtgcatgacaagatcccttctcttgagaaaggaaaaaattgatcaccctagcagcagtgatgcatagaaacctaattttagccacaccagtcaatcgaagctaaaggattttcttttttgtttcttcggggttttattgaaggggctaggggcgggacgggattcttttcagttttgtataaaaacaaagtttactcatgctttatattatattgtgattgcaagcgttataagcgtgtgccactggcctcctattgttgatgcttaggtaatggaggcctgtggtgagttttatggtgacttgggcatgtcttattcaaaaacaaaaacataaaacacagaaacctttcttcagcataccaaggcaagcagccatttcatgactcacttaacacattgcagtgtaccagtttacagatgatttttccctttttgcgtgacatggcagttctaacccccagagaattccttatttgtaaattggaagtttctactatgccttacagagcttaaattcagaagtttgtgcctcatatctgaaacaaagggaaataacacacccattcaaaagtaaataaatctcctagaagtttttgtttttaacatttccatataaagagctctgttgaatgtcatgaatagactggaaaaaaaaattttaagaacctgcatatgttgtttactagcagatgacaactacaaaaggaatctgaagaacacgtaaaacttgtatttttttttttttggtagattaactagcaggcctattttaaaaaggtaattcagctaaagggcaatttacttttttgtacttcagactatcttgattgtcaaagtgtacgaactgtaattttaaaatttatactgccacatgattgtaaattttagttgtcttaagttaggaattggtgaaaagctatttatgctggatttgggtcaaaatgacttatttgcaaaaaaataaataatgggaagaaagggctgtataatgaaatactgcaagactcacatattggttggaaatttccctcaaatcacctaccgattacccttgatttccctttgttttcagtttctcaaaacgaatgaaatgaaatatagcagaatgttaacccatataaaaataaagtgtacccaaatattgtaatgtatattgctgctcttcttcaaattaaataagggtggggcaacttccgtgtcacaaagggggtggtactaaatttcccaatttcttgtgaacaaaacatgggggttatatatgggcgtcgccactttatgcaatggtaataagggaatgaaacatacatgtgaaacaatattatgatatacgcannnn

SEQ ID NO: 13039 - DNA, 2462 bp, Homo sapiens
  misc_feature 1, 2, 2460, 2461, 2462: n = A,T,C or G
nnatcgacccggcgtctggtggtgtacaaataagtactacagtataaaacttcacagtgccaataccatgaagggagctcagacagctcttaccacatgatacaagagccggctggtggaagagtggggaccagaaagagaatttgctgaagaggagaaggaaaaaaaaaacaccaaaaaaaaaaataaaaaaatccacacacacaaaaaaacctgcgcgtgaggggggaggaaaagcagggccttttaaaaaggcaatcacaacaacttttgctgccaggatgcccttgctttggctgagaggatttctgttggcaagttgctggattatagtgaggagttcccccaccccaggatccgaggggcacagcgcggcccccgactgtccgtcctgtgcgctggccgccctcccaaaggatgtacccaactctcagccagagatggtggaggccgtcaagaagcacattttaaacatgctgcacttgaagaagagacccgatgtcacccagccggtacccaaggcggcgcttctgaacgcgatcagaaagcttcatgtgggcaaagtcggggagaacgggtatgtggagatagaggatgacattggaaggagggcagaaatgaatgaacttatggagcagacctcggagatcatcacgtttgccgagtcaggaacagccaggaagacgctgcacttcgagatttccaaggaaggcagtgacctgtcagtggtggagcgtgcagaagtctggctcttcctaaaagtccccaaggccaacaggaccaggaccaaagtcaccatccgcctcttccagcagcagaagcacccgcagggcagcttggacacaggggaagaggccgaggaagtgggcttaaagggggagaggagtgaactgttgctctctgaaaaagtagtagacgctcggaagagcacctggcatgtcttccctgtctccagcagcatccagcggttgctggaccagggcaagagctccctggacgttcggattgcctgtgagcagtgccaggagagtggcgccagcttggttctcctgggcaagaagaagaagaaagaagaggagggggaagggaaaaagaagggcggaggtgaaggtggggcaggagcagatgaggaaaaggagcagtcgcacagacctttcctcatgctgcaggcccggcagtctgaagaccaccctcatcgccggcgtcggcggggcttggagtgtgatggcaaggtcaacatctgctgtaagaaacagttctttgtcagtttcaaggacatcggctggaatgactggatcattgctccctctggctatcatgccaactactgcgagggtgagtgcccgagccatatagcaggcacgtccgggtcctcactgtccttccactcaacagtcatcaaccactaccgcatgcggggccatagcccctttgccaacctcaaatcgtgctgtgtgcccaccaagctgagacccatgtccatgttgtactatgatgatggtcaaaacatcatcaaaaaggacattcagaacatgatcgtggaggagtgtgggtgctcatagagttgcccagcccagggggaaagggagcaagagttgtccagagaagacagtggcaaaatgaagaaatttttaaggtttctgagttaaccagaaaaatagaaattaaaaacaaaaaaaaaaaaacaaaaaaaaacaaaagtaaattaaaaacaaaacctgatgaaacagatgaaaggaagatgtggaaaaaatccttagccagggctcagagatgaagcagtgaaagagacaggaattgggagggaaagggagaatggtgtaccctttatttcttctgaaatcacactgatgacatcagttgtttaaacggggtattgtcctttccccccttgaggttcccttgtgagccttgaatcaaccaatctagtctgcagtagtgtggactagaacaacccaaatagcatctagaaagccatgagtttgaaagggcccatcacaggcactttcctacccaattacccaggtcataaggtatgtctgtgtgacacttatctctgtgtatatcagcatacacacacacacacacacacccacacaggcatttccacacattacatatatacacatactggtaaaagaacaatcgtgtgcaggtggtcacacttcctttttctgtaccacttttgcaacaaaacaaaacaaacaacattaaaaaattgagaacaagtatggaaagaatgaaagatcaaggaaaaaagaataccaagttacatttcgttaaggtgcttatgatcttagaactatgcaacctaataggtttgaaactgtttacctgagagagaacaaaaagagagacttttttgtattggaagtaatctgattaatttttattttcttcaaggagagatacttgaaaggaatatgtttgtccatctgttggatccaaacatttctatannn

SEQ ID NO: 13040 - DNA, 348 bp, Homo sapiens
acagcgggtgctggtggatactggcacagattgcagccttgtttatgggaacccggataagtttcttggcaaacctgcttacattgacagctatggcagctggtcagtgaaagtgaaacctgtatctctataccttggcatcaccgtttggctccctgcttatgcgctgtgtatgtctctcctgaatacattctgggggtgagtgtttcacaaggtttggcagctgtctcatctatcatggatttgatagactgctcgatgatggaattggaacaataccactatgtggtagacttggctaatgcattcttttccagagagccaggaatactttacctttatgggaca

SEQ ID NO: 13041 - DNA, 408 bp, Homo sapiens
  misc_feature 406, 407, 408: n = A,T,C or G
acacatatggcccgggagctacaacaatctatcctgctgctgggggctctgacgactgggcttatgaccaaggaatcagatattccttcacctttgaacttcgagatacaggcagatatggctttctccttccagaatcccagatccgggctacctgcgaggagaccttcctggcaatcaagtatgttgccagctacgtcctggaacacctgtacaagactcataagtcaaagagccaaactctaacccagaacactagttggcacttgagctctactttaaggcataagtaggattttcgtcagagaacctgacctaggcagaaggagtggcttcagccattttagagacttcaaaacaatgaagtgtttttcagggaatgtagagcagacctgtttggctgaannn

SEQ ID NO: 13042 - DNA, 3928 bp, Homo sapiens
  misc_feature 1, 3925, 3926, 3927, 3928: n = A,T,C or G
nacgagggggaaaacaaaatatccgccggaggagctttgctagagcgttggtcttggtgtcagagagaattcgctttccttttctgtttcccgcggtgtccttaaccaaaggcctcctctcttcacccgccccgaccaaaaggtggcgtctccctgaggaaactccctccccgccaggcagattacgtttacaaagtcctgagaagagaatcgaaacagaaaccaaagtcaggcaaactctgtaagaactgcctgacagaaagctggactcaaagctcctacccgagtgtgcagcaggatcgccccggtccgggaccccaggcgcacaccgcagagtccaaagtgccgcgcctgccggccgcacctgcctgccgcggccccgcgcgccgccccgctgcccacctgcccgcctgcccacctgcccaggtgcgagtgcagccccgcgcgccggcctgagagccctgtggacaacctcgtcattgtcaggcacagagcggtagaccctgcttctctaagtgggcagcggacagcggcacgcacatttcacctgtcccgcagacaacagcaccatctgcttgggagaaccctctcccttctctgagaaagaaagatgtcgaatgggtattccacagacgagaatttccgctatctcatctcgtgcttcagggccagggtgaaaatgtacatccaggtggagcctgtgctggactacctgacctttctgcctgcagaggtgaaggagcagattcagaggacagtcgccacctccgggaacatgcaggcagttgaactgctgctgagcaccttggagaagggagtctggcaccttggttggactcgggaattcgtggaggccctccggagaaccggcagccctctggccgcccgctacatgaaccctgagctcacggacttgccctctccatcgtttgagaacgctcatgatgaatatctccaactgctgaacctccttcagcccactctggtggacaagcttctagttagagacgtcttggataagtgcatggaggaggaactgttgacaattgaagacagaaaccggattgctgctgcagaaaacaatggaaatgaatcaggtgtaagagagctactaaaaaggattgtgcagaaagaaaactggttctctgcatttctgaatgttcttcgtcaaacaggaaacaatgaacttgtccaagagttaacaggctctgattgctcagaaagcaatgcagagattgagaatttatcacaagttgatggtcctcaagtggaagagcaacttctttcaaccacagttcagccaaatctggagaaggaggtctggggcatggagaataactcatcagaatcatcttttgcagattcttctgtagtttcagaatcagacacaagtttggcagaaggaagtgtcagctgcttagatgaaagtcttggacataacagcaacatgggcagtgattcaggcaccatgggaagtgattcagatgaagagaatgtggcagcaagagcatccccggagccagaactccagctcaggccttaccaaatggaagttgcccagccagccttggaagggaagaatatcatcatctgcctccctacagggagtggaaaaaccagagtggctgtttacattgccaaggatcacttagacaagaagaaaaaagcatctgagcctggaaaagttatagttcttgtcaataaggtactgctagttgaacagctcttccgcaaggagttccaaccatttttgaagaaatggtatcgtgttattggattaagtggtgatacccaactgaaaatatcatttccagaagttgtcaagtcctgtgatattattatcagtacagctcaaatccttgaaaactccctcttaaacttggaaaatggagaagatgctggtgttcaattgtcagacttttccctcattatcattgatgaatgtcatcacaccaacaaagaagcagtgtataataacatcatgaggcattatttgatgcagaagttgaaaaacaatagactcaagaaagaaaacaaaccagtgattccccttcctcagatactgggactaacagcttcacctggtgttggaggggccacgaagcaagccaaagctgaagaacacattttaaaactatgtgccaatcttgatgcatttactattaaaactgttaaagaaaaccttgatcaactgaaaaaccaaatacaggagccatgcaagaagtttgccattgcagatgcaaccagagaagatccatttaaagagaaacttctagaaataatgacaaggattcaaacttattgtcaaatgagtccaatgtcagattttggaactcaaccctatgaacaatgggccattcaaatggaaaaaaaagctgcaaaagaaggaaatcgcaaagaacgtgtttgtgcagaacatttgaggaagtacaatgaggccctacaaattaatgacacaattcgaatgatagatgcgtatactcatcttgaaactttctataatgaagagaaagataagaagtttgcagtcatagaagatgatagtgatgagggtggtgatgatgagtattgtgatggtgatgaagatgaggatgatttaaagaaacctttgaaactggatgaaacagatagatttctcatgactttattttttgaaaacaataaaatgttgaaaaggctggctgaaaacccagaatatgaaaatgaaaagctgaccaaattaagaaataccataatggagcaatatactaggactgaggaatcagcacgaggaataatctttacaaaaacacgacagagtgcatatgcgctttcccagtggattactgaaaatgaaaaatttgctgaagtaggagtcaaagcccaccatctgattggagctggacacagcagtgagttcaaacccatgacacagaatgaacaaaaagaagtcattagtaaatttcgcactggaaaaataaatctgcttatcgctaccacagtggcagaagaaggtctggatattaaagaatgtaacattgttatccgttatggtctcgtcaccaatgaaatagccatggtccaggcccgtggtcgagccagagctgatgagagcacctacgtcctggttgctcacagtggttcaggagttatcgaacatgagacagttaatgatttccgagagaagatgatgtataaagctatacattgtgttcaaaatatgaaaccagaggagtatgctcataagattttggaattacagatgcaaagtataatggaaaagaaaatgaaaaccaagagaaatattgccaagcattacaagaataacccatcactaataactttcctttgcaaaaactgcagtgtgctagcctgttctggggaagatatccatgtaattgagaaaatgcatcacgtcaatatgaccccagaattcaaggaactttacattgtaagagaaaacaaaacactgcaaaagaagtgtgccgactatcaaataaatggtgaaatcatctgcaaatgtggccaggcttggggaacaatgatggtgcacaaaggcttagatttgccttgtctcaaaataaggaattttgtagtggttttcaaaaataattcaacaaagaaacaatacaaaaagtgggtagaattacctatcacatttcccaatcttgactattcagaatgctgtttatttagtgatgaggattagcacttgattgaagattcttttaaaatactatcagttaaacatttaatatgattatgattaatgtattcattatgctacagaactgacataagaatcaataaaatgattgttttactctgtaaaggaaacccctaccaaggatacccacagtacaagatggaaaaggaggacctcaagagcctactaaaaccacggggggggcggtagactacctaagaaaaaaaacgttacaaacannnn

SEQ ID NO: 13043 - DNA, 1949 bp, Homo sapiens
aacattttttcagggggggttgggagtggtttcattttagtgtgagtggatgttttgatagttgtaaggaaaaaatgcatttcagacacatttcacacatgagctattttcttacacagtatgtcttattgttaataagaatgtaatttcatgatacaagtatttaataccttttttaagtcagtaaatattctagccatcaataaattgcagtagagtattaagaggggacaggatgagtttactcttaaaattaatcagtatcaaactaagtctactgtgtgtgttttttttttttgttttttgtttttgtttgtttactattatagtaagtctagtcttatttaaattggatttttgtattccagtttatatgacaaaatagactagatcagcgctggttgtaaatgcatgctgtacctcactgttttctccccatcatgccgctaaacttgctcgccaggttgtgcttaacttgtggtgaactggacttgattctgttttgttttgtttttttaaaaaaaaaaaacaaaaatgtaagggacagtgcataagccttttctttgttaagtagtggtgttttgctttttcttcaggattggatggcatgttgtccacaggaatgcctactgcagggctaacactggcaatatggcagctttaaattctgagttactacagtctccatgtcaaagcataatgtgtagcatatcagcaataactacatatttatagaaaacactttttcactttactgagccaattcatttaattgtcaaatgtctatatccatggtttaaatggcaacatatctataagtatgtatacacattatatttaagcttttctctgggccaaactgcttcatccttttttctttctttttttttttttttagccttatgatgaatttgtttgaagggcattttctttatgaacaaaggcttggatgcatattcctttctttctgtgaatgggtattattccctgaggaaagtttgcacagtgaaaaccagtctggttgtgacccactacatgttttgtttttaatcactattacctgagttgaactttgctcaccatgtttgtacttgttggtctgtttaatgaagtttggttgatgccatcctttgcactgccgaagcgtaatcttgtgtattacttagctctctgctgatctcagtatggacagtgtaacaacaaaaccaaaatggctggacagacttcttgtgttttgtaaatataaactaggacagttctgtaggtttgttcagtgtgctagtggagtatttccttaatgtaaaacttcacttaacagagagattctttgtttagcaagcttggagtgatgataaaatggtaagaaataatataaatgttgaagaaagcatcacaacagaactataggagtctaaatttaataaatctttaaaaaaaaccagtgtctagaatatataccatgttttattatttaaaatcattgtcttaaatttttgttcaaaaaataaaaatttgaatacaatcaaaaaaaaaaaaaaaaacaaaaaacacaaacataccgcccaccaccccccccttcgctcccccactatgtatagcgagcggtgccccataattcacatgcgcggatgggagcaaactacgcccccctcgtgtttagttgtaggacgagctgctacactgtcagacttataatacgaagcacagcgctgacttacaaatatctagaagaaacacatgtgtggttggttaaagaccccactatgtgggtgtgaaactaacgcaccaccccacgtgtactgcccacattaatataatgttgttacgaacccccttctccgtcagatggctcggttatataataaagcacagcaggtactgcagtgtatactatacgactcgtctccatcgatcacgtaactacaagctagctcctgagtattagcaac

SEQ ID NO: 13044 - DNA, 920 bp, Homo sapiens
  misc_feature 917, 918, 919, 920: n = A,T,C or G
acgcggggagactaaagcacagctgaaccctcaagcaggaactgagagcaaattgtattgaaactgcttcagctgtcggagatcgtttatatgtcttccttttttctgcattggttgggaataaaattgaatctattccagtaaaaggaccagccctatcaagaaagaggaagaaggaagtggatgctacttcacctgcaccctccacaagcagcactgtcaaaactgaaggagcagaggcaactcctggagctcagaaaagaaaaaaatcaaccaaagaaaaggctggacccaaagggagtaaggtgtccgaggaacagactcagcctccctctcctgcaggagccggcatgtccacagccatgggccgttccccatctcccaagacctcatgtcagctccacccaacacttcttcaactgagaacccgaaaacagtggccaaatgtcaggtaactcccagaagaaatgttctccaaaaacgcccagtgatagtgaaggtactgagtacaacaaagccatttgaatatgagaccccagaaatggagaaaaaaataatgtttcatgctacagtggctacacagacacagttcttccatgtgaaggttttaaacaccagcttgaaggagaaattcaatggaaagaaaatcatcatcatatcagattattggatatgactagtctcctagagtccaacgagaatcttactggatctgaagcgggtctaaccaaaggttgaggtccacattaacatcatcaccggagcaaagggacctgaagatgtaatttcccaccaggcttccgaatattggtatggggttttgccactagaaaggaccattacacactcagcaccggagtagaaacgtctcatgggaggaaccaacccggagagaaccattgtgcgcacaaaacacnnnn

SEQ ID NO: 13045 - DNA, 721 bp, Homo sapiens
  misc_feature 1, 2, 3, 4, 5, 6, 7, 8, 9, 10, 11, 12, 13, 14, 15, 16, 17,18, 19, 20, 21, 22, 23, 24, 718, 719, 720, 721: n = A,T,C or G
nnnnnnnnnnnnnnnnnnnnnnnnaatggtgtttttatttaaagcagcagaattggtagctaacagaatagtccctatgagtaacatgaagggcaaacgtcacatcaccatgttaacagactcgggaagtgtatctgaagaagtccaacctccattcatgaataacaattttcagcagacttctctgggggccttcctccacctgtgggagtcgtacatccagaagccgagtgagctggaaggaccccagtggggatgggctatggttggagaccctggtatgaaccccagtttagcttgacatagacacagatggttccatgcagaatatttatagacatgtatgtgcatggattagcattcacacacattcccttgctctgtcagctgagaataaaaatgaggatcattattactattacattctcatctaggcctttaaatagcagctccagttgtaaacctctctaaggggctctggattaactgcgtgagagtgatgaggggaaaaggtctttctcatctccatctgacctacccatctaccaaccaagctggacactgactgtccttccgtcctctccccagatgagtcattgcaaacagaagccccagaaagactccatgaagaatggtagtgagtttggtgtaaaggaaagatttagtgaaaatgacacttagttcattaactattcacggtggagcaacccatgtgcannnn

SEQ ID NO: 13046 - DNA, 564 bp, Homo sapiens
  misc_feature 1, 564: n = A,T,C or G
naacagaacaagcaagggtgaagtgcttcaagtagtatttgaggacagcagcgggtaagcttgatgtggtattcacagcttaaagagtagatgctgagtacagctgttgtccatgtgtagagcttttaataaccagcgcagcaggccccttcacctgcttttatgcctggaccagatgactgaatgtagaactttaggcactttttttttttttgagacggagtctcggtttgttgcccaggctggagtgcagtggcgcaatctcggctcactgcaagctctgccccccgggttcacgccattctcttgcctcagcctcccaagtagctgggactacagactcccaccaccatgcccggctaatttttatattttttagtagagacagggtttcaccgtgttagccaggatggtctcaatctcctgacctggtgatccacctgccttggcctcccaaagtgctgggattacaggtgtgagccaccagatcggccctttaggcactttctacttctcaaggtcaagaaacatcctttaaaaagttaattcccttttctggagccn

SEQ ID NO: 13047 - DNA, 919 bp, Homo sapiens
  misc_feature 1: n = A,T,C or G
ncagtaaaaatagagctaaatttaatgctcagttgcataaaactagattaaactacctacttattacctccttaattatttaaaaacattattgtattctttcattggttatgttgtatgtgtgacttcaagtaagcttacattattcttgggagtcccgccacttccagatagactacgatgaggacgggaactgctctttaattattagtgatgtttgcggggatgacgatgccaagtacacctgcaaggctgtcaacagtcttggagaagccacctgcacagcagagctcattgtggaaacgatggaggaaggtgaaggctaaggggaagaggaagaagagtgaaacaaagccagtgaagagcagttcccgtcctcatcgtagtctatctggaagtgccgggactccctgattgactggtcatctttgaaccagacaacctcggggtctgggtatccttcaatcttgcagtcaaatctagcaacatgaggcttttcctcagcaacagcctcaaggaaagcttgggacacatcttcttcagattctagtttttctgcattgagcgggctggttggtgaccctgttgaggatttcctgccactgagccctgagatcattgccatagaggacagtcttccaatggctctcacagcattgcccgttttctggaaaatagacacgagggttggactcaggcgttgtccctggttccagctgggtagtgcgaggggctgcagggagtagagcccagccccagagaagcagctgttccctggaacaaggacctcctgagagccgaggttctgccagaggagcgaacccaaccttgctctgctcagcactgtcagtgtgtcagaagatgttcagagaatggaatggggcctggaactgatgtgtgcgttaatgtgtcgccgcgt

SEQ ID NO: 13048 - DNA, 524 bp, Homo sapiens
  misc_feature 1, 2, 3, 4, 5, 6, 7, 524: n = A,T,C or G
nnnnnnnacggcattaatgtattcatgaggggtcttcccccatgacccaaacctgctcccatcaggccccacctccaacactgggatcaaatttcaacatgagattttgggggacaaacatgcaaactatagcagcaaccagctaccattctaaaactgccatatgattttaggatttttaaaaagggccaaatttaggttaagcaaaaagtgaaaatacagtaagagaaaatagttttataaaggctttaaaaagtgttcataaagagcagttcatagatttttcacgtaacgttcatcaatagatgctaaaactattggatgaaaagctattgtggaataggatcttctacaaggatttaaatataatcctacagaagaggtatcaattatacaggggaaaatgtacctttacaatggtcaccacaataaccaagtgattcaatttagcatcacccaaggtggaacaccctaacattatgcccctcctgatggacgcagatgggaggatcctctagatcgan

SEQ ID NO: 13049 - DNA, 2439 bp, Homo sapiens
  misc_feature 1, 2437, 2438, 2439: n = A,T,C or G
ntatagggagtcgacccacgcgtccgggcttcggccggctaagccgcggccacccgcggtctgagggaccggaggagcggggccgggagctgcgaggagccctccagacgtcgccgagcgcgagggcgggcgtgctcggagtggtcgctcgtcagccgccgcccctcagtctccgcacttgcaggtcccctccctctccgccgggacgcgggagagcccggctcgcggcgggggcggccaatgcgaaactggctggtgctgctgtgcccgtgtgtgctcggggccgcgctgcacctctggctgcggctgcgctccccgccgcccgcctgcgcctccggggccggccctgcagatcagttggccttatttcctcagtggaaatctactcactatgatgtggtagttggcgtgttgtcagctcgcaataaccatgaacttcgaaacgtgataagaagcacctggatgagacatttgctacagcatcccacattaagtcaacgtgtgcttgtgaagttcataataggtgctcatggctgtgaagtgcctgtggaagacagggaagatccttattcctgtaaactactcaacatcacaaatccagttttgaatcaggaaattgaagcgttcagtctgtccgaagacacttcatcggggctgcctgaggatcgagttgtcagcgtgagtttccgagttctctaccccatcgttattaccagtcttggagtgttctacgatgccaatgatgtgggtttccagaggaacatcactgtcaaactttatcaggcagaacaagaggaggccctcttcattgctcgcttcagtcctccaagctgtggtgtgcaggtgaacaagctgtggtacaagcccgtggaacaattcatcttaccagagagctttgaaggtacaatcgtgtgggagagccaagacctccacggccttgtgtcaagaaatctccacaaagtgacagtgaatgatggagggggagttctcagagtcattacagctggggagggtgcattgcctcatgaattcttggaaggtgtggagggagttgcaggtggttttatatatactattcaggaaggtgatgctctcttacacaaccttcattctcgccctcaaagacttattgatcatataaggaatctccatgaggaagatgccttactgaaggaggaaagcagcatctatgatgatattgtttttgtggatgttgtcgacacttatcgtaatgttcctgcaaaattattgaacttctatagatggactgtggaaacaacgagcttcaatttgttgctgaagacagatgatgactgttacatagacctcgaagctgtatttaataggattgtccaaaagaatctggatgggcctaatttttggtggggaaatttcagactgaattgggcagttgaccgaaccggaaagtggcaggagttggagtacccgagccccgcttaccctgcctttgcatgtgggtcaggatatgtgatctccaaggacatcgtcaagtggctggcaagcaactcggggaggttaaagacctatcagggtgaagatgtaagcatgggcatctggatggctgccataggacctaaaagataccaggacagtcagtggctgtgtgagaagacctgtgagacaggaatgctgtcttctcctcagtattctccgtgggaactgacggaactgtggaaactgaaggaacggtgcggtgatccttgtcgatgtcaagcaagataacagggacttgaattagcagagtctaaaatcagggcaggcaaacgataatctgagtgcaagtctgaggagtcccagggtttagcagtagactgtatggtctttcaagagagttccagactggcactttcacccagaaccaatgcggtgtttcttaatgtttgcacaaatttccttaaaaatcaacttgtactgtagcataagaaaagtttttatttatctattggaagattatcagaaaaataccaagttattttataaaagaaaaaatatttctaaatcctgatgcattgtggctaattagtaattcaccattacctatagtttttggttaaaacttggcctagttcagaaatctgtagtagtaactgagagtttgaatttcaacctggatcgcaggatagctctgtagagctaattaggataattatcagacaaaaaggaactcacaggaatgctgtgtgatcatgtgatcacatatttgagcagtggtcacttataccaaagtttggggtttctggcaaataatgtcagattttgtggatctctgacgtgggcaacttgaactaacttgaagaggaaccaatatgattctcagtttctgaacttggtttaaagaagttcattcatatggtagactaataacccaaatttctttctgccatctaacataactctgaaggtcacaggttagacnnn

SEQ ID NO: 13050 - DNA, 494 bp, Homo sapiens
  misc_feature 1, 2, 3, 9, 15, 494: n = A,T,C or G
nnnaccttntatttntttttttttttttagtagagatagggtttcaccatgttggccaggctactctcaaactcctgacctcaggcgatccgcccacctcagcttcccaaaggattacagtcgtgagccaccacgcctggctgatgtgtcagttttaaataagttcttaatatacaaagaattgaaataccaatatctacacttaaagccacaaaaagtcccataaacgagatgtgtttaatcgagtccccattaaatcagcttttgtcctcctactagctatacccttcactccccgcctcacactatacaaatacagacgacagcaatactgctagacaatggggctccaaccagagtttgtaggagagtgacaaatatgactgcctccatcaattgaaattacagtttacaaaattaggacacagggccctcatgcctgtaattgtttacaatccaaatagccagatgaatctttgtattataaaaaaatn

SEQ ID NO: 13051 - DNA, 1605 bp, Homo sapiens
gggaaaggcattggccactttggactttattagcaacagtaatgtcccctgacatccgcacaagcttgtagctccacggccaggtcttcccccaacctcacaatggccccgcaaggctcggagctccgggcactcagacatcatgagttggtccttgcacccccggaatttaattctctacttctatgctcttttatttctctcttcaacatgtgtagcatatgttgctaccagagacaactgctgcatcttagatgaaagattcggtagttattgtccaactacctgtggcattgcagatttcctgtctacttatcaaaccaaagtagacaaggatctacagtctttggaagacatcttacatcaagttgaaaacaaaacatcagaagtcaaacagctgataaaagcaatccaactcacttataatcctgatgaatcatcaaaaccaaatatgatagacgctgctactttgaagtccaggaaaatgttagaagaaattatgaaatatgaagcatcgattttaacacatgactcaagtattcgatatttgcaggaaatatataattcaaataatcaaaagattgttaacctgaaagagaaggtagcccagcttgaagcacagtgccaggaaccttgcaaagacacggtgcaaatccatgatatcactgggaaagattgtcaagacattgccaataagggagctaaacagagcgggctttactttattaaacctctgaaagctaaccagcaattcttagtctactgtgaaatcgatgggtctgggaaatggatggactgtgtttcagaagagacttgatggcagtgtagatttcaagagaaactggattcaatataaagaaggatttggacatctgtctcctactggcacaacagaattttggctgggaaatgagaagattcatttgataagcacacagtctgccatcccatatgcattaagagtggaactggaagactggaatggcagaaccagtactgcagactatgccatgttcaaggtgggacctgaagctgacaagtaccgcctaacatatgcctacttcgctggtggggatgctggagatgcctttgatggctttgattttggcgatgatcctagtgacaagtttttcacatcccataatggcatgcagttcagtacctgggacaatgacaatgataagtttgaaggcaactgtgctgaacaggatggatctggttggtggatgaacaagtgtcacgctggccatctcaatggagtttattaccaaggtggcacttactcaaaagcatctactcctaatggttatgataatggcattatttgggccacttggaaaacccggtggtattccatgaagaaaaccactatgaagataatcccattcaacagactcacaattggagaaggacagcaacaccacctggggggagccaaacaggctggagacgtttaaaagaccgatttttcctattggacaatggacttgcaaagcttcacttcattttaagagcaaaagaccccatgttgaaaactccataacagttttatgctgatgataatttatctacatgcatttcaataaaccttttgtttcctaagac

SEQ ID NO: 13052 - DNA, 1803 bp, Homo sapiens
  misc_feature 1, 20, 21, 1802, 1803: n = A,T,C or G
nactaggtttgcaccttctnnaccatgagctagaccatgtctggaggctgggacctggtgacccaggctccctgcggccttcttaaccgcagccacttggggccagttgtgggcagtgctgctgctattgagccccgtgccctctcacaggccatcatctgtgcgatctctgcggtggacgaggtggactacaagacggctgaggagaagtacatcaaggggccttcgctgagctaccgggaaaaagaaatatttgacaaccagctccttgaagagcggaaccggcgccgtcggtgagggagcagccggctgtgctgtcagcggggcctggcggtggaagcgcctccagtgtgcatgagcgtgtctgaagatggggggctcagggggcacgtttgcgtttggacctgtctgtgcgttctcctgcgtggcagtcctgatttccatacttctggagaatccatttcgttaacactgaaagccagttctcttttcctggcagtttttttcattttatttttggcattttttacaagataccgttcgggaaaggcttttgaaaggacggaagcgtattcactgtgcgccagtactcctggctgtgctgtggtttctcccgacgtgcacatcgatctcgtatgtgtggcatctgatattaaacgggaggttttaagaagcgtctgccgtgatcatggagcttcggaagcgggaatggttcttccgggtttgctgttttgtctgtttcccccttgtgtggtttccgcctgcgacagttccagaatttgctctcccactcagtgtgctctgcagctgtgaggaaacagccttcgttagaggcgggagcagagacgagccgctgctctgtgtcgtgtttgctgtggccgcagggagaggagcaggacacgcacctttccaggggcctctgtgtcccgcactgtgtgtgagtggaccgcagcgcgcagccacatgccctggctgccatgggccagaccgcctccacctcccccgcccgcctggcctgtcctgagtgcatttccctgcactgtgtcgtcactgcacagccagtcaccgcggtctcagtcatcggcgcggatggctatgctggggtcccagggtggccgcagcagtcagggtcactgtgggagccctggggtggagtgacaaaccgcattgtcctgtgcccgccatggcagaagcgcagcctttgtatggaggcccaaccgcgctcccgtctggagaagcggcttccggggtgtggctgccgggtcggctctggtccacagcacggtgccggggctgcaggttgttgagggctgtgactccgtggggctcagccaggctccagcagggtcagacgtgctgttaagagcaaagccacagacgatgacttgtccattctcagtggatgctccaggctgtgcctacacagcagtgctggtgacatgtccagggttccagggcccggtggcctgggagctgctttctccccactggctgggctgcatctggccctggctggaggcttgcttgaggggctgtgaccctcttcccccaggccctcccagcgacgacagccacgggagagatcgaacacatgctcagatgcgggcgtgcggggagcgccaggcttcggtggctgggatcggagtggcagcgcggggctgcccgggtctgcctgtttctggcctgtcgccgcaggaatcggggtggtcgccctcgcgggggtgtggggccccgcgggggtttgcccctgttgattggccacggcgtgggcttcacccttcggtctggggtggtgtcatacnn

SEQ ID NO: 13053 - DNA, 450 bp, Homo sapiens
  misc_feature 432, 433, 434, 435, 436, 437, 438, 439, 440, 441, 442, 443,444, 445, 446, 447, 448, 449, 450: n = A,T,C or G
acttttttttttttttttttttttttttccttttttttttttttttttttttttttttttttttttttttttttttttttttttttttttttttttttaaaaaaccaacccctttaaattttaagcccaattttgagtatccaaagccaaaccccccaatttgggttgggaccccaggcacacttccaaaaccgtttttaaggggcccgggggagggggaaccccacctttggaacaaaacaccgggcgggggacggccccccttaaaaatgcaggcaaacccccccaaaagggttaaaaatccccccccctttttgggagggacccccatggttttagaaaaaaacccccgggggaccccccaaacggggttgtaaaaacaacaccccttatttgcccactgggagggcgggaccccaaaaaaaccaaaannnnnnnnnnnnnnnnnnn

SEQ ID NO: 13054 - DNA, 397 bp, Homo sapiens
  misc_feature 389, 390, 391, 392, 393, 394, 395, 396, 397: n = A,T,C or G
actttttttttttttttttttttttttccttttttttttttttttttttttttttttttttttttttttttttttttttttttttttttttttttttttccaagggaaaaaacggttttttaaaaaaagaccccaaaaattttttccttccccttaaaaccaaggggggtgggggccaccttaaacggggggatttgggaaaagggaaccccttccacttccaaggggaagggttaaaaaaaaaggcctttttaaaagggttttggaaaccgggggagcctaatccgggaaacccaaaccccttggggggggggggcccagcccaaagggaagggccccttataatttttagggccaccaccccaggggggtttcccaccaaaattaannnnnnnnn

SEQ ID NO: 13055 - DNA, 700 bp, Homo sapiens
  misc_feature 1, 2, 3, 4, 5, 6, 7, 8, 9: n = A,T,C or G
nnnnnnnnnaacatggcaacctttaaagccagctcttaaataccaagaccttgaacttgatgcattccacctttctcctctgcccagaaggcagatgggagaataattcaccaaagtttagacacaggtaaattgaggggagggtttcttttttctttttgtttttttgagccaagtcatgctcctgaaaaaaaatgcttactgaggaaaataaacacctcgagctcaagcagctctcaggagtatgtagtccctgccctgaggccacttatcatctagtttgagaagagacaggtacaaaaatagctcaaacatcaggtgccagcagttcaggggagggatctgaaaaggcagcaaggcactaaatcagcaccccaacctggttttgtgtttgttttcttaaacctgccagcaccaactcttcatcaccttgtcaaattcaagaccatcttggagagacagttaggactgacttgcaatgtctttgtgattcttacccacccacatggctggttttctaggcctcgggccagtgctcctttaaaaagtgatgcaagccctataagtgaccacgagagaatggactcctgggtggcttcatccacacaccgcttccaacagggccccagcgttcgccctctggggctctcaaactgctgcgtgggcaagacaagccttgaacaagctcacatacccgcgt

SEQ ID NO: 13056 - DNA, 367 bp, Homo sapiens
  misc_feature 360, 361, 362, 363, 364, 365, 366, 367: n = A,T,C or G
acaagacattttgcatggtattgtggatgttaaaattaagtttagcctaaagctaccttcttataaattctgcctaaagatttccctgttcatagtgaactggatgtgtaaacagactggaaactactcctctaccaatcgctgagttttggccaatcacaggaggccaactcttcaaatagaggaaaagccagctgtaaccaatccagctgtttctgtatgtcacttccattttctgcaggtcactttcctttttctgtttcccttttctgaccacacgccagcaccagagtctctctcaacccattatggtttgggggctgcctgattcgtaaattgttctttgctcgattaaactcnnnnnnnn

SEQ ID NO: 13057 - DNA, 469 bp, Homo sapiens
  misc_feature 467, 468, 469: n = A,T,C or G
acccttccgctccctgagcccaaagaggagaacccagccctctgcgtaggaagaacacatttcaaggcatttactgacaagtaggtatagttactgcatacacatgtggaggctgcattatatcaaaaccgtaaataaacatagactctgcacactccttcaggccccaccatgtatttatgaatgggattgcttcatcattttcttttaatgtcagtagcagggaagtcagaaagcattacctctaaaacggggacagaacattgcaaatacatacatttccaaccagctgtggcaataaccagcaaacaaaattacttcaccccgttgttatgggccccatgcctatgggatttttcctgagtttctgatttataacaatcacttttgaaggcctcaaaatgcttaggtgagattaaattactgattatccaaaagttctgttttcgctggagtctttctggacnnn

SEQ ID NO: 13058 - DNA, 451 bp, Homo sapiens
  misc_feature 443, 444, 445, 446, 447, 448, 449, 450, 451: n = A,T,C or G
actgcgaggtcaccttcatggattagcatcctgctgtgagctgaaagactgaacaagcagaagcataagccaaacccatccctccacgctccccactgtgcagatggacttactgaggctccagcatacactgcttgctcagcactttatctatttcagaccaaagtgtcagcagaactgatacccacggggcatccaagtccacatccagacccagttccctctgcggccctctcttaaaccgagccgctgactgctgatggtgagttcccaatcatgggctgcactgagggtgccagaggcctgggtgggcatgaagcctggtgggtatggagtgaaggggatttgggagtggcatctagaaggtcagcatgaagggcaaagaggagaaaaagaacccatggcttgcagccagcaggggaaacgggcccaatgcacagacnnnnnnnnn

SEQ ID NO: 13059 - DNA, 331 bp, Homo sapiens
acattgaagctctgccccatgtgatatgtctggagacaggacctttgggggtgattaggatttcaacgtaaggatttggggggacgcaaaccttcagcccacagcagtgcccttggtcctaccccttcctctcctagacttcctccataggagttcggcaggcactcctggtcttcctttatcttcttgcagaaagatggcccggcaggtccgtccaaacacaaagactggacgcagagacccggagaacagcaaaacggagattttcaatgacagtcttgcaagactgggtgtctggctggcatgcagccacccccgcgtacctcggccg

SEQ ID NO: 13060 - DNA, 377 bp, Homo sapiens
  misc_feature 373, 374, 375, 376, 377: n = A,T,C or G
acttttttttttttttttttttttttattttttttttttttttttttttttttttttttttttttaatatttatcttttttaatttttaggccaatttttagaaaaaaaagcccgatcaaaaaattgggccaattgagccggaagccaaaatcgaaaaaccctttttggtgtgggcagccggaggaaacatccaaaacctggtactaatgaccccgcggggggcggcaccccacccggaggcaaaaacaacccccggggaagcggcccaattaaaaatccccgccaagccggacaaaaatggtaaaaagaaacaacccccttgggaccgcaccaacggggttttaaaaaaaaaacccccggggcccccactannnnn

SEQ ID NO: 13061 - DNA, 9835 bp, Homo sapiens
  misc_feature 1, 9807, 9808, 9809, 9810, 9811, 9812, 9813, 9814, 9815,9816, 9817, 9818, 9819, 9820, 9821, 9822, 9823, 9824, 9825,9826, 9827, 9828, 9829, 9830, 9831, 9832, 9833, 9834, 9835: n = A,T,C or G
nagcccggcccgggggacgggcggcgggatagcgggaccccggcgcggcggtgcgcttcagggcgcagcggcggccgcagaccgagccccgggcgcggcaagaggcggcgggagccggtggcggctcggcatcatgcgtcgagggcgtctgctggagatcgccctgggatttaccgtgcttttagcgtcctacacgagccatggggcggacgccaatttggaggctgggaacgtgaaggaaaccagagccagtcgggccaagagaagaggcggtggaggacacgacgcgcttaaaggacccaatgtctgtggatcacgttataatgcttactgttgccctggatggaaaaccttacctggcggaaatcagtgtattgtccccatttgccggcattcctgtggggatggattttgttcgaggccaaatatgtgcacttgcccatctggtcagatagctccttcctgtggctccagatccatacaacactgcaatattcgctgtatgaatggaggtagctgcagtgacgatcactgtctatgccagaaaggatacatagggactcactgtggacaacctgtttgtgaaagtggctgtctcaatggaggaaggtgtgtggccccaaatcgatgtgcatgcacttacggatttactggaccccagtgtgaaagagattacaggacaggcccatgttttactgtgatcagcaaccagatgtgccagggacaactcagcgggattgtctgcacaaaaacgctctgctgtgccacagtcggccgagcctggggccacccctgtgagatgtgtcctgcccagcctcacccctgccgccgtggcttcattccaaatatccgcacgggagcttgtcaagatgtggatgaatgccaggccatccccgggctctgtcagggaggaaattgcattaatactgttgggtcttttgagtgcaaatgccctgctggacacaaacttaatgaagtgtcacaaaaatgtgaagatattgatgaatgcagcaccattcctggaatctgtgaagggggtgaatgtacaaacacagtcagcagttacttttgcaaatgtccccctggtttttacacctctccagatggtaccagatgcatagatgttcgcccaggatactgttacacagctctgacaaacgggcgctgctctaaccagctgccacagtccataaccaaaatgcagtgctgctgtgatgccggccgatgctggtctccaggggtcactgtcgcccctgagatgtgtcccatcagagcaaccgaggatttcaacaagctgtgctctgttcctatggtaattcctgggagaccagaatatcctcccccaccccttggccccattcctccagttctccctgttcctcctggctttcctcctggacctcaaattccggtccctcgaccaccagtggaatatctgtatccatctcgggagccaccaagggtgctgccagtaaacgttactgattactgccagttggtccgctatctctgtcaaaatggacgctgcattccaactcctgggagttaccggtgtgagtgcaacaaagggttccagctggacctccgtggggagtgtattgatgttgatgaatgtgagaaaaacccctgtgctggtggtgagtgtattaacaaccagggttcgtacacctgtcagtgccgagctggatatcagagcacactcacgcggacagaatgccgagacattgatgagtgtttacagaatggccggatctgcaataatggacgctgcatcaacacagatggcagttttcattgcgtgtgtaatgcgggctttcatgttacacgagatgggaagaactgtgaagatatggatgaatgcagcataaggaacatgtgccttaatggaatgtgtatcaatgaagatggcagttttaaatgtatttgcaaacctggattccagctggcatcagatggacgttattgcaaagacattaacgagtgtgaaacccctgggatctgcatgaatgggcgttgcgtcaacactgatggctcctacagatgtgaatgcttccctggactggctgtgggtctggatggccgtgtgtgtgttgacacacacatgcggagcacatgctatggtggatacaagagaggccagtgtatcaaacctttgtttggtgctgtcactaaatctgaatgctgttgcgccagcactgagtatgcatttggggaaccttgccagccgtgtcctgcacagaattcagcggaatatcaggcactctgcagcagtgggccaggaatgacgtcagcaggcagtgatataaatgaatgtgcactagatcctgatatttgcccaaatggaatctgtgaaaaccttcgtgggacctataaatgtatatgcaattcaggatatgaagtggattcaactgggaaaaactgcgttgatattaatgaatgtgtactgaacagtctcctttgtgacaatggacaatgtagaaatactcctggaagttttgtctgtacctgccccaagggatttatctacaaacctgatctaaaaacatgtgaagacattgatgaatgcgaatcaagtccttgcattaatggagtctgcaagaacagcccaggctcttttatttgtgaatgttcttctgaaagtactttggatccaacaaaaaccatctgcatagaaaccatcaagggcacttgctggcagactgtcattgatgggcgatgtgagatcaacatcaatggagccaccttaaagtcccagtgctgctcctccctcggtgctgcgtggggaagcccgtgcaccctatgccaagttgatcccatatgtggtaaagggtactcaagaattaaaggaacacaatgtgaagatatagatgaatgtgaagtgttcccaggagtgtgtaaaaatggcctgtgtgttaacactagggggtcattcaagtgtcagtgtcccagtggaatgactttggatgccacaggaaggatctgtcttgatatccgcctggaaacctgcttcctgaggtacgaggacgaggagtgcaccctgcctattgctggccgccaccgcatggacgcctgctgctgctccgtcggggcagcctggggtactgaggaatgcgaggagtgtcccatgagaaatactcctgagtacgaggagctgtgtccgagaggacccggatttgccacaaaagaaattacaaatggaaagcctttcttcaaagatatcaatgagtgcaagatgatacccagcctctgcacccacggcaagtgcagaaacaccattggcagctttaagtgcaggtgtgacagcggctttgctcttgattctgaagaaaggaactgcacagacattgacgaatgccgcatatctcctgacctctgtggcagaggccagtgtgtgaacacccctggggactttgaatgcaagtgtgacgaaggctatgaaagtggattcatgatgatgaagaactgcatggatattgatgagtgtcagagagatcctctcctatgccgaggtggtgtttgccataacacagagggaagttaccgctgtgaatgcccgcctggccatcagctgtcccccaacatctccgcgtgtatcgacatcaatgaatgtgagctgagtgcacacctgtgccccaatggccgttgcgtgaacctcatagggaagtatcagtgtgcctgcaaccctggctaccattcaactcccgataggctattttgtgttgacattgatgaatgcagcataatgaatggtggttgtgaaaccttctgcacaaactctgaaggcagctatgaatgtagctgtcagccgggatttgcactaatgcctgaccagagatcatgcaccgacatcgatgagtgtgaagataatcccaatatctgtgatggtggtcagtgcacaaatatccctggagagtacaggtgcttgtgttatgatggattcatggcatctgaagacatgaagacttgtgtagatgtcaatgagtgtgacctgaatccaaatatctgcctaagtgggacctgtgaaaacacgaaaggctcatttatctgccactgtgatatgggctactccggcaaaaaaggaaaaactggctgtacagacatcaatgaatgtgaaattggagcacacaactgtggcaaacatgctgtatgtaccaatacagcaggaagcttcaaatgtagctgcagtcccgggtggattggagatggcattaagtgcactgatctggacgaatgttccaatggaacccatatgtgcagccagcatgcagactgcaagaataccatgggatcttaccgctgtctgtgcaaggaaggatacacaggtgatggcttcacttgtacagaccttgatgagtgctctgagaacctgaatctctgtggcaatggccagtgcctcaatgcaccaggaggataccgctgtgaatgcgacatgggcttcgtgcccagtgctgacgggaaagcctgtgaagatattgatgagtgctcccttccgaacatctgtgtctttggaacttgccacaacctccctggcctgttccgctgtgagtgtgagataggctacgaactggacagaagcggcgggaactgcacagatgtgaatgaatgcctggatccaaccacgtgcatcagtgggaactgtgtcaacactccaggcagctatatctgtgactgcccacctgattttgaactgaacccaactcgagttggctgtgttgatacccgctctggaaattgctatttggatattcgacctcgaggagacaatggagatacagcctgcagcaatgaaattggagttggtgtttccaaagcttcctgctgctgttctctgggtaaagcctggggtactccttgtgagatgtgtcctgctgtgaacacatccgagtacaaaattctttgtcctggaggggaaggtttccgaccaaatcctatcaccgttatattggaagatattgatgagtgccaggagctaccagggctgtgccaaggaggaaaatgtatcaacacctttgggagtttccagtgccgctgtccaaccggctactacctgaatgaagatacacgagtgtgtgatgatgtgaatgaatgtgagactcctggaatctgtggtccagggacatgttacaacaccgttggcaactacacctgtatctgtcctccagactacatgcaagtgaatgggggaaataattgcatggatatgagaagaagtttgtgctacagaaactactatgctgacaaccagacctgtgatggagaattgttattcaacatgaccaagaagatgtgctgctgttcctacaacattggccgggcgtggaacaagccctgtgaacagtgtcccatcccaagtacagatgagtttgctacactctgtggaagtcaaaggccaggctttgtcatcgacatttataccggtttacccgttgatattgatgagtgccgggagatcccaggggtctgtgaaaatggagtgtgtatcaacatggttggcagcttccgatgtgaatgtccagtgggattcttctataatgacaagttgttggtttgtgaagatattgacgagtgtcagaacggcccagtgtgccagcgcaacgccgaatgcatcaacactgcaggcagctaccgctgtgactgtaagcccggctaccgcttcacctccacaggacagtgcaatgatcgtaatgaatgtcaagaaatccccaatatatgcagtcatgggcagtgcattgacacagttggaagcttttattgcctttgccacactggttttaaaacaaatgatgaccaaaccatgtgcttggacataaatgaatgtgaaagagatgcctgtgggaatggaacttgccggaacacaattggttccttcaactgccgctgcaatcatggtttcatcctttctcacaacaatgactgtatagatgttgatgaatgtgcaagtggaaatgggaatctttgcagaaatggccaatgcattaatacagtggggtctttccagtgccagtgcaatgaaggctatgaggtggctccagatgggaggacctgtgtggatatcaatgaatgtcttctagaacccagaaaatgtgcaccaggtacctgtcaaaacttggatgggtcctacagatgcatttgcccacctggatacagtcttcaaaatgagaagtgtgaagatattgatgagtgtgtcgaagagccagaaatttgtgccctgggcacatgcagtaacactgaaggcagcttcaaatgtctgtgtccagaagggttttccttgtcctccagtggaagaaggtgccaagatttgcgaatgagctactgttatgcgaagtttgaaggaggaaagtgttcatcacccaaatccagaaatcactccaagcaggaatgctgctgtgccttgaagggagaaggctggggagacccctgcgagctctgccccacggaacctgatgaggccttccgccagatatgtccttatggaagtgggatcatcgtgggacctgatgattcagcagttgatatggacgaatgcaaagaacccgatgtctgtaaacatggacagtgcatcaatacagatggttcctatcgctgcgagtgtccctttggttatattctagcagggaatgaatgtgtagatactgatgaatgttctgttggcaatccttgtggaaatggaacctgcaagaatgtgattggaggttttgaatgcacctgcgaggagggatttgagcccggtccaatgatgacatgtgaagatataaatgaatgtgcccagaatcctctgctctgtgccttccgatgtgtgaacacttatgggtcatatgaatgcaaatgtcccgtgggatatgtgctcagagaagaccgtaggatgtgcaaagatgaggatgagtgtgaagagggaaaacatgactgtactgaaaaacaaatggaatgcaagaacctcattggcacatatatgtgcatctgtggacccgggtatcagcggagacctgatggagaaggctgtgtagatgagaatgaatgtcagacgaagccagggatctgtgagaatgggcgctgcctcaacacccgtgggagctacacctgtgagtgtaatgatgggtttaccgccagccccaaccaggacgagtgccttgacaatcgggaagggtactgcttcacagaggtgctacaaaacatgtgtcagatcggctccagcaacaggaaccccgtcaccaaatcggaatgctgctgtgacggagggagaggctggggtccccactgtgagatctgccctttccaggggactgtggctttcaagaaactctgtccccatggccgaggattcatgaccaatggagcagatatcgatgaatgcaaggttattcacgatgtttgccgaaatggggaatgtgtcaatgacagaggatcatatcattgcatttgtaaaactgggtacactccagatataactgggacttcctgtgtagatctgaacgagtgcaaccaggctcccaaaccctgcaattttatctgcaaaaacacagaagggagttaccagtgttcatgcccgaaaggctacattctgcaagaggatggaaggagctgcaaagatcttgatgagtgtgcaaccaagcaacacaactgccagttcctatgtgttaacaccattggcggcttcacatgcaaatgtcctcccggatttacccaacaccatacgtcctgcattgataacaatgaatgcacctctgacatcaatctgtgcgggtctaagggcatttgccagaacactcctggaagcttcacctgtgaatgccagcggggattctcacttgatcagaccggctccagctgtgaagacgtggacgagtgtgagggtaaccaccgctgccagcatggctgccagaacatcattgggggctacaggtgcagctgcccccagggctacctccagcactaccagtggaaccagtgtgttgatgaaaacgaatgcctcagcgctcacatctgcggaggagcctcctgtcacaacaccctggggagctacaagtgcatgtgtcccgccggcttccagtatgaacagttcagtggaggatgccaagacatcaatgaatgtggctctgcgcaggccccctgcagctatggctgttccaataccgagggcggttacctgtgtggctgtccacctggttacttccgcataggccaagggcactgtgtttctggaatgggcatgggccgaggaaacccagagccacctgtcagtggtgaaatggatgacaattcactctccccagaggcttgttacgagtgtaagatcaatggctaccccaaacggggcaggaaacggagaagcacaaacgaaactgatgcctccaatatcgaggatcagtctgagacagaagccaatgtgagtcttgcaagttgggatgttgagaagacagccatctttgctttcaatatttcccacgtcagtaacaaggttcgaatcctagaactccttccagctcttacaactctgacgaatcacaacagatacttgatcgaatctggaaatgaagatggcttctttaaaatcaaccaaaaggaagggatcagctacctccacttcacaaagaagaagccagtggctggaacctattcattacaaatcagtagtactccactttataaaaagaaagaacttaaccaactagaagacaaatatgacaaagactacctcagtggtgaactgggtgataatctgaagatgaaaatccaggttttgcttcattaattcaccatccagagaccaaataattaaaagaaaaacaaatatagataggtagaactatattttcccccaatcagaatcatcatatcataggtacaatctttcaccaagtaaatttgtataaataagcactattctttgtattaccaaagcaaggtacaggtgactaccctagttcaaaacaaccactttctcaggcttctcatgtgtgtagctaagctaccttgtcatatgtgttgattcttgaaaactgggacgtgtatttccattgggggttggccatttatgctgacatgccatccttccagcaaacgtatgggaatgtgctttcaattgatggactactctattttttgcaaatttgtaaactttgcttctccaaatacaagtactaggttgtccatttatggtacctatttggtgctagtaaattttcaaactagatttataaatgcactgtaatatgtacacaacttagaaaccaaattacaagtattcagttccaatacttcattaatttcaatcaaccaaagttagttcagtagcttatctcagttatgagtataatacattacatgtaaattaagtgtgtgtatactgtaatcgtgctattttttatcattgaaacatttataaactagaataataatgcccttaatgtgagggtttgtaatggtgcttattaagaccaaagacttgttaaatgtatacaccaagtggtaatgaaatttctgtgactggcccacacgtgcatagaggtctgggaggaccaggaaacagcctcagtggccagaggatcaccagtgcatccttcatcacagcatgtgcaatatgccaagattaccctcggtcattcctgtcaacaaggggtcaatgtcataaatgtcacaataaaacaatctcttcttttttttagtttaaaaaaaaaaaagaaagcgcgcgacgacacatttttgagaaaaaaaaaaaaaaaatgtggggggcggccaaaagaattaaaaacttgggggggccgaagaagaagggattgttaaagagcggggaaaggggtgtcaaaaaannnnnnnnnnnnnnnnnnnnnnnnnnnnn

SEQ ID NO: 13062 - DNA, 1639 bp, Homo sapiens
  misc_feature 1, 2, 3, 1635, 1636, 1637, 1638, 1639: n = A,T,C or G
nnngcccttccgtgccccttccggatcgcttcaaagacccattcctcccttcggtctcttaatgaagaaactggacaactggaaccacatcggtaaactttttgggagaagaactagatgatgcctgcaaatgctcttaggaaattggcctgtctacttccgtaatgggaagatttctaaaaaattcaactgaagggtacacccaaatcccactgttcatctaaccgcatgtaagcccttcccgccagcgagctgaaaccagttaatcctcccatggctgcataaggaatgtcctgtcccactggtttttcctgagccaatctttcttgcttagtttccactactgtgtcatgggcatatgcaggctgaccacaagcacaagtgaagcagctatggaatcctgaacacttggaacatgtattgcatgtaaagccaggcgcagcactgtgctgatcagcaaagtgtttgcacctgcagcgaatgggctggctaccattcaaggggacataaaggtaagccctgcactggcagccagtcacttggcagggcagatcaatggggcactgctgaggaatcgcttccaagtcagttttatgttgtttatacctatgtgtacaaaaacacagtgtctctgggcccacaagtttacaatccatccctgttggtgaccgccagctcacaaataatctgttttgtaagcgcagaggtaaaacttttcttttgtattcttcatattcttcaggagtaaaaagtttccctccatcatcctcaccaacaattctccggtactccaggtactcgtccaccgccgccgcgccgccgagaggcaacgtcaaccgctccattgccggtggggaagccaaaggcttccctgcggaccagctgacctcgcagcccgacccgccccgttccctcccggtaccgcgccccctcccgcccgcctcctgattggcccggcctgaagcccgaggaggccgcgcgcggcaactgcgcaggacgcgcgcccctactggctgccggcgccaggcaccagaacccggatctccgcaagcgcagcctcgcgccacatggagtgcagtttgccgccctccacaaaccttgcacctattcccctctcccttccctggaccggcgagtcttcttgtaaattaacaagtgacaagggagtgcagtgccttgcatataacaggcgcatagaaaatggcttatttctttgtacagctcttttcgcttaatccatctcttgaaatataagtagttttgagaaggttctgctttagtttgaggcctgcctctccttaactgtcggcctgtttccagtattggcgttttcaaaaactctgatgtaacaatcagtagttctgggtatctgggttcactttgggggttgctaaagctacatgttcttcaaaggaaccgaataactgatttaaggtgaagcaagtaaaaacaatttacgtgaaaaaaaaaaaaaaaaaggggagcccccttcctttttttaaaaaaaaaccccccaaatttgtgtgggggactaaaaaaataaaaaaaatgccatggctctttaaaaatggtttttgcagcttaaaaggggaaaaaaaaaacccattccctaccaattttaccaaaaaaaacaannnnn

SEQ ID NO: 13063 - DNA, 822 bp, Homo sapiens
gcggccgaggtacgcgggagctcttgtatcactcataatctggcagccagttccgtcctgacagagttcacagcatatattggtggattcttgtccatagtgcatctgctttaagaattaacgaaagcagtgtcaagacagtaaggattcaaaccatttgccaaaaatgagtctaagtgcatttactctcttcctggcattgattggtggtacctcggccgaggtacacagggaaaaactcagacacagattgacgaaaatgggaaacagaaattctaggcctaggggacaaaggaaagagggagccaaagagactccctctgacattcccccggatagtcctttaaggagaatgctgcaggtttggagggacaacccttgaaccagggacaaggaaaaggaaaagatgataaagtattgctgttttacctgtcccaaagaccccattcgcaagccttcagtcttttgatttaagtttggctcagatgagaactgggtgtgccaagctttaattctctatgtgaatgataaaaccccattctaggccgggcacggtggcttacgcctgtggtcccagcactttgggaggccgaggtgggtggatcacgatgtcaggagatcgagaccatcctggctaacacaatgaaaccccatctctactaaaaatacaaaaaattagccaggtggtggtggtgggcgcctgtagtcccagctacttgggaggctgaggcaggagaatggcgtgaacccgggaggcggagcttgcagtgagctgagatcgcaccactgcactccagcctgggcgacagagcaagactccac

SEQ ID NO: 13064 - DNA, 1040 bp, Homo sapiens
  misc_feature 1, 2, 3, 4, 5, 1038, 1039, 1040: n = A,T,C or G
nnnnnactgcggcgcacttccgtagaggtggacatggcgtgcggctttcgccgcgctattgcttgccagctttccagagtgttgaatcttccaccagaaaacttgatcacatcaatatctgcagttccaatttcccaaaaagaagaagtagctgattttcagctttctgtggattctttattggaaaaagacaatgaccattcaagaccagatattcaagttcaagccaagagactagcagagaagctaagatgtgatacagtggtgagtgaaatcagtactggtcaaaggactgtaaatttcaaaataaacagagagctcttaacaaagacagtgctacaacaagtaattgaagatggctcaaaatatggattaaaaagtgaacttttctctggacttccccagaagaagattgtggttgaattcagttcacctaatgttgccaaaaaatttcatgttggacatttgcgttctaccatcataggaaattttatagcaaatctcaaagaagctttaggacatcaagtaataagaataaattaccttggcgattggggcatgcagtttggtcttctgggaactggcttccagctgtttggctatgaggaaaaactgcagtccaatcctctacagcatctctttgaagtttatgtacaagttaataaagaagcagcagatgataaaagtgtagcaaaagcagcacagggagttcttgccaacgatgggacctgggcatgtgcaagcctttcactgtggccaaatttcgggacttggcattgaaagtaccttcggtttcaaacgctgggagatatccggcgaccattccggagacccacgtcactctggacacatctcaagagcattaagcggccgggaacgatagcgcccttcggtaaaaaaaaagaaggggcaaaccctgggaagggacccacccaagtatgggaggcgaacaggagatactctcaccgaacttttgccatagcagcgcaattttacttgggatcagacaacaaacgaagtgaactgtacgaagtagannn

SEQ ID NO: 13065 - DNA, 5185 bp, Homo sapiens
  misc_feature 1, 5170, 5171, 5172, 5173, 5174, 5175, 5176, 5177, 5178,5179, 5180, 5181, 5182, 5183, 5184, 5185: n = A,T,C or G
nctcttgggtcagattctcagctcccagctccccgctcccggctcccggcgcccggcgcccggcgcggagctgttcctcaaacgacacgcagccgaggtgggtgggtgtggggacgcgggagccagtgtcgtcggatcggcccgcagtccgctgtcctgctgagcccggaggccgcctggatggagccgccgctcccggtcggagcccagccgcttgccactgtcgagggtatggagatgaagggtcctctccgggagccctgcgccctgaccctagcccagaggaacgggcaatatgagttaataatccagttgcatgagaaggaacagcatgttcaagatatcattcctataaatagccacttcagatgtgttcaagaagcagaagaaactcttttgattgacatagcttctaacagtggctgcaaaattcgggttcagggggactggatcagagagcgccgctttgaaatccctgatgaggaacactgtttgaagttcctctcagctgtccttgctgctcagaaagctcagtcacagcttcttgttccagagcaaaaggactcatctagctggtaccagaaattagacactaaggacaaaccttctgttttttcagggcttcttggatttgaagacaatttttcttctatgaatttggacaagaaaataaattcacaaaatcagcctactgggattcatcgggaacccccacctccacccttttcagtgaataaaatgcttccacgtgaaaaagaagcttctaacaaggagcagcccaaagtgaccaacaccatgcggaagctctttgtaccaaatacccaatctgggcagcgggagggtctcatcaaacatatcctggcaaagcgagagaaagaatatgtcaacattcagactttcagattttttgttggaacttggaatgtgaatggccagtctccagatagcgggttagaaccttggctgaactgtgatcccaatcctcctgatatctactgcattggattccaagaactggacttgagcacagaagccttcttctactttgaatctgtgaaggaacaagaatggtccatggctgtagagagaggtttgcattccaaagccaagtataagaaagttcaactggtgcgccttgttgggatgatgcttcttatatttgccagaaaggatcagtgtcgatacattcgtgatattgctacagaaacagttggaactggaatcatggggaaaatgggaaacaaaggtggggtagctgtgagatttgtatttcacaacaccaccttttgcattgtcaattcccatctggctgcacacgtggaggactttgagagaaggaatcaagattataaggacatttgtgcgagaatgagttttgtggtcccaaatcagaccctcccgcagttgaacatcatgaaacatgaggttgtcatttggttgggagatttgaattatagactttgcatgcctgatgccaatgaggtgaaaagtcttattaataagaaagaccttcagagactcttgaaattcgaccagctaaatattcagcgcacacagaaaaaagcttttgttgacttcaatgaaggggaaatcaagttcatccccacttataagtatgactctaaaacagaccggtgggattccagtgggaaatgccgggttccagcctggtgtgaccgaattctttggagaggaacaaatgttaatcagcttaattatcggagtcacatggaactgaaaaccagcgaccacaagcctgttagcgccctcttccatattggggtgaaggttgtggatgaacgaaggtaccggaaagtctttgaagatagtgtacgcatcatggacagaatggaaaatgacttccttccttccttagaactcagcaggagggagtttgtgtttgaaaatgtgaagtttcggcaactacaaaaggagaagttccagatcagcaacaatggacaggttccctgccatttttctttcatccctaaacttaatgacagccagtactgcaagccatggcttcgggctgaaccttttgagggctacttggagccaaatgagacagtggacatttctcttgatgtgtatgtcagcaaagactctgtaaccatcctgaactcgggagaagataagattgaagatattctcgtccttcacctggatcgaggcaaagattacttcttgactatcagtggaaattacctcccaagttgttttggcacatccttagaggctctgtgccgtatgaaaagaccaatccgagaagttcctgttaccaaactcatagacttggaagaagacagcttcctagaaaaggagaaatcccttctgcaaatggttcctttggatgaaggtgccagtgagagaccccttcaggttcccaaggagatctggcttctagtagatcacctattcaaatacgcctgtcaccaggaggacctgttccagacccctggaatgcaggaagagctccagcagatcattgattgtctggataccagcattcctgagacaatccctggcagcaaccactctgtggctgaagcactgctcattttcttggaagccctgccagagccagtcatctgttacgagctgtatcagcgatgtcttgactctgcttatgatccccggatctgccgacaggtgatctcccagcttccgagatgccatagaaatgttttccgttacttgatggcattccttcgagaactcttaaaattctctgaatacaatagcgtcaatgccaacatgatcgctactctcttcactagtcttctcctgaggcctccacccaaccttatggcaagacagactccaagtgaccgccagcgtgctattcagttccttctgggctttctgcttgggagcgaagaagactaaggcttttactgttctctgatattctagaagcagacgatctcgggctccaagtatttcagaatgatttaaaaagtcatgccacaggaagggtctattgcagaatttcaagttctgtttatagtaaaaaggaagagcgtttcctaatccctcctttaccatatcctacacagaaaaatacttttagacttatattgccaagccaaagttaccatattttggtgtttttgtgttttctctttataaggcaaaaagatctgtatttacactccttcacctaaggatgtgtttgttgccctcctacccaattgtcatgattgtccttagtaccctaggcctagattctgagatcttcccattctaggcctacaagcactacttgctgtagctgagacttgtctagagtcctttgttttgcacttttgacccaccccttcctggatcactcctttgcactccactcccctcgttctgtcactttgaacgaagtctgagtgaggctagtgactccttgggtgtcctcaacagtgaattcactgtctgcgtgcagttattacatgcatttgtgcatttctactacaatggcatctttatgtctctgtaacattggccttttcatggctccacactgggtggaaccatattctcttagatcacatttagtagcataactgtagggactattagagatggcatctcatcgatgagagagaatcacaatcagaatggaagcactttgagtatctgaagagtgagagcattcatgtttgacaggtcctgcttcccactatccttttcctgttattattcaaattttacacaaggactaatcctgggtgtctctgagacccatctcctgcctagacatccacctccagagcaacactggccccacagtaaaagaggaagtcttgtacctcaggcaggcccatctagagctattgctccttcccacagcaaaggtattgtggatgacccttagaatccattctctggtcttctgaaataccaagggcagatgtcacctccttcctcagcaggactgactctgggctctacaaccagctccttcacataaagggtttagagactccccttggctcccagtcaccatatccagtgttgtgtaaagagactggccaacaggaccaaccaagcaccttacctctcccatacaagatgaccctctgagcttttcatttattcaagctctgtggtacagcctttttttaaaataaattaatctatattggttgacaaacaagccaccaaccactgactgcaaaactgcctgatgcagttgggttcctcctggttttcttttgttacaaccacccttgcctgtttacattaattgcaaggagcataacgtacaggctgtatgtacaatcctgggcattgactctgtgacatttctagcatatccaaggcaccaccagtgatttctcctgtttcttggtgggggtgggggggaaggtacgtattctgcaatatggctaaaccctttcctgattgagagttaaagcaataggagtcaagttactggtgccacagatctggaggtatgataggtcaggggctaggtgttgaacttagttaatggaagactgagagcagaacaggtttgtcatctccgcaaggccagaaagtgatcacaaaaagaggcagatgatagacactggggtagggtcataccacagggaaatacctttcctgggcttgttttctagcatatcactgacctgggatctttgggtgatcaagggtgtggttagtggaggctctgtgctgcacgtatgcagtatcctatctctttctacatcagatcaaaacactaagttggtgtactgcctcgaccttttttcagctcatcctggaacatatacagagttgagagttttagacaatctctaggtagaggagacaagatgtagacccagacagaagaaatctgcttccctaccatggctattccagcaccccaacctgtaattgccaagtcctctaaggtactaatttgtagctgctctgaagtaaggatttcggattcagctggtagggaaagactctgcacctgctgtcttagggaagaaatggttcaaatccatgtggtgacattgcattagtctccctttcactgttttcttattctgtaattgtttgttatatttcccaaaaacgtcttgatcactaagcaaagctgctagtgggattctatatttcgtgtcatcttttttattataatttattgcaaatttttttctgaataaatatatgttgtgtgaannnnnnnnnnnnnnnn

SEQ ID NO: 13066 - DNA, 3086 bp, Homo sapiens
  misc_feature 1, 2, 8, 26, 162, 169, 199, 3082, 3083, 3084, 3085, 3086: n = A,T,C or G
nnggagtntcggtacgcctgcaggtnccggtccggaattcccgggtcgacccacgcgtccgggtagtgtgtggccaattgacttaaaaaatacaaataacatttaggaagcaaatagattaaacacaaaaataaaactaaagcataggaattatgtttttgngataccnttgggcttagattggcattgttttattctnaaaacccaactcagtggtgtagagaaacttgtgtaccaaaattttagtttctgcagatgctagtgtttttttggatacaattttgacaaccaagttagtaaacaaaatatcttaacagtttgatgacacaagctactgatgagggtttggaatattaattcagaaggtagtttctcttgtgttcaaaatagctgccatggggctgttacttttaaagtcaaaattttcttctgaaggctcattttggtatttgatcttaaccaagtgattattagagaaatgtatcaactccatgccatctcccaaaataattgtctaagaaaacttgaaagtgtaaggttttaacctttaatttatttctcttaaatacatcttttgatattgttgttgtgacatttctttttctggttagtgggctttccagactttgtaccactgcttctgtttattcatttatatgcttttgtgtcccataaattatttcagaaaatgctgataaaactcaggatattgacatttttgttgagactaaaaaatggcagtcgctaaagtagggactctagagtctggcttacgtcagtgttggtagtttagattgtctttgtcaacgttttttcttctctcttttgctttcttttctttctctttttttcttagcacagttctagctcaaatttgtgtattttttgtgtgcctgggctggagatgagagactgagtcataactgatttaaaagtttgtgttatcaggtatcttatttgaacatggtcatttttggccacattgctgtttcatactaggacttgggatgatgtagccagaataaaactcaagttgcaccctccggttggtggaagattgctgaccgtgccgtttctgggcaggagaagacatcatggtgtccagcaactcagcaaagccattcttaagagtcgtgaggtccttctgaatgtaaaactggagcccaggagaagctgtcccaggagggctgttaactccctatagagccaggagacaggataggggtttctagggtccaacaccagcttaccttggagtatgaatctacccatgaaggatgagagatgttttgaaaaactagccaggacacacccacaggatcctactggctccttagcagctgattggtgttacataattaacttaattggagatgcattaggtcacttgaatgtataagcaagcacctatggtaggcgctacagacatttaaatctcttgggaattcgatgctcccatggaatttataccagttatatgaattgacttaagtatcttgaaaaagaaactttagagaaagcatcaggggtgtgtactcagtatttcaaatcagaacacaagattggaacttttggaaaaatgggttcaagctttcctattagccatggaaatgcaaagtttagcagaagcaagcaattaggcagagaacaaaaatgttaagcatggtgttgtctatcttattgaagtggttggaaatgaaagcttttaatttgatagatttatcagtataaaattagggaaaccacgtgtggggaatgaatcaatttagagcttcgggaattgtgaggtgacttttgtaacttttgttctgtgtgtgacctgtgaaccactaggatgtgatctgcccttgtgggcaggtccagcatagttaggagttaggctttagcataaatttctagctgcatctgagtctcctgggatgggtgctctttggctggttttggctgcggatggtgagatcagagcagctcttcctgctgctggcccctgcaatcagttgttgggatgccagtgcagatcactaagtagtaagattttaatcaaacacgaccaggtccgaaatgcaggtcatgagtgtgaaattctcaaatttacataaaaagtagaagtatagacagtttaacatttggtattaaaggagaggaaattgtagcagcttttcacgtttcccagtccccattagagggcttgagaccttgtacctgaacaacccattttgcactcagtgctttctgatgccttaggagaattgttttgtttcacaaaagctgggaaggaagaagtccattctgcagctgttagatctgcctctcaggaaaaagtactaacttgttctttttgttcctggctttcatcagtttgtgagatttctctattttttttaaatataattttatttctttcaacaaatataaaataaaaaacaactttggaacaagcgaaagagcaacgcagacagagacgagaacaaagagcaggagacaaaaacgtgtgtgggcggcgaacagcggcacccatcgcgagaggcgttgcggagagagcgcacaagggaagggggcagccgcgggaccacaggagaggccacaagaaacacacagatgggaaacaaaaaagaatgaacccaaagagagaacccgggaaacaaaacaaaacggcaaagagaaacaagccaccatataaaaaatacccgctggaggaacaacgagaggagaacggaacacctctcaacaattgaaaagctccccaggagagcacaactacgggggaacattaaagacaaacgaggggaggactacccaaggcgacgcgccgaaggtacaacattaaggcccggaaagcgggggaaccgcgcgacacagcgacgcaacaaggaacagcaagccacaggcaggagcgggacaggaggagaagtgatcaagggagcgaaggaggaggcaaagggacaggggtagggagaagataaacgacacgaccatagccgagacccgcaaggaagggtgagagaggggcgggcggaacgaggagtgaggtattggcggtgtgatgtgtgctagaggagtcgtagtgggagctcggcgctcnnnnn

SEQ ID NO: 13067 - DNA, 3044 bp, Homo sapiens
  misc_feature 1, 2, 3, 3025, 3026, 3027, 3028, 3029, 3030, 3031, 3032,3033, 3034, 3035, 3036, 3037, 3038, 3039, 3040, 3041, 3042,3043, 3044: n = A,T,C or G
nnnacgcgtccgggcttatcaggggaggtcatccagtccggtcggtggagttgagagcccttgggccagggtgtttggcggcacaggggcatccgctggatggcctggaggagtgggggaggggaacgtcttcactgggtggtgatcagctgggacagttcaggtagggcaggtgagggacccccgaggccctggagccttgtcctgggatgggtttgaagaactcatcactcatcacttgttttcttttggcttttgttgtttttgttttgttctgtttgttttgttttgtatttctttgttattttattgggaaggtaagcggaatgtgctcatagaccatcagacgcttgtcgaaggcaggtcctagtcatgtaattgcacaggacaaggaggtcagcgtgtgtgatggcagcatgctgtgccggcacatcgtggagtcctagaaactctctagtccctgcggctgttcccctcctctgctctctccctggagaggactgccagctcttaagaaacattcctggtgcggtgtctgcagtgccctttgtgggtgacttcaggcttcccgctttcgtggtgctcttcctgggattcgtttttttattaccctccctccctacttgtaggcctcagctatggcttgacgtaatcgcttttagacccaggttggcttcccttcattaagctatgatcctccaccccattttttttttttttaatttggagtgggagggaggggggtgggcgagagaaagctcgaaaggtattattggtttttcaaaaaattagaggtgacgattctaccagggagttgactgataggagtgtgtgcagggcaggaaaggttcggaggcacccgactaccaccactcggaaagccgctagtccagatcgactagggagaggcttagatactttagtgtatttaaagagcatttcagttaactttttcagctatttttaaagtttgtgaatggagtgttattttggacattcttaaatatgaattctccaaaggcatttagccttgacttaatattaaatcctaaggattttatgtaaggtttttttgcaacctatttaattttttttaaatgcctaacttctgaggtgcataagcccgtggtttgtgtactggaactaaagcggaactcactgattcatattggatccccaggtataccttctgctggtagcatatggctggaaaaggccgtttgcctcacacattgtaacctgccttggctagaaaatgcttttaatgtctcaactctctcttttctgtgtcatgttttggtaggaaatctttaagattggcggacggaacaggtattttagtgagacacttctgagtacttgctttttcctttgacttctaaccaactaaaagagaaggaggtcttcatgttgatattttgcttggttttattttactgattttaaaaggtatatagaaaaatgtaggcctttaaaaagaaacagcatgtagttttttattttaatatgttccatagagtggataggcagacaggtactattgtaatgtattctgtatttaataatttaatatactctagaaagtagacctcatgcattcttttagcatgattttcttttaaactgcttttcattttaagggcacccgtggcggaagctggttttgcaaggactgtgtaagctgtatgcgttctagctgtatgcgttctgtagtcttttcttaggtgggtaacattttcaataacgcgcgcacagcacacaggggtgccctgagccgaaggagcaaaaaaagccaccgctcgtttctataatccagctttgcttttcacaggcgtgggatccaggatggtgtcctctgtgaggacttgaactctggggctttaattccactgtttaattttcaggtaccacagcagcaaagcacagagtgtgacctttttcatgtctgagctgattctgtttgctccacgtgcctgcttcttgctactgttcatttagtaatgggatcacctcaccatgccatgctctgggctctccctctctgtccatttctgttttgctttcctggctaaacccatctaccattcttaacactggtagctcctgtcccattccaagactcactctctcagaccttcccatctccctggctttccatgctcctctccctccacctcctggcttcaactgggtgagggccgtattcctgccactctgctccgcctcagccttgagaactccacgtgggctgggtgggaaggtgctgacgattttcacactgtgtttaccactccatcacctctccatcacctctcaacctttgcttcgacaggtcttcactcacgatttattcctccaggtctttgattggagagagtaactttttaattctgttgttttgcagtttggctctgtaggagtgagtggcgattcaaagatgccggcgtcccgcagtgtgcggttcgtgcccttaaccacccgcttctttgtttcccgcccctctgctttcgcaggagctcttgtgcttgagttcagtgttagtggtagcgtggctcactccacttggaggtggcggccgtctgaccgtgtgttactgctttgccgacggggcctcccggccctgatgcgtgtacactctgcgggctgcaccgggtggctctggttgggggcgaagctgtgttgactgggagagcgttggaaattgagacatggagagatgacgggagtgcgtttctctgggtttgatctccatcctgttttctcccagacacaccacacctaccttgggggaatgccgttgcctgttccacccctttgttcacttcgcgttaactgctgtggtaactttttcaggatctgtgtgaagaatggtaatgacgtagttgaaaggaaaatgtactgttgtgtgtttcatttgtgtgatttcgtaccaaaaaaatgtgtttgaactatattgtatgtaatttggaagtcgtgttaataaaaccctgcagtttccacaaaaaaaaaaaaaaaccttaaccannnnnnnnnnnnnnnnnnnn

SEQ ID NO: 13068 - DNA, 399 bp, Homo sapiens
acaaagaagcaaaatataggaatatgagtaggtaaagggtgtttgggcagtgtgtggatgtcagggagtagacaatgtttaagttacataatccctggatgtcatagctgctttaaaaatttccccacagaagcataatttctttagcaaattagaactgaattattttattataaaaggtagataatcatgctatagaaattttggaaaatagaaaaaaaaattacctataatctcgccttaacacagccactgtttctttttgtgtatgttttgtttttgttaggttgaatatgcactattaacattagaattctaacagaaggatttgtcaaattactgcatattatttccatcttttgtaaatggatgcattagagcttgtgtcatttttaaacc

SEQ ID NO: 13069 - DNA, 2347 bp, Homo sapiens
agggagtcgaccacgcgtccgctaagccgcgtttgtactgtgtcttaccatgcctgaaccggcaaaatccgctccggcccctaaaaagggctccaagaaagccgtcaccaaagcccagaagaaagacggcaagaagcgcaagcgcagccgcaaagagagctactccatctacgtgtacaaggtgctgaagcaggtccaccccgacaccggcatctcgtccaaggccatgggcatcatgaactccttcgtcaacgacatcttcgagcgcatcgcgggagaggcttcccgcctggcgcactacaacaagcgctccaccatcacatcccgcgagatccagacggccgtgcgcctgctgctgcccggcgagctggccaagcacgccgtgtccgagggcaccaaggcggtcaccaagtacaccagctccaagtgagtccctgccgggacctggcgctcgctcgctcgagtcgccggctgcttgactccaaaggctcttttcagagccacccacctaatcactagaaaagagcttgttcacttattcccttagtttcttttcataaagtaagttattttagtgtgaaggtcatgggaaatggcatacgtagctttttaactatttggaactcgaggtccccagtgcgtcattggatttgcttttgaatctagagcgtgtctttactcattgtgctgcttagccttcccaggagtcggttctcaattaggctgttgggaatccgcctctttacccgcccccactcccgccccacacgcgccctggtggctccttgggtctgtttcattctaaaacgaagtggctgagttcggctgtcatttaagagaactccaggacacaattcagcccgggttccgcaaacactgcgtgacagctctgtatgactgacgcttggcagcagcttttgtgtccggtcaccagttctgccgtgcgatggggcctcctgtggataccagccgttctgtgtattttggacgaaggccgcgcagccgggtcccagccttgtcctgattgggcgacaagaatattcaaaattctgcgcctttttctaatttgtagatttcagtttccgtcgttcactttgagactttgaaattcctatttctcattttgttgataatttctgcatttaatggtctgtgctttaaatggtaacgctacggccccaggtcactgcgaggcacttaccatgtagatacgggctcaaaagtcacctctcagagacctacgtcatccactcaggaattcgcgcctctcatacttgcctgtctcattttatcttccttctagcagctgtctgaaattggttcgtctgttttcttgtttatggtattctcaagcccttgacagaccggctagtgtggttttcccgtgcatcttcagcctggcacattatggacacttaaatactacgtattgatctaatattgttgggttaatttttccatcccacccttttcttaatcgcttccgtggatggatgaagggtgctgttcatttccattagatgtatgtgaaggcacagtgaaaatggaaatgttcttggagctacttcctcaaaatgtatccttagtcacctcagtgcaacagctgggagggggccgtgttaagattttttttgctacaaagaggaggtggcaatggtagatccacccttatgcttctcagtttagcataacctcttatggattttcatcaaattcagcgtgttggtcactggaaagagccttttccttctccttttcttactctcccctcatggtgttcccctcttaaaggagaggagcttttaatttacacttaccacctcatttgcttttctggaggccatgcaatataggcgggactacagagttaatctcctttttacaaatgaagccaagagaagcctcattggttcacagtcatgcagctcatactgtccacccttgtattctcagatgcaggacaattgcattttagttttattttgtggaggtgcagaatatttactctttctgtccaacccttgattctgccgaggaagacactgatggtttgatgagtgattcagctgtttttggctaagggcttttggagctgatggcaggggtttgatgaatccaaatgagctctagacattatcacagactgaatagatcttaactgtctcctacatgtgtgttttcaaatgtgtatagatgctattgttattaataaagttaccaattaatttgagatcatgactccaggggggccggacccaatggcaaagggatggtacaatcagggccgcgttaaagtggcttggaacctgggtcccattatgcgcggcctttcacgggctatatcgcg

SEQ ID NO: 13070 - DNA, 2409 bp, Homo sapiens
  misc_feature 1, 2409: n = A,T,C or G
naactatagttgaaggctgctgccaatacaacaccactgtgaaacagaatggtgtatgccaaatttgagtccctctttaggacgtatgacaaggacatcacctttcagtattttaagagcttcaaacgagtcagaataaacttcagcaaccccttctccgcagcagatgccaggctccagctgcataagactgagtttctgggaaaggaaatgaagttatattttgctcagaccttacacataggaagctcacacctggctccgccaaatccagacaagcagtttctgatctcccctcccgcctctccgccagtgggatggaaacaagtggaagatgcgaccccagtcataaactatgatctcttatatgccatctccaagctggggccaggggaaaagtatgaattgcacgcagcgactgacaccactcccagcgtggtggtccatgtatgtgagagtgatcaagagaaggaggaagaagaggaaatggaaagaatgaggagacctaagccaaaaattatccagaccaggaggccggagtacacgccgatccacctcagctgaactggcacgcgacgaggacgcattccaaatcatactcacgggaggaatcttttactgtggaggtggctggtcacgacttcttcggaggtggcagccgagatcggggtggcagaaatcccagttcatgttgctcagaagagaatcaaggccgtgtccccttgttctaatgctgcacaccagttactgttcatggcacccgggaatgacttgggccaatcactgagtttgtggtgatcgcacaaggacatttgggactgtcttgagaaaacagataatgatagtgttttgtacttgttcttttctggtaggttctgtctgtgccaagggcaggttgatcagtgagctcaggagagagcttcctgtttctaagtggcctgcaggggccactctctactggtaggaagaggtaccacaggaagccgcctagtgcagagaggttgtgaaaacagcagcaatgcaatgtggaaattgtagcgtttcctttcttccctcatgttctcatgtttgtgcatgtatattactgatttacaagactaacctttgttcgtatataaagttacaccgttgttgttttacatcttttgggaagccaggaaagcgtttggaaaacgtatcacctttcccagattctcggattctcgactctttgcaacagcacttgcttgcggaactcttcctggaatgcattcactcagcatccccaaccgtgcaacgtgtaacttgtgcttttgcaaaagaagttgatctgaaattcctctgtagaatttagcttatacaattcagagaatagcagtttcactgccaacttttagtgggtgagaaattttagtttaggtgtttgggatcggacctcagtttctgttgtttcttttatgtggtggtttctatacatgaatcatagccaaaaacttttttggaaactgttggttgagatagttggttcttttaccccacgaagacatcaagatacacttgtaaataaagctgatagcatatattcatacctgttgtacacttgggtgaaaagtatggcagtgggagactaagatgtattaacctacctgtgaatcatatgttgtaggaaaagctgttcccatgtctaacaggacttgaattcaaagcatgtcaagtggatagtagatctgtggcgatatgagagggatgcagtgcctttccccattcattcctgatggaattgttatactaggttaacatttgtaatttttttctagttgtaatgtgtatgtctggtaaataggtattatattttggccttacaataccgtaacaatgtttgtcattttgaaatacttaatgccaagtaacaatgcatgctttggaaatttggaagatggttttattctttgagaagcaaatatgtttgcattaaatgctttgattgttcatatcaagaaattgattgaacgttctcaaaccctgtttacggtacttggtaagagggagccggtttgggagagaccattgcatcgctgtccaagtgtttcttgttaagtgcttttaaactggagaggctaacctcaaaatattttttttaactgcattctataataaatgggcacagtatgctccttacaggaaaaacacggaaccacacatcaccacacgcgatgaccaccaaaaaacaaacggcgcaccacatggacaaccccctacgggcgccacgcacaaaccacacaatgtttcacacggacacccatacacaacaagcaagacagcccggcgccatcaaccactcagtgtcccacgcaaccaatacggaagcaccacaacacggacaacaaaacaccagacgcggcaccacaacgagactatccgccactgcan

SEQ ID NO: 13071 - DNA, 3398 bp, Homo sapiens
  misc_feature 1, 2, 3396, 3397, 3398: n = A,T,C or G
nnagaaagttcattctggtggtgctacttctagggggaaccagtatatcagacttaagcttagagtaaaatggggttaaaaaggctggaagtttaacggaatggggccaagaggtgaaaaggggacaaagtcagttatattgagtaagtttcatccatttgacgtacatcacacactgtgtgaatgcaggaaataatgcattctaatttcataatgactgagtacattcaatatgttctgatcacaaaaataagtatctgaggtaatgaatacattcatcagcttgatttcattatttcaattgtcttcataaatcataacatcactttattacctcataaatatacacaactacaatttgtcaatttacgaaccaaaaccaacctcccacgcaccctctgccagctcttgaaggcgtgatcaagtgtcggttctaccaagaactgtgcgaactcagcacaggatgattacttccaatgacgtcacacacactcctggtcttgtataccattttattgtggaaggaaaagagaatcaatgaattgtacaaatgtgaaggctgtaacaagttgtagaggctttttccagacattcctatgcaatgttctccacagtaaatacctgggggcagccaagagggaagatttcagataagtgcaaacagtgattggatgttatctacctacaatccctttagacatttttgagagaactctgtttaaatgttgtttaactctcccaccccgaccaatgaatccctacggaccagcagtgccctgggagactgagtaatgaaaacatcctgtcaagcttcaagacctttgggcagatgggactctgcagacccgtgggagcacaaaggactaaaaagctgcaggtaaccgtatttggtaaccgagaccacacctggccacaggataacttgcaaaattcccagaaccctgcttctggctcttaaagccattgcacatgtggaggctaatttctgaattcaggagatatcaggatggacatgtatttttcacccaagggacaggaatgtgagctctgtgggctggttagcccagcacacccttcttcctaacttcccttctcaatacagccttgaaaaagccgtgctgtgtagcagaggagtggcgacccacagtagtgactccagaggtacagtaatggggtgggggccagaggtatccggctggtattaagtccagggctacccttttagaaggaactgcttccaacagtgtctatatgttaacgtgaactataaagatgcctgtgactccttggagttctgaaatgctcatacgcaatgggggtgaagggaggacaggggctggcagtccagcttgagactcccaaggcaaacatgtggaatccccagtcccagtgcacagcagccgggtcctagctattggtattgttagaaggactatggttgagaatgtgtggggtggggaaaaccaaaaatgcaggccctggctcagtcaccaggaagggggtgctccgaggcctttgagggacctgagctcacagaactacagacagcagatcatgaggctcacactttctggccaccaagtgccactctgctgggcatgtggagtgtgcgtgtggtgtggtggtaaggatggaaccaaaagaggaagctgtgtatgtgtacccccatgtgaggaggaagaaacagaatagagggtggggttggaggagagatgtataaaagaccctcaaagggaaaaataattccttttttgtattcactgactgagctgatgcatttcttatttggggagcattttgggtaatatttaaaaaaaaaaaaaactgtcaagtgatcactgagcaccgaattcgtttataatcttgttctaaacccagcaatttctcttcttgtgttccagaattaccacaacatgctcgcctggcagcggagggaaaggggcggtgggcgtcccagtgctctcagctgggagggggccctgcgtccccgcctccgctcggccgcttgcaggtgagcatgagcagcagcagcagcggcaggtgccacaggctgcagaagaacagtctccgcgagctcctgcggtctgcgtccacgtagaagcggaagccgaggtaggagatgtacgcattgatgggaagggccatgatggggaaggtccatgtggtgatgtccagcacaggggctgctgcggacagcacgagcagggccaggcagtggcgcagcgccacgcgccggcacaggcccgggtgggtgaccgacatcatgcagtagccgccccgggagtagtcttcacggaggccccagctcagggcgttgaaatgaggaaactgccaggagtagaggattcctcccaggagaaatgcgccagcatcgaggctgcccgtggccgctgtccagcccatgacaggcgggatggccccaaccacagctccgacccatgtgttggcaatgctgatccttttcagtggtgtgtagcagcaggtatacaggaaaatgttgaagagccccagggctcctgtgagtggattcacccccaaggtcagaatggcaactcccggaacagcacaacaagtggcaaaggacacagctagcaacgggctgatctgtccacgaaccagcggtctgttctttgtcctattcatgtttgagtcaaatggcacctcaaaaaactgattgatggagttggcagcacaggatgcaaggcctgtcccaacagaagtaagcaggaaacagggccagtcaaaagggcccggagccaatgcaaatccagctgcagtggtacttacaactagagctgtgagtttgattttggatagttgagccaaaattcctggcaaatcatacacttgcagcttcatctctttccaccgcttttcctcttttgtctctttccctacatctattgagtcttcaattactgagtctggctctagttctatcaattccttttcatttggctttctggacaaagataggctgggcggtgagagaggtctcatctcatatatttctgctttggcttgacctgaagatgttttttcaaggaaaggagatgctactggttctggcttgggtcttacttgctggttgtggcttctgttcagctgtgtgacatacatgcgtttgaggaagctaaagtgctgaaatgtaatccactgcttattgacattcctgagaagatgtaagaacttgtgaggggagtcctgtatagttcttctttcaagataccagacagagcctcctacgcaacctgtcaggaggcgtgaggagagagtgtgcggagatgcggccataatttacgagtctggggccgctccccgggatccctgtgtcctctctcctcacgggacgctgggcgccgccatcttccttccccgcccccctgtgggagtagnnn

SEQ ID NO: 13072 - DNA, 362 bp, Homo sapiens
  misc_feature 1, 2, 3, 4, 5, 6, 7, 8: n = A,T,C or G
nnnnnnnngattttgctatatttggcttactaatattttgcttaaaatttttcatctaagtttgagaaatttgcctgtaatttcccattcttgtaaagctcttgtcaggttttggaaacatgtttatgttgaccttattaactagtttgatggcgttttcttatgttcccaagatgatgttgcaaaagttttctgttatttcttccttatatttggtccattttataagtaaaactttgagttcatagagatttgaaaaaaaatagcttaaataggctgggtgtggaggctcatgcctgtaagctcagcactttgggaggccgaggcaggtggatcacctaaggccaggagttcgagaccag

SEQ ID NO: 13073 - DNA, 991 bp, Homo sapiens
  misc_feature 991: n = A,T,C or G
atagggagtcgacccacgcgtccgatggcgtccaggtctaagcggcgtgccgtggaaagtggggttccgcagccgccggatcccccagtccagcgcgacgaggaagaggaaaaagaagtcgaaaatgaggatgaagacgatgatgacagtgacaaggaaaaggatgaagaggacgaggtcattgacgaggaagtgaatattgaatttgaagcttattccctatcagataatgattatgacggaattaagaaattactgcagcaggaaagaactggcgggggcacacagaaccaataagccatgtgggaagtgctacttttaccttctgattagtaagacatttgtggaagcaggaaaaaacaattccaaaaagaaacctagcaacaaaaagaaagctgcgttaatgtttgcaaatgcagaggaagaatttttctatgaggagcagggaaaacctgaggtgcttggaggtccagacacaagaagaggattggaaccagttccgatacagcacaatggttggtctgttcccccagtattagaataaattaaaacatacaagccaggatgaatgaagccaataggaaataaaaaacaggcacacaacattatttggggaaaaacacctctagtgacacattttcttcatctgcactgattatttcagcaaaagaaatctagtatgttttcatacatctgatgtataaatttgctgaactttgagttagttttcttaagataatttttcatattaagaaaattttccttttctaacctattaaaatacctcactatcatttcaaaaggttaaatgagttgatcactatctctgctctgtgctcctcaaaatataatttcaaatggatccgatctaaatctatacctagtgcagatttgcaaaaaaagaaaaggaatagtcattaaggatacctgttaccatggctgcgattgttagcacttcatctacacagtcaaattcacaggacgctaagan

SEQ ID NO: 13074 - DNA, 2508 bp, Homo sapiens
  misc_feature 1, 2, 3, 4, 2438, 2448, 2476, 2508: n = A,T,C or G
nnnncttcccgagagccatggttggtccaggcaggcagtcggagcacctcgtggagcggctgctaacccagggtggggtggggtggggtggaggggtctgcttgtagtactctcagtcctgatgtcacaggcgcggcaaggacatcgcaaggaggagtcggattacagtaaggatgggcagtgcagcaggcagcccgagcgcactctccagccgccggggatcttagccctggaaaggcagcctgcaaggcgctcatcccgcggaggaggcacgctctcggcgctcactgctctccacgccggggacatttccaccgaatgtagcatgaaagggctctgctctacgtgccagccttgggtgagagctgatgctgaagacaccgcggtgggattccagctgtctgattaatgagaaacataatgtattttggtggtacatgccagagtcctgctctcccggcccttgtccgtccaccagcccctcctttgcaaccatcgctggatattaaaccatttcttccctttcctcttgacactgcagctgcagtcaacctcttccccaatttcaatgcgatggacccgattcagaaagctgtaataaaccatacattcggggttcctcttccccaccgaagaaagcaaatcatatcatgcaacatttgccagttgagatttaattctgatagccaggctgcggcccactacaaaggcacgaaacatgccaagaagctcaaagcactggaagccatgaaaaataagcagaaatctgtaactgccaaggacagcgcaaagactaccttcacctccatcactaccaataccatcaataccagctctgacaaaacagacggtactgcagggacaccagcaatatcaacgacgacaactgtggaaatccgcaaaagcagtgttatgacaactgagatcacctctaaagtggaaaaaagcccaacgacagccactggcaatagctcatgtccttctactgagaccgaggaagaaaaggcaaaacggcttctttactgttcgctatgcaaggttgctgtcaactctgcctcgcagctggaggcgcacaacagtggtactaagcacaaaaccatgttagaagcccggaatggaagtggcactatcaaagcctttcctagggcaggagtgaaaggcaaaggacctgttaataaaggaaacacaggcctccaaaataaaacatttcactgtgaaatctgtgatgtgcacgtcaactcggaaacgcaacttaaacagcacattagcagtagaaggcacaaagacagagctgctgggaagcccccgaaacctaaatacagtccttacaacaaactacagaagacagcacatccactgggggtaaaattagtattttcaaaagaaccttcaaagccattggctccacgaattctaccaaatcctctagcagctgcagcagccgcagcagcagtggcagtgagttcccccttcagtcttcgaactgctccagcagcaacactgttccagacttctgcgcttcctccggcactcctgcggccagctcccggacccattcggaccgcccacactcctgtgctgtttgctccttactaaattccaaataggagtaattgtactgcaataatttttcaaaaaacaaaaaacaaaacaaacaaaagagaactatgcagtgtttatttatagtttaaagtatatctgaagagccaggacttttgatagtgaattgaaaaggttataaaaaagtgggggaggtttgggggtgggagggagggagtggtattttctccacattaaagcattcctcttgaacgctgattgttttagaagtgatctccagcattgatttgtagtggtatctagaccttctgaagcctctgtgactgtgcttttgggcacctatttccctctgcattgtctgtcctgctttatgaaacaactatacattgtctaagggcattaactggttccaatgtatataaaataatttactctgtagattaaaatcgtacaaaaaaaaaggaaaaaaacaaaaacaaaagcaacactgtgaatagtactacccgtgctggtcctcttgctatgacggcaattactgggtatttatcccaacaaaagtagatacagtagatgtcttgtaaaacaatagtgctgtgtctcaatctatgccactaggttttaaagaattgcaaaggtagaatgaacaactatttcataccaataagcagtcaaaaaataaacatacaccagatggtgtcatggaggtctccctggtcagcattctcccctcctgtctagcttgaagatataacagggctaagcttagagatgggggaggcattaataaaggtgatttcttataaagtagtaacttcccaccctgaagatatattgctggaaacagggaagtgtttataatgaacctatatctgaaagcngagaaacccntgcatcatgagtgttaagaaagaaatcngtacaactcttctatttccaggatgaagatcn

SEQ ID NO: 13075 - DNA, 407 bp, Homo sapiens
  misc_feature 405, 406, 407: n = A,T,C or G
acttttttttttttttttttttttttacaagaaaaccaaaagaagccaaaaagtgtccaatttctttatatactctaggttttatttttggatgaagattatttatttagctccccacccttcactcccattaaaaattgcacctcagcttcatgacctgagatttcacttggtatactgtaaaaacctttttggcaagagggacgggttttgtggaagacaatttttccacagggggtgggcgggaatggtttcgggataaaaactgttccacctgggattagattttcttaaggagcaccacctagatccctcctcgcaagcgcaattcacaataaagttcacgtccccatgagaatttaatgccactgccaggtgctaatgctggcctgcacctcacgtgcnnn

SEQ ID NO: 13076 - DNA, 602 bp, Homo sapiens
  misc_feature 598, 599, 600, 601, 602: n = A,T,C or G
ccctttttttttttttttatacaggactgctttctgaaagcatatctcaagtggatattccagttcattcattcgttctacaacagtatcacttctgcaatatatctcattctcttgtcttctatttcaactattttcatactcaatactttttcttttaggtttacttctgcttcatattgctatcttcactcttattttaaaacaatttcttatgttaaattcttagcccatcttttccaataatttagcttcagttgttcagtctgtggccttttttaaatactgtatttacttctccagcatctagttacttttgctctgagtccaaattctcctgcaggtgtcacccctcagcagagaatctcaggcacccagaagaactacggaacagtttgctttccctgtaataagcattaggtcagaatttcaacttcaaattgtaagaaaggagtagcatggaaagaagaatctgtccccctaggttgtaattcacgaattctaggatttggaaggagcaggggacttctaggaatggctaactgagaaactcagatcaactcccccactaaggacaactagaaaaactgcggacgcnnnnn

SEQ ID NO: 13077 - DNA, 362 bp, Homo sapiens
  misc_feature 1, 2, 3, 4, 5, 362: n = A,T,C or G
nnnnncaggtaccaccatcgctcgatgtatgtccacagttcatacacaggcaccatgaagaatccactctaccacaacttctcctgtgggtgaaaaggaaagcaggaggacttcaaaagctttcatgactgggaccctgcaagtcattgctgccttcgcagacactctcagccttgtctactaaaaacgctgtaatcttcaccagtgctgacctcagctgatggaactacctgaagtctaactgctgcccactcctggagctggaacagccactgtgtccttcagagaagaagctaccacacccacccagttggtggcttcataccttaccatacgtgaggtctttgcttactgaagccagn

SEQ ID NO: 13078 - DNA, 296 bp, Homo sapiens
  misc_feature 268, 269, 270, 271, 272, 273, 274, 275, 276, 277, 278, 279,280, 281, 282, 283, 284, 285, 286, 287, 288, 289, 290, 291,292, 293, 294, 295, 296: n = A,T,C or G
acgcgggcttgcctgcactggaaaacagtagatgctcttcaggctctgtgcccccaacagtttctgcgcatcccttctcatccagcctctcactggggggctggcgtcattattcccattttgcagctctggaaatggagtctgcacaagtcctcgctgccttttccctgcctacagtaccactatggtatcctaacacgccacccactctagtgtccctttaggctatttatttatttatttatttattttgagactgtgttccgannnnnnnnnnnnnnnnnnnnnnnnnnnnn

SEQ ID NO: 13079 - DNA, 349 bp, Homo sapiens
actaaaaagtgttcctaacagcacaggttgtaatactcctaaactggaaagtagctagatactaaaaaatagtagaatggacaaaggtagcagagcgcggtggctcgtgcctgcctcgacctcccaaagtgctgggattacaggtgtgagtcaccgcagccagccaagtctagatttttccgattcccagttcttaattctttccaggaaactagactgcgcccggccagccctgttgtctttcaaagaacctcggccccagtgatggctgatctcactcccactgtctcgtagaattacactccttcctgaggatccctcttcctgcagccttgtccttggggagtac

SEQ ID NO: 13080 - DNA, 2453 bp, Homo sapiens
  misc_feature 1, 2429, 2430, 2431, 2432, 2433, 2434, 2435, 2436, 2437,2438, 2439, 2440, 2441, 2442, 2443, 2444, 2445, 2446, 2447,2448, 2449, 2450, 2451, 2452, 2453: n = A,T,C or G
ncaggagcacgtggagaggccgggtagccacagcggcagctccagcccggcccggcagcgacatggaagatatacaaacaaatgcggaactgaaaagcactcaggagcagtctgtgcccgcagaaagtgcagcggttttgaatgactacagtttaaccaaatctcatgaaatggaaaatgtggacagtggagaaggcccagccaatgaagatgaagacataggagatgattcaatgaaagtgaaagatgaatacagtgaaagagatgagaatgttttaaagtcagaacccatgggaaatgcagaagagcctgaaatcccttacagctattcaagagaatataatgaatatgaaaacattaagttggagagacatgttgtctcattcgatagtagcaggccaaccagtggaaagatgaactgcgatgtgtgtggattatcctgcatcagcttcaatgtcttaatggttcataagcgaagccatactggtgaacgcccattccagtgtaatcagtgtggggcatcttttactcagaaaggtaacctcctccgccacattaaactgcacacaggggaaaaaccttttaagtgtcacctctgcaactatgcatgccaaagaagagatgcgctcacggggcatcttaggacacattctgtggagaaaccctacaaatgtgagttttgtggaaggagttacaagcagagaagttcccttgaggagcacaaggagcgctgccgtacatttcttcagagcactgacccaggggacactgcaagtgcggaggcaagacacatcaaagcagagatgggaagtgaaagagctctcgtactggacagattagcaagcaatgtggcaaaacgaaaaagctcaatgcctcagaaattcattggtgagaagcgccactgctttgatgtcaactataattcaagttacatgtatgagaaagagagtgagctcatacagacccgcatgatggaccaagccatcaataacgccatcagctatcttggcgccgaagccctgtgccccttggtccagacaccgcctgctcccacctcggagatggttccagttatcagcagcatgtatcccatagccctcacccgggctgagatgtcaaacggtgcccctcaagagctggaaaggaaaagcatcctccttccagagaagagcgtgccttctgagagaggcctctctcccaacaatagtggccacgactccacggacactgacagcaaccatgaagaacgccagaatcacatctatcagcaaaatcacatggtcctgtctcgggcccgcaatgggatgccacttctgaaggaggttccccgctcttacgaactcctcaagcccccgcccatctgcccaagagactctgtcaaagtgatcgacaaggaaggggaggtgatggatgtgtatcggtgtgaccactgccgcgtcctcttcctggactatgtgatgttcacgattcacatgggctgccacggcttccgtgaccctttcgagtgtaacatgtgtggagatcgaagccatgatcggtatgagttctcgtctcacatagccagaggagaacacagaagcctgctgaagtgaatatctggtctcagggattgctcctatgtattcagcatcgtttctaaaaacagttgacctcgcctaacagattgctctcaaaacatactcagttccaaacttcttttcataccatttttagctgtgttcacaggggtagccagagaaacactgtcttccttcagaaattattcgcaggtctagcatattattacttttgtgaaacctttgttttcccatcagggacttgaattttatggaatttaaaagccaaaaaggtatttggtcattatcttctacagcagtggaatgagtggtcccggagatgtgctatatgaaacattctttctgagatatatcaaccacacgtggaaaagcctttcagtcatacatgcaaatccacaaagaggaagagctgaccagctgaccttgctgggaagcctcacccttctgcccttcacaggctgaagggttaagatctaatctccctaatctaaatgacagtctaagagtaagtaaaagaccagccataaaataagtatctgttacgagtaactgaagaccccattctccaagcatcagatccatttcctatcacaacatttttaaaaaatgtcatctgatggcacttctgcttctgtcctttaccttcccatctccagtgaaaagctgagctgctttgggctaaaccagttgtctatagaagaaaatctatgccagaagaactcatggttttaaatatagaccatcatcgaaactccagaaatttatccactgtggatgatgacatcgctttcctttggtcaaggttggcagagcaagggtataaagggggaaattgtttggcagcaccaacannnnnnnnnnnnnnnnnnnnnnnnn

SEQ ID NO: 13081 - DNA, 903 bp, Homo sapiens
gcgtccgcacgcgtcgacgctggggcgtacctttcgggctcctgactcctgccgcttctcttccccttccgtgggtcagggccggtccggtccggaacctgcagcccctttcccagtgttctagttcgcccgtgacccggaataatgagcaaggagggtgtggtgggttgaaagccatcctactttactcccgagttagagcatggattcagttttagtcttaagggggaagtgagattggagatttttatttttaattttgggcagaagcaggttgactctagggatctccagagcgagaggatttaacttcatgttgctcccgtgtttgaaggaggacaataaaagtcccaccgggcaaaattttcgtaacctctgcggtagaaaacgtcaggtatcttttaaatcgcgatagttttcgctgtgtcaggctttcttcggtggagctccgagggtagctaggttctaggtttgaaacagatgcagaatccaaaggcagcgcaaaaaacagccaccgattttgctatgtctctgagcttgcgagataatcagacagtaaatggagtctgagcaagtgttccatagaggctactatagaaacagctaccaacagtataacaaagtgcaagtagtgatgaggaactttagatggagcaggtggtattatggactttcaacatctgacgatgcaattatcagatggggacactgcagttgttggagtctccttccgtgccatgccggaacacgatggtcaatggaacctcggtccgggtgaagaattcggcgttgcgttgaggcgggtacaatgtgccccacccggattgtttaaagggacgagtgaacgttagggacacgcacaccaggggactgggcggggaaaaaaagcggtgagagaaagta

SEQ ID NO: 13082 - DNA, 1210 bp, Homo sapiens
  misc_feature 1, 2, 3, 4, 1182, 1209, 1210: n = A,T,C or G
nnnncatgatatttctggcaagctcatagtctcccagagaagtacattgtgagatacgtgggaaatggctgcatcactcacatgtcttgtgcatgtgtctccccaggtgcattttcaggtttctgccacggaggagatgctcttcacgaagggagagtcaggtacattggaggattcattgctgtggccagggaaggcagaggacatgcacaattagtatttccctttctatcttctaggatggactttcctcatttggacagccgctctggtttaaagatatgtacaaacctctcagtgccacaagaataaataatcatgcatggaagctgcacaagaagtcatctaatgaggacaagatcctcaacagggaccctgggtaaatgatggggccctcacagttcccatctaaaatgaggagggggtgagaagcttaattgctcctttcaagaatgaaaaccttggcattgttattcttatcccagggacagcgaagccccaacggaggaggaggagagtgaagccctgccataggaggagaacacagcccacctcaggcctcctgcaaaaatacatagaataaacaacaacagttactaaatgaatgaaaattgtgattccgatgaagcctgccagagaaaaaaagcattttttaaaagaggaaataaggtgatatctgattagggcaaacatgatgcagacaagaaatgcaccggttcagaggagggaaggtcaggccgcctggggagagtccatgaaaaagatggaacgtgccagatgctgtacctggtgctgggaaagagttgactaggccagcatccctttcctcaaagggggggctcctagactggggggagggctggacatctgaatacatcctgaggagacagtgtgggacagcatggtggcagtggaaccagccgtggttctgctcttggtcggctggaaaggagtagatgtaagggatggtttagaagaagggaagtggaagaaaagttttctgagctgacaagaggaaggaaaggccgcctagaaggacactaaaaaggcaagagaagccctaagcagagtgagcaccagactccacaggttaagggctcagtcacacaggaccaatccgaatgtcagaccccaggtgcaaggccaagcatcacctatgcatctgaccaactggctgtaaantggaggtccccacaactccctcctcann

SEQ ID NO: 13083 - DNA, 344 bp, Homo sapiens
acccttgtgtgtgaggttctagtaattgggttgttttcccaacttaggaatgatccaggccctgggaggcttctttacttactttgtgattctggctgagaacggcttcctcccaattcacctgttgggcctccgagtggactgggatgaccgctggatcaacgatgtggaagacagctacgggcagcagtgggtgagtgggcacctctgacctgaccagtgtcagagctcctcaagccccagaagactgaggccacactgccaccagccatgcaggtgaagagccagagctcatcttctgtcttctgcatttcagacctatgagcagaggaaaatcgtggagt

SEQ ID NO: 13084 - DNA, 346 bp, Homo sapiens
ttaggataggaaatgaaattgcctctcagtgacaggagtggcccgagcctgcttcctattttgatttttttttttttaactgatagatggtgcagcatgtctacatggttgtttgttgctaaactttatataatgtgtggtttcaattcagcttgaaaaataatctcactacatgtagcagtacgcgggatcttcctcaaagtaagctcttcctccttaacccttgatttctcagccttttatctggtttctggtttccatctgggtttataggactctccactcaactcatgaactttccagatggaaaggggcctgccccatattcctgtaatcaccttagagt

SEQ ID NO: 13085 - DNA, 570 bp, Homo sapiens
  misc_feature 565, 566, 567, 568, 569, 570: n = A,T,C or G
actacctctaggaagatggtggtgagagtgcacaggggtcagggttgggtggtgagagggttttcaggaaggttcttgtatttggcacaaaggcaccccccgccagagagcagtcaagtcactcccttggagttggaggaagcactggcctgtgacttttgggattaggatgtgccgagttggggtctcctcaccactgcagtagaaaagggctttcctcattcttattaaggttactgtcatcaagtgattatagaaggcgtataattttaaatgctcctttaaaaaaaattgtttcctcttctcacatcattactttgcttttttgctttttttttttttcaggacaaaagactgtgttgtcaaatgttcaggaagaactggatagaatgactcgaaagccagactctatggtaacaaactcttcaacagaaaatgaagcctgaacctccttaaaaagtgcatatgtcgaatgaccaaataactatgtatattgatctgctaagaccaggatttttctgatatggcacatgctatcagttttttggggcaggggagatgaacnnnnnn

SEQ ID NO: 13086 - DNA, 290 bp, Homo sapiens
  misc_feature 1, 2, 3, 4, 5, 6, 7, 8, 9, 10, 11, 12, 13, 14, 15, 16, 17,18, 19, 20, 21, 22, 23, 24, 25: n = A,T,C or G
nnnnnnnnnnnnnnnnnnnnnnnnncggtggatacaggggctccttcatatatccaatattgtaatatctcgggctgtattctatcgcaatcttcctcatatctaatctcccaatccatctgatattcaccttctaccatatctaacctaatgtttaatccatccattaagttatttatttaaatgtgttgttcatttctaaaaatacaatcgggccctttttaaaaatcttctcctttttcatatagcactattattttattatgctttctattacttcctttatctct

SEQ ID NO: 13087 - DNA, 435 bp, Homo sapiens
  misc_feature 433, 434, 435: n = A,T,C or G
aggtacacagctcctgcatcagtgcaggactcagtccctgagtgctgggcctgtcacagacatcaccttctttactcccacgcagccaggttgacaatcacagaccctttctacagggaacctaagacaccaatttaacctggccaggctgagctagtgggtcacaagcttgaaatctgaggtactgttcttctggggtccactgcatcccacaaaaaacatcagtggaaaaggcaaagctggcaggctgggtgcagaacagacagggcagtcaggggatctgccattcacaaggctatttcagaactattagattacaagggcacttttattggataatctgcccagcacaaacttacagctaaaatgaatttccatgctcgcttaggcagcacatatactaaaactggaataatactgggaagatgagcannn

SEQ ID NO: 13088 - DNA, 536 bp, Homo sapiens
  misc_feature 1, 2, 3, 4, 5, 6, 7, 526, 527, 528, 529, 530, 531, 532, 533,534, 535, 536: n = A,T,C or G
nnnnnnnatctattcaaggtctacgaagtcatagctaaggcgggatgtacgattgagaacaaaggaaactgcatcctgtacatgatttacatgctgacacttgtctccatagccgatgctcacataaagacttcttcttggcgggtcgagctcatatatatctatgaatcacacacctactggagtagaatatcaaacttatgcttacctggaacctagaggaggggcacactccccgtctagctctctctttattgactgatagaggcccactatgaggtaatcatgtttcatgactgttcacagtgataaatgttcagatgccatggactttcagtatggttcacaaagagtggaaaccacaaatgataatctgtgaattccaagctactgtattatatggatatatgaatatagtttatgaatatatattaaacaaaaataggatcatacaatgatgatgctttacaacttgctctttctcaattaacagtatcttttcatgtcagcacatacaaacctaacnnnnnnnnnnn

SEQ ID NO: 13089 - DNA, 498 bp, Homo sapiens
  misc_feature 1, 2, 3, 4, 5, 6, 7, 8, 9, 10, 11, 12, 13, 14, 15, 16, 17,18, 19, 20, 21, 22, 410, 411, 493, 494, 495, 496, 497, 498: n = A,T,C or G
nnnnnnnnnnnnnnnnnnnnnngagaaccaaaaaaagctttttgggttttccgggggggaaacacaacccgtgttggtcccatccctgggacttggggcaaaatttttgttttttggccccccttgcccttgttttttttttttactttcccccactccctactgcgggggggggggacataagacttcatttctcatcacaaacatgagccaaaagcacatacctaccccatgcctcacccccacacactcacagacatgcacacaacacatacacacacacgcacagaggtgaacagacactgaaacattttgtccacaacttctcgggacgtggccagactgggtttgcgtctcaacctgcaaaacacaaatacattttttaatatcaagaaaaaaaatataaaaanntttcccccccggggggggcccccccccggggggccccccctttccccctatggagaatatttacccccccccctttgggggnnnnnn

SEQ ID NO: 13090 - DNA, 544 bp, Homo sapiens
  misc_feature 1, 2, 3, 4, 5, 6, 7, 8, 9, 10, 11, 12, 13, 14, 15, 16, 17,18, 19, 20, 21, 22, 23, 24, 25, 26, 27, 28, 29, 30, 31,32, 33, 34, 35, 36, 37, 38, 39, 40, 41, 42, 43, 44, 45,46, 47, 48, 49, 50, 51, 52, 53, 54, 55, 56, 57, 58, 59,60: n = A,T,C or G
  misc_feature 61, 62, 63, 64, 65, 66, 67, 68, 69, 70, 71, 536, 537, 538,539, 540, 541, 542, 543, 544: n = A,T,C or G
nnnnnnnnnnnnnnnnnnnnnnnnnnnnnnnnnnnnnnnnnnnnnnnnnnnnnnnnnnnnnnnnnnnnnnnatgtgttgtccggccccgcacgctgtaactgataactagaactgaggggccgaaaaaagaaaagtgtgttttttttattaaaaaaaaaatagttggttcttagtaaatgtaaagaaccttttgccccttggtaagtttataaaaccatcctaccacctgccgttctgactttattaaataaacatgtggaccagagggggggggagatgttattgcacaagagagggggagaaggggatatcatgcttatggcgtcaaaatctttttgttacgtaaaaaatgcacttttattatagcttgcgcctcaactgtttaagtgaatattaaagggcttggcgggggggggttttaaaaaaaaaaaacccccccccgcggggggaaaatttttttttttttttttttttcccccccccggggggggggggcccccccccctttttttttttttttaaaaagagaaaaaannnnnnnnn

SEQ ID NO: 13091 - DNA, 2366 bp, Homo sapiens
agctggtcatggtggcacacacctgtagtcccagttgctcaggaggctgagtcaggatgatggcttgagcccaggagttcgaggttgcagtgagctatcatcgcgtcactgcactccagcctgggtgatgggagtgtgaccctatctcagaaaaaaaagtcaggatattgacttttggggaggtgggtgttgtaattgggagggaatgtaagagggatttctggggtgtctggcaagactcaatttcctgacataggtggagattttatggttgctcaccttataataatttattaggttatactttcctttatggcctttatttatcttatatggtaaacaaatacgaaaacaaggacaaacattttcttccatttttttccccataggagactataaatattcaggaagagatagtttgatttttttggttgatgcctccaaggctatgtttgaatctcagagtgaagatgagttgacaccttttgacatgagcatccagtgtatccaaagtgtgtacatcagtaagatcataagcagtgatcgagatctcttggctgtggtgttctatggtaccgagaaagacaaaaattcagtgaattttaaaaatatttacgtcttacaggagctggataatccaggtgcaaaacgaattctagagcttgaccagtttaaggggcagcagggacaaaaacgtttccaagacatgatgggccacggatctgactactcactcagtgaagtgctgtgggtctgtgccaacctctttagtgatgtccaattcaagatgagtcataagaggatcatgctgttcaccaatgaagacaacccccatggcaatgacagtgccaaagccagccgggccaggaccaaagccggtgatctccgagatacaggcatcttccttgacttgatgcacctgaagaaacctgggggctttgacatatccttgttctacagagatatcatcagcatagcagaggatgaggacctcagggttcactttgaggaatccagcaagctagaagacctgttgcggaaggttcgcgccaaggagaccaggaagcgagcactcagcaggttaaagctgaagctcaacacagatatagtgatctctgtgggcatttataattctggtccagaagggctctcaagccttcctccaatatagctctatcggggaaaacaacatggaaccagtggataccaagaggtctcagatctatgggagtcgtcagattatactggagagagaggagacagaagagctaatacggtttgatgatccaggtttgatgctcatgggtttcaagccgttggtactgctgaagagacaccattacctgaggcccttcctgttcgtgtacacagaggagtcgctggtgattgggagctcaaccctgttcagtgctctgctcatcaagtgtctggagaaggaggttgcagcattgtgcagatacacaccccgcaggaacatccctccttattttgtggctttggtgccacaggaagaagagttggatgaccagaaaattcaggtgactcctccaggcttccagctggtctttttaccctttgctgatgataaaagggaagatgccctttactgaaaaaatcatggcaactccagagcaggtgggcaagatgaaggctatcgttgagaagcttcgcttcacatacagaagtgacagctttgagaaccccgtgctgcagcagcacttcaggaacctggaggccttggccttggatttgatggagccggaacaagcagtggacctgacattgcccaaggttgaagcaatgaataaaagactgggctccttggtggatgagtttaaggagcttgtttacccaccagattacaatcctgaagggaaagttaccaagagaaaacacgataatgaaggttctggaagcaaaaggcccaaggtggagtattcagaagaggagctgaagacccacatcagcaagggtacctgcccgggcggccgaggtacacctaaagggggctgaatccagggagccaagcagtcttgttctgtgggccccacttccacagcacctcacaagttaagacctgctggcttggaattccagccagccagtggtgacaggttgaagtctgcctaagatggattgagttcccagatggagtggtggccactatctttgcagtttgatcaagtcagctattccagtccgcttgctttgtagagtccagactggatgaggaagggtcctccaccatgcagcatagctgtgctaccaaaaagcagccagactacttctttaagtgggcccctgatctcattcctcctgactgggtgagacctcccaacaggggtctccagccacctcctacaggt

SEQ ID NO: 13092 - DNA, 2961 bp, Homo sapiens
  misc_feature 1, 2, 2960, 2961: n = A,T,C or G
nnggcgaagaggcctggcgctgccgctcccgcgcatgctccctgacttcaccaaggtcacgctgcagcccgcaggaatgaaaatccacttctccgcattttcgaggtgacctggaagcggttcaactgctctggcttctcagaagaggaggggaccgggcggtaacgaggagccaaggggaggagactgctcgcaaaaccccggaaaagctttcccgatccactctgccagcctccgtgcgcctccagacatgcgcagtagcctcccccgcggtggcggcggcggcggcggtggctgccgtggcggctgagagtccagagccggacgttccggccgcttcgggctggcggctggagagcgctcgggtcatgtctgcccagggggactgcgagttcctggtgcagcgagcccgggagttggtgccgcaagacctgtgggcagccaaggcgtggctgatcacggcccgcagcctctacccggcagactttaacatccagtatgagatgtacaccatcgagcggaatgcagagcggaccgccaccgccgggaggctgctgtacgacatgtttgtgaatttcccagaccagccggtggtgtggagagaaatcagcattattacatcagcattaaggaacgattcacaggacaaacaaacccaatttttaagaagtttatttgaaactcttcctggtcgagtccagtgtgaaatgttactaaaggtcacggaacaatgcttcaacacgttagaacgatcagaaatgttgcttctacttttgaggcgcttccctgaaacggtggtgcagcatggggttggccttggggaggcactattagaggctgaaactattgaagaacaagaatctccagtgaactgctttagaaaattatttgtttgtgatgtccttcctctaataattaacaaccatgatgttcgattacctgccaatttattgtataagtacttgaacaaagcagctgaattttatatcaattatgtcactaggtctactcaaatagaaaatcagcatcaaggcgcccaggatacatctgatttaatgtcacctagcaaacgtagctctcagaagtacataatagaagggctgacggaaaaatcatcccagatcgtggacccttgggagaggttgtttaagattttgaatgttgttggaatgagatgtgaatggcagatggataaaggaagacgaagctatggagatattttgcatagaatgaaggatctctgcagatacatgaacaactttgatagtgaagcacatgcaaaatataaaaaccaagtggtgtattccaccatgctggtcttctttaagaatgcattccagtatgtcaacagcatacagccatctctcttccaaggtcctaatgccccgagccaagttccactggttcttcttgaagatgtatcgaatgtgtatggtgatgtagaaattgatcgtaataaacacatccataaaaagaggaaactagctgaaggaagagaaaaaaccatgagttcagacgatgaagactgttcggcgaaaggaagaaatcgtcacattgtagtcaataaagccgaacttgctaactccactgaagtgttagaaagctttaaattggccagggagagctgggagttgctctattccctagaattccttgacaaagaatttacaaggatttgcttggcctggaagacggatacttggctttggttaagaatcttcctcactgatatgatcatctatcagggtcaatataaaaaggcgatagccagcctgcatcacttagcagctctccagggatccatttctcagccacagatcacagggcaggggaccctggagcatcagagggcgctcatccagctggcgacgtgccactttgcgctaggggagtacagaatgacatgtgaaaaagtccttgatttgatgtgctacatggtactccccattcaagatggaggcaaatcccaggaggaaccctcgaaagtaaagcccaaatttagaaaaggttcggatctgaagctcctgccttgtaccagcaaggctatcatgccatactgcctccatttaatgttagcctgttttaagcttagagctttcacagacaacagagacgacatggcattggggcatgtgattgtgttgcttcagcaagagtggccacggggcgagaatcttttcctgaaagctgtcaataaaatttgccaacaaggaaatttccaatatgagaattttttcaattacgttacaaatattgatatgctggaggaatttgcctacttgagaactcaggaaggtgggaaaattcatctggaattactacccaatcaaggaatgctgatcaagcaccacactgtaactcgaggcatcaccaaaggcgtgaaggaggactttcgcctggccatggagcgccaggtctcccgctgtggagagaatctgatggtggttctgcacaggttctgcattaatgagaagatcttgctccttcagactctgacctgagtggagacctttccaccagacacagctcgggcctgtgtaattgtaggagaagacactcagcagtgattgccatggcacagagccgtggtcattgttgctgttacaaagaagaaaaccatctgagttctaactccttggttgcttaaaagtagttcccaagagtctgagaagctatttctatttttaagagtcattttttgtaatttttgtaaaacaaaagtaccaatctgttttgtaaataaaaatcatcctaaaatttgaagacaaaagaaaccaaaaaacaaaaaaacatgtcggccgcctcggcccagtcgactctagactcgagcaagcttatgcatgcggccgcaattcgagctcacttggccaattcgccctatagtgagtcgtattacaattcactgggccgcgttttacaacgtcgtgactgggctggcgtatagcgaagaggcccgaccnn

SEQ ID NO: 13093 - DNA, 554 bp, Homo sapiens
  misc_feature 1, 2, 3, 4, 5, 6, 7, 8, 9, 10, 11, 12, 13, 14, 15, 16, 17,18, 19, 20, 21, 88, 89, 90, 91, 348, 349, 350, 351, 352,353, 354, 355, 356, 357, 358: n = A,T,C or G
nnnnnnnnnnnnnnnnnnnnnaaaaaaaggtttatataatttctcccccgcgggggggcccctttttttttaaaggcggcggggggcnnnntttttttttttttttttccgggggggaaatttttggtccccaaaaccattaaacccgggggtttttttttttaaaaggggggggggcccccaaaaaaaaagggccaaagccttttggttttttttttttaaaaatggggtttcccaattagaaaatttttccaaaaaacccaaaaagttttttttttgaaacccgggggggaaaggggtttttttttttggggggcccccaaacccccatgggggggggggggggcnnnnnnnnnnncattcatttctggctgaagagccactttattgccatcatatcatactttttgaaattccataaagtgtcaagatgttctccttggtgctggcttaatggatccgtttttgtctagagccagaagccttgaatggtctctccagaagtctcagcatacgtgacctttcaagtcttccacggcagtctcaatggcccc

SEQ ID NO: 13094 - DNA, 1341 bp, Homo sapiens
  misc_feature 1, 2, 1264, 1330, 1331, 1332, 1333, 1334, 1335, 1336, 1337,1338, 1339, 1340, 1341: n = A,T,C or G
nnctagctgactggaagtgcttaatctggatcgtcttttttttttttttttttttttcaatattttaaaaggagaatttaaatactgtgcttactgtgaaatatatcagttggtgagccgggcgtggtgggtcacgcctgtaatcccagcactttgggaggccaaggcgggttgatcacccgaggtcaggagttcaagaccagcctggccaacatggtgaaagcctgtatctattaaaagacaaaaattagctgggcgtggtggtacatgcctgtaatcccagctacactggaggctgagtcaggagaatcacttgaacgtgggaggcagaggttgcagtgagtggagatcgcaccactgccctccagcctaggtgacagaatgagactctatctcaaaaaaaaaaaaaaatgatatcagttggtggatgctcctataggtagccaaacacattgattacctgttagattttaggatagaaatcaaagtagagcacgtcagcaagagcctctttgtctcactccatcatttaaaaccagtatattcagtagttgaagaaagagctctccctgagtcagttgcaaaacgtctatatttttagatgccactacttttttcttaaatattcattttgagactgtcatgagttagaccagtggttgagattagtagatggctcactagacatgtttttgttttgcagacattatatccattccagtcctctgcactgtacactgcagcagtgtgcaaactatgggacttagagggtttctgccatctttccatgtgtgaagtagcttggtttcctctgcctgtgcatttggatgtttgtgctatgtccacctcctaaactggctactgagaaaatcatcttcagccctgtcagattgtctctggcagtagctcctaataattatttatgtttttggaatttttttttcaacttttaaaaaaccttctatccatttcaatttgaattatttgatttgtacaatatatgtatattctcttcttcctttttgtcatccctgccctgccacccccaaaattttgtttttaaaaatattctgggctgggcatggtggctcacacctgtaatcccagcacttggggaggccgaggctggtggatcatctgaggtcaggtgtttgagaccaacctggtcaacatggtgaaaccccgtctctactaaaaatacaaaaaattagctgggcgtggtggcgggcacctgtaattctaactactcgggaggctgaggcangagaattgcttgaatccagaaggcaaaggtgtcatgagcttaaattgcgccactgcactccaaccnnnnnnnnnnnn

SEQ ID NO: 13095 - DNA, 476 bp, Homo sapiens
  misc_feature 474, 475, 476: n = A,T,C or G
acctttggttaagagtagacaaggcagacatctgagcctgcatgactcatcaagtttagggtgcaggcacatactccacttgttgtataacctgtttgtgtaagctgatacttgccttggagccactattgtctgtaaaaggtataactgccctgctgacactgtgcatgggggacatggcttggcttggctcttgggcatggcttgacatggctcttgcgctcatgcccagagagagaaggagataaactgctgaccctgaagggagagctggccacacagctgtgcgtgggggcagccgcagcaagcagccgagacagaacagacagtgtagaagagctgctgatgagcgagctgctgaataaagccatatttcccctactgacagccccccgagtgttgtttcagctatctgccattcatccacccacttccttcagacctcagcatgggctggaacttggacttgaaccnnn

SEQ ID NO: 13096 - DNA, 226 bp, Homo sapiens
  misc_feature 220, 221, 222, 223, 224, 225, 226: n = A,T,C or G
actatgccttttcctccactctgagagtttgaacaaaagaattcaatgacctgatctttttaacaaaattaaaaatttaaatgtcctcatttttgaaaaacctaaactcagtgctcataggttatgttggcatagcagcagagaatttggttagaagaggaatatgaacgtggaactctggtttgtaagtcatacatcagctgatgtcttaagtgtgtgnnnnnnn

SEQ ID NO: 13097 - DNA, 4161 bp, Homo sapiens
  misc_feature 1, 4133, 4134, 4135, 4136, 4137, 4138, 4139, 4140, 4141,4142, 4143, 4144, 4145, 4146, 4147, 4148, 4149, 4150, 4151,4152, 4153, 4154, 4155, 4156, 4157, 4158, 4159, 4160, 4161: n = A,T,C or G
nagtcgacccacgcgtccgatttcatcctgttgcccctccgaaatctattgctttagattcagagcccaagcctctcattgatgtgagtgtcatcacaagatttaatgagtacagtaaagtcttacagttcaagtattttatggtcctcattcaggaaatggccttaaaaattgatcaagggtttctaggagctattattgcactgtttaccccaacaacagaccctgaagctgaaagaagacggacaaagttaatccaacaagatattgatgctctaaatgcagaattaatggagacttcaatgactgatatgtcaattcttagtttctttgaacatttccatatttctcctgtgaagttgcatttgagtttgtctttgggttccggaggtgaagaatcagacaaagaaaaacaggaaatgtttgcagttcattctgtcaacttgctgttgaaaagcataggtgctactctgactgatgtggatgaccttatattcaaacttgcttattatgaaattcgatatcagttctacaagagagatcagcttatatggagtgttgttaggcattacagtgaacagttcttgaaacagatgtatgtccttgtattggggttagatgtacttggaaacccatttggattaattagaggtctgtctgaaggagttgaagctttattctatgaacccttccagggtgctgttcaaggccctgaagaatttgcagaggggttagtgattggagtgagaagcctctttggacacacagtaggtggtgcagcaggagttgtatctcgaatcaccggttctgttgggaaaggtttggcagcaattacaatggacaaggaatatcagcaaaaaagaagagaagagttgagtcgacagcccagagattttggagacagcctggccagaggaggaaagggctttctgcgaggagttgttggtggagtgactggaataataacaaaacctgtggaaggtgccaaaaaggaaggagctgctggattctttaaaggaattggaaaagggcttgtgggtgctgtggcccgtccaactggtggaatcgtagatatggccagtagtaccttccaaggcattcagagggcagcagaatcaactgaggaagtatctagcctccgtccccctcgcctgatccatgaagatggcatcattcgtccttatgacagacaggaatctgagggctctgacttacttgagaatcatatcaaaaagttggaaggagagacttaccgataccactgtgctattcctggaagcaagaagacaatccttatggttacaaataggcgagtgttgtgtataaaggaagttgaaatcctgggccttatgtgtgtagactggcaatgtccatttgaagattttgtatttcctcctagtgtcagtgaaaatgtgctaaaaatttcagttaaggaacagggtctgttccacaaaaaagacagtgccaatcaaggctgtgttcgaaaagtttacctgaaggacaccgccacagcagagagagcatgtaatgccattgaggatgcacagtcaacgagacagcagcaaaaattgatgaagcagtcatcagtgagacttctcagaccccaattgccatcttaatcacagacctcaggggctccaacagggagaaaaaacaatcactggtcttgtctataagtcactctgctttatcttgctaaagacaatttttcaagcaatcctttagttttagttttctggaatagctagtattgggttttctagttttttcaccttttagtttttactctaattttgtaaccatgtatatgctagcagtccacttctacgccaccacccaaatgggtcagacccttgaagaaacgtcacttcaaactcagaatgaaattttcattaatattaaaattgtgaagcaaaggtcaataggcttatatttaattaaagccttactgaagaataagaaatgagcttagaatgactagtgttctttgaaaggtttttttatttttgtttttttggggtttttttttttttttttgagaccgagtcttgctctgtcgcccaggctggaatgcagtggtgcgatcttggctcactgcaatctctgcctctcgggttcaagcggttctactgcctcagcctcctgagtagctaggattacaggtgtgtgccaccacgcctgggtaattttttttttttttgtatttttagtagagatgagtttcaccatgttggtcagtctagtctcgaactcctgaccttgtgatccgcatgcctcagcctcccaaagtgctgggattacaggcatgagccaccacggcccgccaaaaggctttaacccatgaacaaatgttggatcctgacattttgtttaagagtgatttgttcaataattgaactgagttaacattcttggtaaaccaggtaattgaatgaagaaaggtcactaaagggagaaatgacatgttttctattttcttttcatgaaaacactgtttttccccctaataaagcatattttactttggtgcttatttttcctccttgcagtctaataaaaaaatctggacaatcaaaccttaaaatagctacactctgccctctgtaatgtagcattcataaaaatttggaagtatttacatcctctttcaagatgagcttatatgacacaattattatttgctgatacatgaaaatactgcactttaagtttctcaagactctgaaatatgtaaaattcaatatttttatattcccagaaattgtttcttacaggttgaaagtcttttaagggcatcacaaattaacatttactcctaatgcacgcctagaatgtattttaaatacttactaagaagaatgaaaattctttggttgttttatatataaataaggcatatataatgacactgtgttctgtgagggagcaggccctgtgagaatcaattcaggacagtatttttttttgtcctttctccatccttgatcagagataaactattaaaactttaaaaaatactcaaaaatatgtaagttttttggttgaacctttagatttgctcataatgtttaacataacaacatttatttcaaatcactgaattcatggagatgtggacacgcttggtttgctctatttttgtttatgtgtgatagtggttctgtcatcatcattcatgttttttaaggcctggtcataaaactttaaattttactagtgttacttaatgtatattctaaaaagagaatgcagtaactaatgccctaaatgtttgatctctgtttgtcattactttttcaaaattatttttttctgtaaagtataatatataaaacttcttgcttaaattgaatttctatattagtggttaattgcagtttattaaagggatcattatcagtaatttcatagcaactgttctagtgttttgtgtttttaaaacagaattaggaatttgagatatctgattatatttttcatatgaatcacagctgttgacaatgtcccatatatttaagaaattatatcatactgatactatttgtaacattttgatttgatttaatctccagggacagaaataattcattggtaaagtgtaataatgcgttttttaaaaatgctttgagaggtaattacttgcatatgagagaaataaaacatttggcacattgtttacaggtgaaaaaaaaaaaaaaaaaaaaaaaaaaaaaaaaaaaaaaaaaaaaaaaaaaaaaaaaaaaaaaaaaaaaaaaaaaaaaacaagcaacgaaaaaacaaaaaaaaacgaaaaaccaaaaggacgggcgcgatgaagagaacacaacaatacacgaggagcaggaacactcgtcagcgagacgcctataaagaagaaggggagggacgtgcagacaaaacaacagaaaatggaaaagacaggagaagaccctacgacgacaatccactgcgtcgcacaaacaactaactaacgtagaaagcgcagctaagagcggacacaaccaaccgcccgaaggtgaacatcacgaggccgaaaacgaacagcaagcaatgtaccggtgcaacgaaaaaaaaactagacactgagggagaacccacaagcaatagcatgtcaaaaagaaatagagactagnnnnnnnnnnnnnnnnnnnnnnnnnnnnn

SEQ ID NO: 13098 - DNA, 700 bp, Homo sapiens
  misc_feature 691, 692, 693, 694, 695, 696, 697, 698, 699, 700: n = A,T,C or G
acgcgggggcctgcttgccatcgcaaagttgttaaccccagagtcttctggctgtgctgcctcctctgcttttaatcttctgtggatatttctccgatttcccccaaaagcccacagatcctgggggaagccaccccattcggccaccgatcatggaagaaagtattactttttatttaccaaacattttaaagatgttggaagatccatatgctgcctggaggctgttgtttctagggacacaagtatccagcctatattgttacaatttttttcaagaactgccgtcttctttgcctgcactaatggaacatcatcttcagcgggctatttcagcacagcaggtgtatggcgagaagagggataatatggttataccggtcccagaggcagaaagtaatattgcttactatgagtctatatatcctggggaatttaagatgccaaagcagctcattcacatacagccttttagtttggatgctgaacagcctgattatgatttggattctgaagatgaagtatttgtgaataaactgaaaaagaaaatggacatctgcccattgcaatttgaggagatgattgaccgcctagaaaaaggcagtggtcagcagccagtcagtctgcaggaagccaaactactgctaaaagaagatgatgaactaattagagaagtttatgaatattggannnnnnnnnn

SEQ ID NO: 13099 - DNA, 550 bp, Homo sapiens
  misc_feature 1, 244, 515, 516, 517, 518, 519, 520, 521, 522, 523, 524,525, 526, 527, 528, 529, 530, 531, 532, 533, 534, 535, 536,537, 538, 539, 540, 541, 542, 543, 544, 545, 546, 547, 548,549, 550: n = A,T,C or G
nagattaatgcataaagccaaggaactaccccgctccttgcgttatagggtcactttaagctttggggaaaaaggagaaagtgagaggagagttctttgcatcctccctccttgcttgtcacccagttgcctttaaaccaaattctaaccagcctatccccaggtagggggacgttggttatattctgttagagggggacggtcgtattttcctccctacccgccaagtcatcctttataatgntttttcgggccctcccttagctctttgtgggtcgggggggcaatttacactccttaaaaggggaaaaaggcggggggcgggggccccccacaaggtgacgggcatagaaaaggttgtacaaaaatgttccagccgtgggggtcactctggtttaaaagggccggggataagtggtctaagctccttaacctggcccattaaagggatttgaggggtgaaccttctcgccccagggctttaaaacaaaacggggggaagagggggggcatannnnnnnnnnnnnnnnnnnnnnnnnnnnnnnnnnnn

SEQ ID NO: 13100 - DNA, 344 bp, Homo sapiens
  misc_feature 1, 2, 337, 338, 339, 340, 341, 342, 343, 344: n = A,T,C or G
nnaactgtccttcccatctccatctgccaaactcattcttacccctaggacctgctgagatgctgcctctaccatgaagccatccctgagaacagtagcttgttatttctactgctgcttccagctttgattggctcttccctactcatcccctcacctgacatccggacagtgtgtgcaacagcttatcatgattattattgggatggtctactccggcacccataatcctgtcctgagtgagcaccctgcacatgaggttgcttgagaacactggctgaacctgtcaacagttggtggattctgatccagtaactgatagtgggcaggataatannnnnnnn

SEQ ID NO: 13101 - DNA, 350 bp, Homo sapiens
  misc_feature 321, 322, 323, 324, 325, 326, 327, 328, 329, 330, 331, 332,333, 334, 335, 336, 337, 338, 339, 340, 341, 342, 343, 344,345, 346, 347, 348, 349, 350: n = A,T,C or G
acgcgggggcacatgcgcattgcgcccgcagccctggaccatttgtcaggactactcgtgagacggagaaaaaaaaaaagagaaaatttggggaacccttaggagaaatcttgaaagtggacagcaattgtgaagatcgccacagagttctgtgtttaatcaccgccaaagggttaaaaaataaatcatgactgaatctgcctttaccacaaatggtaaaaagtttgatgtgtccagcgttatggactggaaaaatggagtgggcacttcaccaggaagtgacttaaagtttcgggtaaatgattttggacccctggaagnnnnnnnnnnnnnnnnnnnnnnnnnnnnnn

SEQ ID NO: 13102 - DNA, 498 bp, Homo sapiens
  misc_feature 496, 497, 498: n = A,T,C or G
actaatgatgctatttctttttgtggtggtgaaacaaagctcagcctgcactactgtctcatgagaaattttttattatctttcatcagatgaaagagtatttgcctacacattgccaatattcatccagatatattttgggaaaaaaagctcttcaatttctcaagcacttttttcatcttttgaactggaatccaagtcatggaggcccatcaccttacagcttcttaaatggcaaacataattattctttgattttgcttttcctcaggctgcattcttaagtaattgaattgtccttttgtcatatgtgattggcaacaatgcgcacaatgagtttgtatctaacacagttttgaaatagcgttgtttcttttttatgtctcataatcattgcagggtgtaactcatacttagtttacgccaccatggcaagtggccgcggctcaattcttcctcttgagagtcagatggccggcatgcattactaatctannn

SEQ ID NO: 13103 - DNA, 3991 bp, Homo sapiens
ccgcgtcgcagctcttcaacatcatgatcaccccattagcctccggcggtggctgcggccccatcgggagcccctccttggggcctttcctgtccacggagaccgcgggcaccgccagcagctgcccccccggaggctctcgggcaggggccgggatcgacgaggggggcggcggaggtggcaggggctgccggaagccgtccaccgcaacctttctatagtgacttccagtcaaggttttgttgtattaagagctgacccatagccagctgcagtcactgtgcaaaaatttagagaaactaaattttgcaaactttactttgcccactttttattaatacatacatagtaaaaagaatatatttctccatgaacttaataatgcaaaagcatccaaagattttaatgccaattcacattatactgtgatgcttttatagggaaagttcttttgtaaaagaatgctctctcccagaaaaagcatttgggtatattattaggatactgaagaatttctccacatttagaaacattccaattttattcctttcagaaaaattattaataccactcactcagacttcagttctaggtgtgattggtaagcctgaagcaagcattccattgagaaaagtaaaatgtgaatgtcatgatgaatggaattctccttgatactagaatgttaccagtgtagcaacttaaactgtccaggtcatagtgagagcctgtctatgttcttacagtaattcagtgttcatcgatgcaatccaggatgctcacagagtgaattgagtccaattaaagtccacaaaatccacgaactctggttaagtactttaaaaaataaatctgacaacctttatctttacttctctgtataacagttttacaaatcaaggacttcaattattgggtgacttacttgctcccaatatcccacttctaactctcccacccacaccactccccccaaaaaataaactgaattggcagaggcagctgtatgaagaacctgcagagcagacatgcgacagcatccctgggatgtttcttttcccctcaagttctctgaagaggtaaatactattagtctgatgttgcctagtagagaagcctatgctcaattaagattcaagcaaaattgagaagaaaagtatttttctcttgccacatctatttttcttgggctttcaacaacagctagaataagcttcagaaacttttatgatggactaaaaagcactgtggatgtggagaaacagaaatatagctttgccacagctggaagggagccttaggacagcagtgctacttcttccctatcacactcaaatataatgttcaaatgacagactttttttaagtaattatctcattcatttaaaatgaagtgatcaggaaccccacaccactgtgtatttggacttaataactgtatctgcttcctagagcatcgcaggaagtagctctcaataatactaagggaagcttccgtgctaaagtaccgcccatccctaaactagagtactgccaatactatagcagctggtgacagacatcgtgttaagtggcacagggaatggaaatgctctaggagagttggtccccaacattaatatgaatatgctctggtgaaccaggggaaaatccgacccatgtgcaaaaggtttctattttcccacttaattagcatcctgctacagggccacacctgccatcttggtgggtgagtttagataccatacacttctccaggaggagtttgacaacatggtcacacagttgcaaagtgcacaaagctcaaggcacagagtagaagaaagttgtgaactgatgggggaaagttctagcaaaagcagagttagcattttcctttaacaagactttctaatgctaaacaaagaccaactcttttaaaaggggttgttttggttgtgggtgaaaaatactgtactgtaatgatctgcttggttttaaagcaaaagagatcctgacatgtgaaaccaatacaccaaaatgccaagtccacaaatgaacaaaacaagtgcttaaaaaaaaaattcttctgctcttatatttttggaggcaagctgctgattttggctgtcagatttcacttagaaatggtcactttctgagatgctttttcctcacagaatctgtagataaactcattaaaagattgtcccatttcaaaatcacccccaagtctagcagcaacgttttttttttttagtttttgttttaaaattacaaaccaagtaagaagtccaacatcctcttccatgaacagctttgtgacagagctcctgagtgtgtgcagcccccactgtgctctgaatacagtctctgcagctccagtgtgtcctcttttcaggaaggaaagcatattcaatacattcactatctgtaccccctggaacttgcacatgctgacgagctattataagccaactcatccccagctctcttccgggactggtcaccccttgtaaaaccattctgtataagttctctttgaaatttctgatcttgagcagcatattcagaaagttcagattccaccgccggagggagaatgtttggaataaatttagaaaatagagttggagccatctgaacccactctggtctgagggtatacaggcctttcacaatatttgccatagttgaaggtgtgacctgaaatggtgttgactgggcttctaaaagtaaaggcattaggctgtaaatgtgcttttctgcaacatgttccgtaaacagctttataaggtcatcttttaagtctctgttaagcttggtttcgatgtaaaacttattcatatatatgaaaagaggcacaatgctctgcaatgctcccatatattgtccaagagctatattaaatctttcaatatagagatctggagggctggcctgcagctcctttgagactctctctaagtgattagttatctttttaatcagatcactatacatctgttccgagtgctgctggcatacacatttatacacacaactgtatatctgttcataggatatggggatatagtcaccaggactctgagttaaaagttgatctatggcaccatccaattttggccagtatgtgctcttataatcttcaatagttataacattcattaagaacttggaggtggaggtgttgatgttgatggtggagctggcggtgggggcgggggccgccttggccacggcggcggccgcgtcgcagctcttcaacatcatgatcaccccattagcctccggcggtggctgcggccccatcgggagcccctccttggggcctttcctgtccacggagaccgcgggcaccgccagcagctgcccccccggaggctctcgggcaggggccgggatcgacgaggggggcggcggaggtggcaggggctgccggaagccgtccaccgcagcctcccagttgttgtggttctggtcgtccatcatcgcctcgtagctgcccccctcctcctcttccatgctttcctccatcctgctggcccccggcacccgcccgcctcacaggcacctgccgcctgtctcaaccccgggccagcgggcaccgctgcctccccgagttacatcgccggcggcaggaatgggcgcagcggagagggctgcggtgcgcagggtctctcgctctccgcggggccgactagcttgaagacgcggctgacggcggtgggcgctccggggctctagtctgggagaggcagccgtaaagcagcggcgctcctcacgacgttttacagcggcttccaacaggcagttggaaagggcagctgggggcgcggccaggagggcacgtggtgcgagggactggccgcgagaaagcggagccaaaaggggcgggagctgtgagtcactcccacgcaacagggcagaggttcgccccgcctcggctggcagggagctaacaggggaggcgcgacgggtcgggacgggcattcgccggctccgccccccggac

SEQ ID NO: 13104 - DNA, 185 bp, Homo sapiens
  misc_feature 1, 185: n = A,T,C or G
nggagctccccgcggtggcggccgcccggccaggcactgtcttttactgtggcttcgtttttgaagtagctccaggcctggcttgagatgaggctctcattgtgaaaccactgagaggaattctcctcccgggagtaggctccctgagcactttagagtcacactgaccttctccagcaccctgn

SEQ ID NO: 13105 - DNA, 302 bp, Homo sapiens
  misc_feature 1, 228, 240, 242, 245, 253, 254, 255, 256, 257, 258, 259,260, 261, 262, 263, 264, 265, 266, 267, 268, 269, 270, 271,272, 273, 274, 275, 276, 277, 278, 279, 280, 281, 282, 283,284, 285, 286, 287, 288, 289, 290, 291, 292, 293, 294: n = A,T,C or G
  misc_feature 295, 296, 297, 298, 299, 300, 301, 302: n = A,T,C or G
ntggactccactgatggtcaatgtgactgttgtcccttagctggagccagagaatcggtcagggattcctcagggcctctcactgtctttatatattaccaatataggggcctggcctggcttttgttggtacgcgggtattctctgaagttattgcatattttgaaagtagctatcagccctttcctccctcccattctctacttggtgctcctccatgtttttttntgctttgttgtnantgntggttccnnnnnnnnnnnnnnnnnnnnnnnnnnnnnnnnnnnnnnnnnnnnnnnnnn

SEQ ID NO: 13106 - DNA, 482 bp, Homo sapiens
acttggttttaacatcatattaaggaaagaggcactaaagaggataagaaagatggtcttgaattgcctacaccatccttcccctaatccctggcactggcagcatggcgcggagagagaatttatgtgcttgtggaagggagaaaaaagagtgattgtgggacgtaacactggaatttagtgctgccctgtcacagcagaaagcaacaccaggcagaactcagccagcatccacagagggagcatttagaccagcactagtcagaagggaagcctccatcccagcggtcagaaccagagttctggcaagccccaccaccatgggataaggtgctctgggatctgaaataaactgaagggcaagttttgggccataagggctctaattcctgggcaagcttctgtgctgtgctgggcttagagccagtggacttggggtgcacgtgacctagtgagacaccagctagggcagccacgggagt

SEQ ID NO: 13107 - DNA, 1389 bp, Homo sapiens
tatagggagtcgacccacgcgtccgctgcctcactcccgagctctactgactcccaacagagcgcccaagaagaaaatggccataagtggagtccctgtgctaggatttttcatcatagctgtgctgatgagcgctcaggaatcatgggctatcaaagaagaacatgtgatcatccaggccgagttctatctgaatcctgaccaatcaggcgagtttatgtttgactttgatggtgatgagattttccatgtggatatggcaaagaaggagacggtctggcggcttgaagaatttggacgatttgccagctttgaggctcaaggtgcattggccaacatagctgtggacaaagccaacctggaaatcatgacaaagcgctccaactatactccgatcaccaatgtacctccagaggtaactgtgctcacaaacagccctgtggaactgagagagcccaacgtcctcatctgtttcatagacaagttcaccccaccagtggtcaatgtcacgtggcttcgaaatggaaaacctgtcaccacaggagtgtcagagacagtcttcctgcccagggaagaccaccttttccgcaagttccactatctccccttcctgccctcaactgaggacgtttacgactgcagggtggagcactggggcttggatgagcctcttctcaagcactgggagtttgatgctccaagccctctcccagagactacagagaatgtggtgtgtgccctgggcctgactgtgggtctggtgggcatcattattgggaccatcttcatcatcaagggagtgcgcaaaagcaatgcagcagaacgcagggggcctctgtaaggcacatggaggtgatgatgtttcttagagagaagatcactgaagaaacttctgctttaatgactttacaaagctggcaatattacaatccttgacctcagtgaaagcagtcatcttcagcgttttccagccctatagccaccccaagtgtggttatgcctcctcgattgctccgtactctaacatctagctggcttccctgtctattgccttttcctgtatctattttcctctatttcctatcattttattatcaccatgcaatgcctctggaataaaacatacaggagtctgtctctgctatggaatgccccatggggcatctcttgtgtacttattgtttaaggtttcctcaaactgtgatttttctgaacacaataaactattttgatgatcaaaaaaaaaaaaaaaaaactcgagggggggcccggtacccaattcgccctatagtgagtcgtattacaattcacttggccggcgttttacaacgtcgtgactgggaaaaccccctgcgttaccccaacttaatacgcctttgaagcaccata

SEQ ID NO: 13108 - DNA, 759 bp, Homo sapiens
  misc_feature 758, 759: n = A,T,C or G
acgcggggactcacttgtgcccagagagagaataaagccatgtcgaaactatctacgattccttgagtgtttttccagctacctgccacttgcccacccactcccctgagatctcagttagaacatgacaattgggctcatgaacaggatcctgagtggttgcaggtgaacaagcagttggcacaagggcaaagtgatcacatcctgattgagtggctatggacagccatacagactgtgtggaacaacgctggtgaaatacccaaaccgtgagtaaataccagtctatgtggtttggtgcaagtcattctggagacgggtatgcggcaggctatgtttgacctgaatacccacggaccaggagatgaatgcttcagctaccacatgggagaatcttgtgtggggttctgcacccctgagtgcctttgactccctagctactgtcctcaacctgtacatagggtaccacatacatgaagtgaccactgctatggtgactctcagggaagcagaaggccatcggcaggaccgaggggtccatgctgtaaagaaggggaagatgccccacccacagggggtccccccatggtaaaaagggggcgccaacgagtgacacactcacagacatgtatagattttattttggccgggttgactgagagaaaattgataagcaacccaatgaagtgcttttaactttgtggagacagttgtctctggaggagcacatccagaaaatgcccaagggggagaaggann

SEQ ID NO: 13109 - DNA, 647 bp, Homo sapiens
cggcttttcgagcggccgcccgggcaggtaccttatatccttctgggaacatagcatctaattcctcatcagaaagtgggcgatttctctcatcaatttctctttcccacggtccttcctatggcatgagccgcgaagtgcagtccaaaatcgagaagaagtatgacgaggagctggaggagcggctggtggagtggatcatagtgcagtgtggccctgatgtgggccgcccagaccgtgggcgcttgggcttccaggtctggctgaagaatggcgtgattctgagccatcccgcttagcctgcctcacccacacccgtgtggtaccttcagccctggccaagctttgaggctctgtcactgagcaatggtaactgcacctgggcagcttctccctgtgcccccagcctcagcccaacttcttacccgaaagcatcactgccttggcccctccctcccggctgcccccatcacctctactgtcttctccctgggctaagcaggggaagaagcgggctggggggtagcctgggatgtggggccaaagttcactgtcccttcttggcgggaaaaggcccattgaagaaaaaaccagcccagcctggcccctatttttgtcctggaatatttttgggggtgggaactaaa

SEQ ID NO: 13110 - DNA, 2910 bp, Homo sapiens
  misc_feature 1, 2, 3, 2908, 2909, 2910: n = A,T,C or G
nnnccgttttcctttacctctttcctcaccatatcaccaaaaatgcgtgagaaaagaaaccttttggaaacaaggctcaatgtctcagacaccgttactttgccaacagctccaaacatgaacagtgaacccactctgcagccccagacaggtgaaattactaaccgtatgatggacttgactttgaactcaagcacagcaacccctgtctccccaggaagcgtaaccaaggagacaaccactgttattgttaccaccaccaaatctttaccttctgaccaagtcatgcttgtttatgatcaacaagaagttgaagctatattcttggtgatcttggtagttgtcataataggagaatttttcagtgcctcttctgtcacaatcgtagacacggtcacactccagtatctgggaaaacacagagatcgctatgggttgcagcgcatgtggggctccctgggctggggcctggcgatgctgtctgtgggcatcgggatcgactacacccacatcgaagtgctcatcgatggaaaggggtgtaagccccccgagtacaggaattaccagatcgtcttcatcgtcttcggcgttctcatgaccatggccttgatcgttgccactcagttccggttccgctacaaccatttcaaaaacgatgattctaaagggaaagaggtggagatcccgcaggtggaaaggaacaactctacagagtcctctgaggagacaccaaccaccacaagccactcgcaggccttcaacttttgggacttaatcaagctgctctgcagcgtgcagtatggctcagtgctgtttgtggcttggttcatgggttttggatatggcttcgtgttcacctttctctactggcatttggaagacctcaatggaactacaaccctctttggggtctgttcagtcctgagtcatgtgtctgagctgacagcatatttttttagtcacaagcttattgaattgatcggccacatcagggttctgtacattggcctggcctgcaatacggctcgctatatttatatttcctacctggagaatgcctggactgttctccccatggaagttcttcaaggagtgacacacgcggccatctgggcagcatgcatttcttacctcagtgcagccgttccccctgagctgaggacatctgctcagggcatcctgcagggccttcacctgggtttgggaagaggatgtggtgccatgatcggaggcgtgttagtcaattattttggggctgctgcaaccttccgaggaattggcatggcctgcttggtgatcctactgctctttgccctgatccagtggctggcagtgccagatgaggaagaagacaagacaatgttggcagaaagaattcctgttccctccagtcccgttcctatagcaaccatcgacttggtacagcaacagacagaagatgtcatgccacgcattgagcccagacttccacccaagaaaactaagcaccaggaagaacaggaagatgtgaacaaaccagcctggggagtcagctcttctccctgggtgacctttgtctatgcactctaccaaattaaagagatgatgcaactcacaagagacaaccgtgcttctgagatacagcctttacaggggaccaatgggaatagggaaaattctcctgctggtagagcccagcctgtcccatgtgagactcactctgacccatctagaaaccagccatcccctgacgcagcagcatctcagacgcagaccagccccgctcaccccagtgtggacccgtgcacagaggagagtgaagagcagcaggctcagctggccgcgggaggacactgagggcatcctgctcatctcacaccctgcatggaatcaggctcctcagccaggacacagggtgaggccccccagccaggatatgcctcccctggaggagcacagcactgcatatgcttctaaatatctaaactcattaacatggaaacacacacacaggagctacagtacatattggcaggaaaaggtaaactttcgtaatctcattggaattacaacagggaaatggagttcaatgaggactttcagttctttgcttggttaggttaaggatgatagaatttctctgccagtgcagtaagagttgaaaccggcagttacactaagtaagtggagggaatgaaagtgtttcgaggtgaatgtggatataatttccctcttctgattatttattcttatttggttcctaacacaaactgggaagagatagaattcatctatactttcttttttcttggagagaaccgtttaaaaaattacaagatatatttaaaaagtaaccagataaaagtagcacatgtgcttttgttaaaaataaagttaaaagttaaagttaaaaaatgaagttaaaagtttcatcagaaactttacatatctttagcaaatatatttttatatgtgtatggcatataatggaaataattctttgagcaacagaagctattattaactactgcaagctaagccgagcttaaaaatgccttttgttttaaatgggctttgaggaaacacacagaaacaccgaatatttcacaaccacacacaccccggatcgcggttgcataccgaggtctccaacaatagggaaaggggaaaaagacccgcgagccaaaaaacatggaagatcaagagcagaaagagaggggaggagagaaccgagaaccggtacgacgaacggacaacaccaagagcagcgaaaaaaaacaagaaaaggatgcgcagaacacgcgcatccacacagcgagcacacgtgagtacgaaggaagacaaccaagcactcgcaacagaccccgacgcagcgaccacacgagaacgaggatgctagtaacactacatgacgcacgagttggccacnnn

SEQ ID NO: 13111 - DNA, 1503 bp, Homo sapiens
  misc_feature 1503: n = A,T,C or G
gcggacgcgtgggcgcggagcctgaggaggcgccggtcgctggcagctgagcggcggaacccttcgctggcgggagcgcggttcggggccgcagaggggacattgaataaacctgagtattgtgtgcctgtattttgactgcgacctatcagatgagatcaggtcaagagacaactgcctttgaaagagagtgagtgactgtttccaaaacagcaagcatagggagagccgccggaagtattgacggaaagcttgaattacctacatgattgatgatggtctccagctgtcaaagaagattgtggttgccaagagaaaggtaaccatttctcatccccttgagtggaattggatgcctctaggagcccacattggctggcagtagacatggccgaatttacaagctacaaggagacggcctccagccgccacttgcggtttaagctacagagtctaagccgccgccttgatgagttggaggaagccacaaaaaacctccagaaagcagaggatgaactcctggatctccaggacaaggtgattcaggcagaaggtagcaactccagcatgttggcggagattgaagtgctgcgccagcgggtgctgagaattgaaggcaaagacgaggaaattaagagagcagaggatctgtgtcgtctgatgaaggagaaacttgaagaggaagaaaacctcacccgggagctgaaatctgagattgagcggcttcagaaacgaatggctgaattagagaagctagaagaggccttcagcaggagtaagaatgactgtacccagctgtgtctgagcctgaatgaggagagaaatctgaccaagaaaatctcctctgagctggaaatgctcagagtcaaagtgaaagaactagaatcttctgaggaccgcctggataaaactgagcagagtttagcgtcagagttagaaaagctgaaatcattaactctgagctttgtaagtgagagaaaatacttgaatgaaaaggagaaagaaaatgagaaattgataaaagaactcactcaaaaactagagcagaacaaaaaaatgaaccgagattatacaaggaatgcttctaatctggaaagaaatgacctacggattgaggatggcatctcttccacactgccgtccaaagaatcaagaaggaagggtggtctggactacctaaagcaggtagagaatgaaacaagaaacaaatcagaaaatgaaaagaaccgcaatcaggaagacaacaaagtcaaagaccttaaccaagagattgagaaacttaagacgcaaatcaaacactttgaatcgttggaagaagagcttaagaaaatgaaggccaaaaataacgaccttcaggataattacctaagtgaacaaaataaaaacaaattattagccagccaactggaggagataaagctacaaatcaagaaacagaaagagttagaaaatgaagaggtagaggggaaagatgctttcctgtccagcaaaggcagacatgan

SEQ ID NO: 13112 - DNA, 487 bp, Homo sapiens
  misc_feature 487: n = A,T,C or G
acaccacccaacctggttattttttaaaatttctatacagactgggtctcagtatgttgcccaggctggtctggaactcctggcttcaagtgatcctcccacctcagcctctcaaatgctgggattacaggtgggatccactgcacctgtcctctgctctcttcttctttttaactcttatgtatggttctttagcaaatagccataacttttctttgtagctttggtagggacaacgttgtctttgagaggacgtttgcatctatgactactgaagtcttgtatctgcaaccagtgcttctaggaagctgacggttatgctgtagcattctgggctaccctggagaacaagttagaaacagtcataaacaaacgtatccatttgcccagtgaacacagtgaggtttcaatatgtggaaagcattgtgcagacactgttgcaagagagagttgaatcaagatagtaatgtgtcttctcctacagtgn

SEQ ID NO: 13113 - DNA, 3382 bp, Homo sapiens
  misc_feature 1, 2, 3, 4, 5, 3357, 3358, 3359, 3360, 3361, 3362, 3363,3364, 3365, 3366, 3367, 3368, 3369, 3370, 3371, 3372, 3373,3374, 3375, 3376, 3377, 3378, 3379, 3380, 3381, 3382: n = A,T,C or G
nnnnnccccctccccgggggccaagggctccggctgctgcctggcggccaacgggccaggtaggatttccgggagaggctgctgtggaggctgaggaggcggcggcggagatctggaaacagtatctcacctccctaaactggttaatagtggcatggaagatccatttgagatggggttttaccatgttacccaggctggtcttgaactcctggactcaagcaacccccgcttggcctcccaaagtgctgggattagaggcgtgagccactgcacctgacctaagaggaagcagaccagcccactacagagccaggcatggtcctggatagtgtggaagcaggagacacaacacctcctaccaaaaggaagagcaagttctcaggctttggcaagatcttcaagccctggaaatggaggaaaaaaaaagtagtgataaatttaaagagacttcagaagttttagaacggaaaatatctatgcgaaagccaagagaagagctggttaaaagaggggttctgttggaagaccctgagcaaggtggtgaggatccaggaaagccaagcgatgccatgttaaagaatggccataccacccccatagggaatgccagatcatctagtccagtccaagtagaggaagagccagtaagattagcaagtcttaggaaagctattccagaagaggacctaaagaaacgactaggctcaactggaagccagcctaattctgaagcagagtctgttcctgagaatgtacccaaaccacctttacttcctcccaaaagacccttgtcctcttctcatgaagcaagtgaagggcaagcaaaggatgccacttcctctggcggcacggcaaggttcatcatctccacctccatcaccacagcacccgctgccaccactgctgccacaagccttgcaaagactgttaatctctctgtcaccccttccccagcacccaggactctgcctgctgctcctgccagcactaacactactgctaccccaagcctcactcatatggtccctgccaagcagccccctatccctccccctaaaccagctcacagaaatagcaaccctgtcattgctgaactgtcccaagcaataaacagtggtacattgttatcaaaaccgtccccacccttaccacctaagagaggcattccatcaacctcagtacccaccttggagtctgctgctgccatcaccacaaaaacaccaagtgatgaaagagagaagagcacgtgttctatgggctcggaactactaccaatgatctcacctcgctctccgtcccccccactgcctactcatatacctccagagcctccacgcacccctccattccctgctaagacttttcaagttgtgccagaaattgagtttccaccatccttagatctacaccaggagattccccagcaggaagatcagaaaaaggaagtccccaagaggatactggaccagaactttggggagccccatataccctctaggctgcctccactcccactgcatattcgaatccagcaggccctcaccagcccacttcccatgactcctattctggagggttctcacagagctcattcgttgctttttgaaaacagtgacagcttttctgaggacagcagtacgctgggtcggaccaggtctcttcccatcactattgaaatgctaaaagttccagacgatgaagaagaagaggagcaaacctgtccatccacattcagtgaagaaatgacacctacctcagtcattcctaaattaccacagtgtctacgggaggaagaagagaaggagagcgactctgattcagaaggtcccattcagtaccgagatgaagaagatgaagatgaaagctatcagagtgctctcgccaacaaagtgaagaggaaagacacactggcaatgaagttgaaccacagacccagtgaaccagagttgaacctgaattcttggccttgtaaaagcaaggaggagtggaatgaaatacggcaccagattggaaacacactgatccggcgactgagtcaaagaccaacaccagaagaactagaacaacgcaatatattgcaacctaaaaatgaagctgatcgtcaggcagaaaaacgagaaattaaacgtcggctcactagaaagctcagtcaaaggccaactgtcgctgaactccttgccaggaagattctgaggtttaatgaatatgtagaggtaacagatgctcaagattatgaccggcgagccgacaaaccttggaccaaactgacccctgctgacaaggctgccataagaaaagaattaaatgaatttaaaagctccgagatggaggttcatgaagagagcaaacattttacacgctaccatcgtccatgatgccaaaggttgagagaggaatcaacatggctgctttgctgcttccttctccaaagtgacatatggagggaactttagcacttcccagcacagccagaattgcatcctctgggatcttctgaggtggacagcactttgaatgtagcatttcactggaacagagtcttatgtgctgcaccgggggcaaaacaacactttgtcagtgcttttgaacctttcaatattgtagcatgcttgaggagtttttcccttactggccaccaaagttctgaaccacttgcaggttccaggttttactggctgcaccacaccccttcccctagatgactgcctgtgcagagacacagtttgcaccattagccttacctgccctgccctgattgtgagacccaaatgtgtaggctctaaattccagccatcaaatccaattcctggtggggaaaaccttctggagacccccaaccttctgataaaagagtctctacctccagggaaagccttcttaccacactggcatatcagatgaaagcattgcactgtacctctcgtaacacagcaatacagtcctcttgaggcactcaagcctgagaggaagctcaggatctgacatgttcttccttttcctcacaagtcatcatgattttttattttaaaataatctggaagtaatgggaacttagtttttcctgaactccaaccagaatccaaattggttagatgaggccaggcgcggtggctcacgcctgtaatcccagcactttgggaggccgaggtgggtggatcacctgaggtcaggagttcaagaccagcctggccaacatggtgaaaccccatctctactaaaaatacaaaaattagccaggtgtggtggcgcctggttgaggcatgagaatcgcttgaacccaggaggtggaggttgcagtgagccaagatcatgcctactgcactccagcctgggcaacaaagtgggactctgtcnnnnnnnnnnnnnnnnnnnnnnnnnn

SEQ ID NO: 13114 - DNA, 504 bp, Homo sapiens
  misc_feature 503, 504: n = A,T,C or G
acttttttttttttttttttttttttgggatttttagtagagatggggtttcaccacgttggccaaactggtctcaaactcctgacctcagatgatcctcctgccttggcctcctaaagtgctgggattacaggtgtgagccagcatgcccggctctttatcacttttttaatatgagtggacactgtccactgacatcaattcccattcctagatcagtggctccatggactctctgctgaagtattcagggaaaagcagtgagcctctggcagagggcttcctagtttctgcagtcctcgtggacctcacctgtgtgacattcatgagggggtggctacagtggggagccttctcggagaagctgccctgctgtgtggtccacccccacctgcagccactcctccagccactgcacatccctgacccaggatagcaggcagggtcagtggcgccagggggatggtgcaattctatgcatacagaacactgctgttttcccnn

SEQ ID NO: 13115 - DNA, 295 bp, Homo sapiens
ccgggcaggtacgcgggtaagcaactaaaccaactttacaaatgttaaattcaataaactcaatatctctttaaagcaggatttctttctctccctgggcatcatttgctgatagataaaaacagagtaataaataagtggcttcctgaaggcaggtaaggcaacctccatgccagaccagttctcaatacagtgaccaaaattccccccattttcttgcttttactctctataactgttaattataataaaccatatggaaatgttttccttaaatggaaaaaaaaaaaaaagt

SEQ ID NO: 13116 - DNA, 1056 bp, Homo sapiens
  misc_feature 1, 2, 1019, 1055, 1056: n = A,T,C or G
nncacttgtcaacttctctcctaatttccctctgatgacatccaaggcctcctggtacgcgggggagaaaaagctgacctaatgaaactgtggcaacgtcagcgcttgaggcttgaagagggagacaagctaaaagaggtgttagacaagctaaaaaaggatatccagttgtttcatgatggcatttgcacctccaaaaaacacagatggtcccaaaatgcagacaaagatgagcacctggacacccctaaaccatcagctattgaatgaccgggtatttgaagaaagaagagccctgcttggcaaatggtttgacaaatggacagactctcaaagaagaagaatcctcacaggcctgttggagcgctgctcgctgtcccagcaaaagttctgctgtcgaaagcttcaagagaaaattccagcagaagccctggactttacaaccaagcttccaagggtgttatctttatacatcttttctttcctggaccctcggagcctttgtcgttgtgcacaggtgtgctggcattggaagaaccttgctgagctggaccagctctggatgctgaaatgtttacggtttaactggtacatcaatttctctccaactccctttgagcaggggatctggaagaagcactatattcaaatggtgaaagaacttcatattaccaagcctaagacacccccaaaggatggatttgtaatcgctgacgttcaactagttacaagcaattctccagaggaaaaacagtcccctttatcagcttttcggtcctcttcctctttaagaaagaagaataactcaggggagaaagcacttccaccctggcgatcttctgataagcacccaacagatatcattcgttttaattacctagacaaccgtgaccccatggagactgtccagcaaggaagaagaaaaagaaaccaaataacccagacttcagccgacagtcacatgataagaaaaataaattgcaggacagaactaggctaagaaaagcacaatcaatggngaggagaggcagcagcatggcgagtgtcctgttccnn

SEQ ID NO: 13117 - DNA, 448 bp, Homo sapiens
  misc_feature 1, 2, 3, 4, 5, 6, 7, 8, 9, 10, 11, 447, 448: n = A,T,C or G
nnnnnnnnnnnccgacgtactgggaaaaaacccctgtcaactaggaatattatactcagcaaagctatctccttcagaaataaaggagaaataaagtcccagacaagcaaaacataagggaattcactatcactaacctgattttataagaaatgctcaagggagccttgcatctgaaagtgaaaagataataatgtgaacccaaaatatctgagacaggtcgcagtcaatttagaaagtttattttgccaaggttaaggatgcacccatgacacagcctcaggtggtcctgaggcttggacatgtgcccaaggtggttggagaatagcttggctttatgcatttcagggagacatgagacacttcaagacaacttgaagtgggggctttcaggtcagaagtagataagagacaaaaggttgcattcttttaaatcctcgatcagcnn

SEQ ID NO: 13118 - DNA, 1047 bp, Homo sapiens
  misc_feature 1, 1043, 1044, 1045, 1046, 1047: n = A,T,C or G
nagaaagaatttccaaggtgcacaatggtccaagtccttgtttgaagaaatcacaagagagagagcatcaatttggacaatttttccttgcacaaggtaacttggtgctcgaattggggcaaagataacgtcttagctatggttaagatgatggaattgtccatctttggcctgcaggtactgcattcggttcctgccattgttgccattttcacttgtttgttcttgcttgcccccagaaaattttggacttgctggtgaatgtgcttggcctcgcgaagttgtcttctgccactgacgcagttcttgaatctcaggatcacagcgaaccacacaggctctccagaaggattgaatgtagagggctgcttcctcttctgtcagcaggagcgagagtgggattggcggccgtgggtgttgctttagccgctcctccacaaatggaatggagaaaaattctgtgaatggctcccctgccctctttggattttggttgtataaccactcagtcagaaaatcacaggcaatgaatttggttcttttcctctcaaaacatttttctttcttcgcttggtgaagcaggctagccattccgggaagcagaacaggaaagatgaaagtttccaaatattctttgggagaacatgtttttgggttgattgtttccgatttatcttgaggacagggtgtacgtgagatcatggtgaaatgggaaaccggaaaatagtgctctgcactgaagccatgaaaaagcatttcctctactggcgcaaccgtaatcacaggctcctgtttgactttatatccttctggaaagggaggctgctcagcttcatactccttgcagatctgctcccacagattcttgcttgacggctcggtgacctgccacgacgagacaggcagctcgcgggacgcgagagacacggtgggcaccggcgtccgggtgaacgacgagtctgtagagcagctgggcttgaggcgcactatgtggctggggatttgccgcggtgccgccatggccgcgcggacgcgtgggtgannnnn

SEQ ID NO: 13119 - DNA, 333 bp, Homo sapiens
  misc_feature 1, 2, 3, 4, 5, 6, 7, 8, 333: n = A,T,C or G
nnnnnnnnaaaaaatactattttaaaggactgtttaactactcacaaggctgcaaactctttggaagtgtttacactacaaaaaaagtgcttgagtttgttccggtattattataacttctttcagccctatcaaaggtagggtttttgcagctttcacaggcagatgtcctccaggcttaactgccttgtagttgtatcaagagaggacctttctggctgtcctactccactacttgctctccaataagccagaacttactgtgccttgggggcattcactctcttacggactgcctagaacaagcttccagaattctccaagacagatcan

SEQ ID NO: 13120 - DNA, 1002 bp, Homo sapiens
  misc_feature 978, 979, 980, 981, 982, 983, 984, 985, 986, 987, 988, 989,990, 991, 992, 993, 994, 995, 996, 997, 998, 999, 1000,1001, 1002: n = A,T,C or G
actgtttattactttgctatgcaggagaaacaaaacagctttttatttgtgtgtatactctgaagtcaatgtgcatgggttaaatcccacctctgcttcattttatttgtgtggctttggacaagttcctaagcacctctgtgtcagggcccctcattaacaaaatggagtttatgatggcatctacctcacatggttattgtgtggttgaaattagttaaaatctgtaaagtatgttgatgagtatctggtacagctattggaatcagatgcaaagatggtgttgtctttggggtagaaaaattagtcctttctaaactttatcgccctttggaattgctcggcagatctgcacagcgctgtgatgcatagcggtgtgcagatccttcttagcaacttccaggagaagctcaactcaagctacttggcacacatgcactaacatcttcgacatatggcatgattgcatcataacacttacagtctgttagacttttgcttcagtttcatgttagggtttacagtgtgatgactgtgcgcaactctacatgattgacccatcaggtgtttcatactgttattgcggcatgtccatcggcaaacccaggcaagctgcaaagacggaactagagaagcttcagatgaaagaaatgacctgccgtgatatcgttaaagaagttgcaaaaataatttacatagtacatgacgaagttaaggataaagcttgtgaactagaactcagctgggttgtgaattaactaatggaagacatgaaattgttccaaaagatataagagaagaagcagagaaatatgctaaggaatctctgaaggaagaagatgaatcagatgatgataatatgtaacatttactccagcatctattgtatcctaaacttctactccacgtccaatgtaactatgtacccctgagtaagcggggagtccaattttcattaaatttttgtcttataactannnnnnnnnnnnnnnnnnnnnnnnn

SEQ ID NO: 13121 - DNA, 754 bp, Homo sapiens
  misc_feature 1, 2, 3, 4, 5, 6, 7, 8, 37, 65, 75, 83, 93, 112, 153, 754: n = A,T,C or G
nnnnnnnncccggtggggccggtcaacccagacctgngccaacataggagtgaaacccgatgtanaccattttgngtacaacncgccggatgnacccctgtgggtttcaacnccctgtataccacattggtagtcctatgtttaggttaggcnccccataattacaaagtaatacaagtcatttgtcttactgtagttaaataaacaaaaaatacctgctagaaactaagtgaatgagtttctcatgaagctaaatgaatgaatttgatatctggaaatgtttcagagtggaagaatattagaatcttctctgatctgctccatctgtctctagtacagtggcttctacatgtgtgcacagcagctctggtcttagtgtctagctattactatttggtagatccatagatgggggggaaataaggagtcaggccagcaggttcaacttcttatttctcagtagcttcctataatgattccacctctaatgaggtgaattactactgcatgaaaaaggagaaaaaagggttttggccatcttagctaataaatcacattgactgcctggctgatcagatcaattgtgcataaatcagtgctttaaagagtcttaaaataagattctaccaagaccagtcgatccacaggcttgtgtaacggcaggactcttgccccatggcaaactgtgcaggagttcacagtatttgaagacagttacatgtggccaaatgttgaaaatgaatgtttcacatcn

SEQ ID NO: 13122 - DNA, 377 bp, Homo sapiens
  misc_feature 375, 376, 377: n = A,T,C or G
acgcgggtcccttcagagcctctaaagtagaacctttcttgcctcttcccagcttctgagggtggcagcaacccttggtcttcctggcttgaagctatatcgctccaatctctgtttctgtcctcacgtgatgttcactcctgtgtttctgtcttctgtatagtaagtgcaatagtcatattggacccaccatcctccagtatgacctcatcttaatttagctaattacctcagcaaagaccctatttctgaataacagcaaaatatgagatacttggaattggaactttatcttatctttctggggacacaaagcaattcagttcatatcacacacacaccctattcttgtgcaaaaacttgaattttaagtgnnn

SEQ ID NO: 13123 - DNA, 427 bp, Homo sapiens
  misc_feature 426, 427: n = A,T,C or G
accagcactgtggaaaggcttaggtgcaaggaattgtggcctcccgccaatggccagtgaggaactgagatctccagccaatagccttgtgactaagccatcttacaggagaatcattcaggcccatgcaacctttaggtgactgcagccccacccactgtcctaactgctacctcatgagaaaccctgagctagaaccagccaactaaattagaatttctaatttgtaggaataatgagaaaataaatgtttgctctttttaagccactacattttttttgatgtagcaatacataagtaatacaaccacctcctcccattttcatttcagctcaatccaattagatattttcaattttcatgtcaataaaattatatatatataaattacatatatacatatatatacacacacaaacacaaann

SEQ ID NO: 13124 - DNA, 1451 bp, Homo sapiens
  misc_feature 1, 2, 1442, 1443, 1444, 1445, 1446, 1447, 1448, 1449, 1450,1451: n = A,T,C or G
nncgcgtccggctgggttaataatgcttactgcaattatctgatctttatgcatttttaatgagaacacacagccagcagaataatttaatgagggcaggctagcttttaaagctgtgttttcactatgccgaaccatatcaactttctcgctgagaagcagcagtgagaaatgatggagaagatttatttttaacacacttggcccaggagaaggaaaggatatatttgctaaagaattctttctgcccttttccgttttaaatttctgccaggcatgaggaaactgtgcttttttgttaggcctcggaagcatgtgtttacaataaatgtgtaacatttttagaatagttagcaagcactgaagcgaagaaaaaaatctgacttgcctaaccaccaccaccttgaatgttctacaagaaacattactgtccctttaaaagacaaaggttaagtggaaagctatttgttaattgggtaatgtgtgtgttttggggacaataaggtttttaaaaaaggcagggggaacattcttataatctttaaataagaggaagtttcttcagctatcctacttgttttgcaaggagcagtagaactactcaaataagggcaatgccacgtagattcttctagacccactgtttttactttcaaggagaagtgcaggacactagcccagaacttctgacgtcatcccccaactatttctgctgtgtgttcctttattcgagcttgtggagaggaatatttctttatgtcctggccaggaacattctaactccccactggcaggacttaagttatgtctttatattttcgcctgtcttttgtaaattgtaaacctgtcccctcataaatagggcatcttcttgtacctgccacatgtcgggccggtcagcacaggttttctgcagggcttctggctgggctggcaaaaagcagcagggagcagggcaaagctttttttctggcctgactcccccttggtgcagcccagcgctgccacctgggtggatggtccccggggccctattcccagttgctccagagccactatttaggatccaggttgtgccaccaagttcaaggctggttgtgatggtgagaacagctgctttcatagaaaaatcatcatgtcctagcacagatggccccaagcaggggaagtacaatactgcaggctgcaaatccatgtcacaggtggcaaccttggtcacagagatcgggggaagggtaatgtttacaaaggaaccttttaaaaaagattttgactggagcacattggagttctcgggagttcccaaagctaatttgtgtctcctctctgactactcacgtagttttgagcaagtgcctaccttgatttttctgtcttttaatagaattgaatcatacttgctacactttccctcatcatttagcattttgagaccttgaccnnnnnnnnnn

SEQ ID NO: 13125 - DNA, 961 bp, Homo sapiens
ggagtcgacccacgcgtccggttaggacccagagggaaccatggaaaccccagcgcagcttctcttcctcctgctactctggctcccagagaccaccggagaaattgtgttgacgcagtctccaggcaccctgtctttgtctccaggggaaagagccaccctctcctgcagggccagtcagagtgttagcagcagctacttagcctggtatcagcagaaacctggccaggctcccaggctcctcatgtatggtgcatccagcagggccactggcatcccagacagattcagtggcagtgggtctgggacagacttcactctcaccatcaacagactggagcctgatgattttgcagtatattactgtcagcactatggtagctctcctctcacttttggccaggggaccaggcttgagatcaaacgaactgtggctgcaccatctgtcttcatcttcccgccatctgatgagcagttgaaatctggaactgcctctgttgtgtgcctgctgaataacttctatcccagagaggccaaagtacagtggaaggtggataacgccctccaatcgggtaactcccaggagagtgtcacagagcaggacagcaaggacagcacctacagcctcagcagcaccctgacgctgagcaaagcagactacgagaaacacaaagtctacgcctgcgaagttcacccatcaggggcctggaggttcgcccgttcacaaagagctttcaacagggggagagtgtttaggaggggaggaagttgcccccacctgctcctcagttccagcctgaccccctcccatcctttgggcctctgaccctttttccacagggggacctacccctattgcgggtcctcaggctatctttcagctagccccctcctcctcctgggtttaaattatgctaatgttggagggagaatgaataaataaagtgaatttttgcccctg

SEQ ID NO: 13126 - DNA, 300 bp, Homo sapiens
  misc_feature 1, 299, 300: n = A,T,C or G
ngtacaccacaggttaagcatcccaagcagcttatgagtgggtctgctgatatagtctgcaaagtggttagtaggatacacagccctttcttgagtttcaagccctgactgtgagtccctccctgttctccctgctcctagtctctcctagacacttagccaggctgatcccattattctgggtgagtcaaaaagaggtgggtcttttcgagtgtcctgcacaggtagaatagccaggagcttactcactatgctctcactatcctctgtgggaagaatcacaggttgagggaatctcnn

SEQ ID NO: 13127 - DNA, 316 bp, Homo sapiens
  misc_feature 270, 271, 272, 273, 274, 275, 276, 277, 278, 279, 280, 281,282, 283, 284, 285, 286, 287, 288, 289, 290, 291, 292, 293,294, 295, 296, 297, 298, 299, 300, 301, 302, 303, 304, 305,306, 307, 308, 309, 310, 311, 312, 313, 314, 315, 316: n = A,T,C or G
acagcctgcagaactggcccttgtcctctgtcgtctacatcagacctgcctcgtcccatccaagccgatcaccttctgagaggacctggcccccgagctcaggagcaccccagctctcaggacacagcccctcgtggtgggacagcgcctgcacctgcagccctgtagcccctgcacaaggaatttgttgagggaatttgtattttctgctgctttctccttgaacctatttgcattttaaataattaaaacattaaagctgaaaaattnnnnnnnnnnnnnnnnnnnnnnnnnnnnnnnnnnnnnnnnnnnnnnn

SEQ ID NO: 13128 - DNA, 3599 bp, Homo sapiens
  misc_feature 3381, 3392, 3410, 3461, 3477, 3488, 3499, 3521, 3543, 3550,3556, 3564, 3566, 3582: n = A,T,C or G
cagacgctgaactatgtgcccggcattcagattgcctttcctctcaaccaggatctttcaagtcgatgacaagagtgccagtcctgaatcacggcaaagtgcagtagtgaactgcggggttaatgacaccatattctggaaggatctctctatggctgatggtctcagttctggcatcagcctctgactgagaagcaggtctcacacaggaagagtcagatgaggagcaatcctctgcttccgatggagttagttgtgatgagttggtgaggtctggtttttcacactgaactaaaatgatctttcgctgtgtcaagcacaagactgaccccagagacacacatagtgcacctcatagaagcttttaatagtctttatatttactaaagaataggactaactatggaactatgaagatgagctggaaatgacaggtgacttgccagcaggccagagtgtgattttttttggtccctcaatgggaggtgtccattctcccttcggttgtgagaatcagttggttcatttgtgggaaggttgcaggggggatctttgaatcacagccttcagatgccagaagggcagagggaatcccacatggactggtggatcatgtgtgtgcatttctctcccttctaacctgaggaaactaagcatgaaagaatgtgagcacgcagaaaaggagaggcaggtatcagaggcagaggaaaatgggaaattggatatgaaagaaatacacacctacaagtgagttcagaaactgaaccccaccctcctgggaaacgcccattggagtgctgtttttaacctctgtacaatgtttagacccagtaaatgcagaaatagaaacaaatggtcagaagacatatcatgagagagagcgagagagagttcacaaaacagaaaacaaagtaccttaatatttaccagtgaccaaaagatgtgaagtagcaaaacggctcctgaccccattgccagctagactgtgtggaaactcggttcataccagccattctaggggtggggtgagttgttgtcatccttaggaaagtgtgttgttgtagggaatcaaccacatccttcaaaaggactatgcctgtttataagcccagctgtttctgccctgtgaaacacgggaaacatggtttcaacgtgcgcaagcgttgcggcggcgggcagaggactactacagatgcaaaatcaccccttctgcaagaaagcctcttttggccaactggggtccagaactgggcgggcagccggaagcatcgtcattcttcaggattgccctactggccctacctcacagctgaaactttaaaaaaaacaggatgggccaccagccacctcctccaactcaacaacattctataattgataactccctgagcctcaagacaccttccgagtgtgtgctctatccccttccaccctcagctctaccctcagcggatgataatctcaagacacctcccgagtgtctgctcactccccttccaccctcagctctaccctcagcggatgataatctcaagacacctgccgagtgcctgctctatccccttccaccctcagcggatgataatctcaagacacctcccgagtgtctgctcactccccttccaccctcagctccaccctcagcggatgataatctcaagacacctcccgagtgtgtctgctcactccccttccaccctcagcggatgataatctcaagacacctcccgagtgtgtgctcactccccttccaccctcagcggatgataatctcaagacacgtgccgagtgtctgctccatccccttccaccctcagcggatgataatctcaagacaccttccgagcgtcagctcactccccttccaccctcagctccaccctcagcagatgataatatcaagacacctgccgagcgtctgcgggggccgcttccaccctcagcggatgataatctcaagacaccttccgagcgtcagctcactccccttccaccctcagctccaccctcagcagatgataatatcaagacacctgccgagcgtctgcgggggccgcttccaccctcagcggatgataatctcaagacaccttccgagcgtcagctcactccccttccacccgcagctctaccctcagctccaccctcagcggatgataatctcaagacacgtgccgagtgtctgctccatccccttccaccgtcagcggatgataatctcaagacactttccgagcgtcagctcactccccttccaccctcagctccaccctcagcagatgataatatcaagacacctgccgagcgtctgcgggggccgcttccaccctcagcagatgataatctcaagacaccttccgagcgtcagctcactccccttccaccctcagctccaccctcagcagatgataatatcaagacacctgccgagcgtctgcgggggccgcttccaccctcagcggatgataatctcaagacaccttccgagcgtcagctcactccccttccaccctcagctccaccctcagcagatgataatatcaagacacctgccgagcgtctgcggggagcgtctgcgggggccgcttccaccctcagcggatgataatctcaagacaccttccgagcgtcagctcactccccttccaccctcagctccaccctcagcagatgataatatcaagacaccggccgagcgtctgcgggggccgcttccaccctcagcggatgataatctcaagacaccttccgagcgtcagctcactccccttccaccctcagctccaccctcagcagatgataatatcaagacacctgccgagcgtctgcgggggccgcttccaccctcagcggatgataatctcaagacaccttccgagcgtcagctcactccccttccaccctcagctccaccctcagcagatgataatatcaagacacctgccgagcgtgtctgcgggggccgcttccaccctcagcggatgataatctcaagacaccttccgagcgtcagctcactccccttccaccctcagctccaccctcagcagatgataatatcaagacacctgccgagcgtctgtgccgagcgtctgcgggggccgcttccaccctcagcggatgataatctcaagacaccttccgagcgtcagctcactccccttccaccctcagctccaccctcagcagatgataatatcaagacacatgccgagcgtctgcgggggccgcttccaccctcagctccaccctcagcagatgataatatcaagacacctgccgagcgtctgcggggagcttctgcgggggccgcttccaccctcagccgatgataatctcaagacacctcccttagctactcaggaggctgaggcagaccangcaaacccaanaggcagagggcggctganatggaaccacctcccgaacccaagaggcggagggtcggtgacgtggaaccngtcacgcaaacccaanaggcggagggncgctgacgtgnaaccatcatacccgaacccaanaggcggagggtcggtgatgtgnaaccgtnacgccncaagaggngnagggccgctgacgtgnaaccatcatcacccgaa

SEQ ID NO: 13129 - DNA, 424 bp, Homo sapiens
  misc_feature 1, 2, 3, 4, 5, 114: n = A,T,C or G
nnnnnaaagggcccccccggcagggaatttttttttttttttttttttttgcatatgatggtgagctttttaagacttcattgctaatcttctcatctatgtcttctaaagctnttctgcattcttccacctgggattcaatctctgcagggactatggtgtacgcgggtccagaccacatcttgtgccactgtaaaagagaaggatccacacagcactgtcagcccacagactctaacaattggaacagactattgttggacatatgtgaatttgttggcatagtatagtttccccgatgtatgtgtgacttttgaaaacaatctgtttttctcaggatatcttgaattgatcacttcattgccacggtatatattctataggtgtgataggatttactgtaaagtttatttgtaaaagatgt

SEQ ID NO: 13130 - DNA, 1360 bp, Homo sapiens
  misc_feature 1360: n = A,T,C or G
acgcggggtttgtgacgccggctgtgagcgcccgagagtctttttgcctttcagagttaaggcctaactggcctgggaaaataattgctgccttttgcatccgcgttggctccgtcccgcaggatcttcccggttcacggacctggcgatttctgagtgttccggaatcacaataaccctgtttaaagaggaatggagattgccactgtccatttagattaatgaggtgtcctgaagtgatggtgacatcaatgaaaggagggttctgacacgttctcacctcgcgggatggcagctgctgatttgtcccatggattcagtgacctttgacgatgtggctgtggacttcacccaggaggagtggactttactggactcaactcagagaagcctctacagtgacgtgatgctggagaactacaagaacctggccacagtaggaggtcagatcatcaaacccagtctaatctcttggttggaacaagaagagtcaaggacagttcagggaggagttctccaaggatgggaaatgcgacttgaaacccagtggtctatacttcagcaggactttttgaggggtcagacatccattgggatacaattggaaggaaaacacaatggaagggaactctgtgactgtgagcaatgtggagaagtcttcagtgaacactcatgccttaagacgcacgtgagaactcaaagtacagggaacactcatgactgtaatcagtatggaaaagatttccttaccctgtgtgagaaaacctctactggtgagaaactttctgagtttaatcagagtgaaaaaatcttcagcctgacaccaaatattgtataccagagaactagcacacaagaaaagtcatttgaatgtagtcactgtggaaaatccttcattaatgagtcataccttcaggcacatatgagaactcacaatggagaaaaactctacgaatggaggaattatgggccaggttttattgactctacaagcctttctgtgcttatagaaaccctcaatgcaaaaaagccctacaaatgtaaggaatgtggcaaaggctatagatacccagctacctccattattcacatgcgaaccacactggggagaaaacattatgaatgtagcatgtgggaaagccctttcaattattcaactcctttgagaatacttgaagaatccccttgaaaaaaccctatgttttaggaatgtggaaactttacacgaaaacgggccaaaatgctgtacaactccggggaacaccgcttatgttgaagtgaaaaccctacaacccacgcgtttacatataaaaccctgtgacacctgtttttatgcaaaccggtgccacaaatgcatgan

SEQ ID NO: 13131 - DNA, 1514 bp, Homo sapiens
  misc_feature 1, 2, 1514: n = A,T,C or G
nngcaacttcagcctttctcaaaatcggggcacggtcatcgtggagcgctggtggaaggtaccgctggccggggagggccggaagccgcgcctgcaccggcgacatcgcgtctataagctggtggaggacacgaagcatcggcccaaagaaaacctggagctcatcctgacgcagtcggtggagagtaaggcccgggccgaggcgcttcctctcaggctggtccggtttggcatcagctttttctagcccgtccccctcaactatttgccttgctttttctttgtggaaacaatccaactctatatgtgagaagaggaagccataaaaactattgtgattgtgacactggcctccagcattgaaaattaaaacataaaggcaaaattagagaagatccagacccaaggcaggtgaggcgacccaagagtggctgagacaggggaagtcattgtggctgcccacgtagacgagacagtgagatttctaaaaagctgtcgcctggaaggtagggatgaagaacaatgttcaaatgggagctgaaccctgaaatagttgcccgccacttctttaagaatcttggtgttgtggttgccccacatacattaaagttaccagcagagcctatcacacggtggggcgagtattggtgtgaggtgacggtaaatgggcttgatactgtgagagtgcctatgtctgtcgtgaactttgagaagcccaagaccaaaagatataagtactggttagcccagcaagctgccaaggctatggcccccaccagcccccagatctaaatctactctccctccaaggcagcaaagcagaatcgggagcagtggagcagaaacgtgcaagcaccctgatctcactcccagctctgaccaaatacagaattttagagaacatctgaagacatcagactgcactgcgtatacatgttgaattcttcatttttgccatctttaactgtcatcactggggcagggaagtcctgttccagaagtacccaggctgtagatttgataagctagatgcagtagaccgaaaccatccaaaacctgtttagcttcttcctccattggagtttattgggacaaacaggagagccagccattgtctccagtacgcgggtattcaatttaaatgttgctaaccttcctttcccactggctctgtataaaaaacttctggaccaaaagccatcattggaagatttaaaagaactcagtcctcggttggggaagagtttgcaagaagttctagatgatgctgctgatgacattggagatgcgctctgcatacgcttttctatacactgggaccaaaatgatgttgacttaattccaaatgggatctccatacctgtggaccaaaccaacaagagagactatgtttctaagtatattgattacattttcaacgtctctgtaaaagcagtttatgaagaatttcagagaggattttatagagtctgtgagaaggagatacttagacatttctaccctgaagaactaan

SEQ ID NO: 13132 - DNA, 2583 bp, Homo sapiens
  misc_feature 2572, 2573, 2574, 2575, 2576, 2577, 2578, 2579, 2580, 2581,2582, 2583: n = A,T,C or G
ccacgcggggggcttccggaagctcatctcaaaatgctgaactgctctttggaagtcgccggtgctgttgtagttggagtctgttcacgggcctgagcttcgaggccaggctcctgggtgtcgttaatgttcggggccgccgggcgccaaccgatcggagctccagcagccgggaacagctggcatttcagtagaaccatggaggagctggttcatgaccttgtctcagcattggaagagagctcagagcaagctcgaggtggatttgctgaaacaggagaccattctcgaagtatatcttgccctctgaaacgccaggcaaggaaaaggagagggagaaaacggaggtcgtataatgtgcatcacccgtgggagactggtcactgcttaagtgaaggctctgattctagtttagaagaaccaagcaaggactatagagagaatcacaataataataaaaaagatcacagtgactctgatgaccaaatgttagtagcaaagcgcaggccgtcatcaaacttaaataataatgttcgagggaaaagacctctatggcatgagtctgattttgctgtggacaatgttgggaatagaactctgcgcaggaggagaaaggtaaaacgcatggcagtagatctcccacaggacatctctaacaaacggacaatgacccagccacctgagggttgtagagatcaggacatggacagtgatagagcctaccagtatcaagaatttaccaagaacaaagtcaaaaaaagaaagttgaaaataatcagacaaggaccaaaaatccaagatgaaggagtagttttagaaagtgaggaaacgaaccagaccaataaggacaaaatggaatgtgaagagcaaaaagtctcagatgagctcatgagtgaaagtgattccagcagtctcagcagcactgatgctggattgtttaccaatgatgagggaagacaaggtgatgatgaacagagtgactggttctacgaaaaggaatcaggtggagcatgtggtatcactggagttgtgccctggtgggaaaaggaagatcctactgagctagacaaaaatgtaccagatcctgtctttgaaagtatcttaactggttcttttccccttatgtcacacccaagcagaagaggtttccaagctagactcagtcgccttcatggaatgtcttcaaagaatattaaaaaatctggagggactccaacttcaatggtacccattcctggcccagtgggtaacaagagaatggttcatttttccccggattctcatcaccatgaccattggtttagccctggggctaggacagagcatgaccagcatcagcttctgagagataatcgagctgaaagaggacacaagaaaaattgttctgtgagaacagccagcaggcaaacaagcatgcatttaggatccttatgcacgggagatatcaaacggagaagaaaagctgcacctttgcctggacctactactgcaggatttgtaggtgaaaatgcccagccaatcctagaaaataatattggaaaccgaatgcttcagaatatgggctggacgcctgggtcaggccttggacgagatggcaaggggatctctgagccaattcaagccatgcagaggccaaagggattaggacttggatttcctctaccaaaaagtacttccgcaactactacccccaatgcaggaaaatccgcctaagaaaagcaaagaagaaatgttttacagactttattcactatgtcccattgttctaaaatgataacatgacttctgtttttgaagcaaaaatctacattgcctcaaacacatcactctagcttccttactgcatacagtcctgccatagtgagagaaatgggatttcatcacaattcatggtgctaaaatgaaaacctctgcactttaatttttttcagtaatttccagctatttctaggtataaagagcagctcgtttctcttatttattttagtctcatgtgtcaatactttccgatgctttgcttaattcatgtatgtgtgcagtgctgcaatgcccagacaaacgtgagcacacccaccggtttctaaaatggaatagacaggaaaagattgtgttttatatcatccctatctattgtaacccaaaagacctaccatcgcatcagtgaagtccgaacacatctttgtttgaaaggcttgtcaatttcatattccttgaattggcttcttggtgaggattttctgacagagtgatacccatcaattttctatccttagacaatgtagtgtgaagttcacagttgacaaacaacaattaatgtttcccttggatgttttgacaaaaataaacctcatcgttgttatcaccagagtgccctctaccttactttaatgcagattttataaattttacctcatttagaacataaaataattattgaaagaaaaatgtattttttaaattcaccgtgattgaactgtaaattctattaatccagatgtacttctacctctgttttcccaaagattgatattatttttaagatcaactcaagtgtagtaaacggatttaaaannnnnnnnnnnn

SEQ ID NO: 13133 - DNA, 4132 bp, Homo sapiens
gatctgcaagtcctgggagacgcacagctaagatgcccggacatcctggaagctgggaaatggtgatgtgactcttcttcagcctgcaccctccaaaagaggattgtgatgtatcactggacccagcacctagatgacgtgtgattgtgacacatacctctgctcagaatgtgagcgatttgactctcctgcctgggcccagtacacagatgggattgtgacatatcgctggacccagcatgtagatcatgtgaccctatactcttgccttggtgctgtcgcagagggcattgtgacatatcactggtccctgcacccagggaccattgacatttatggatgtggccatagaattctgtctggaggagtggcaatgcctggacattgcacagcagaatttatataggaatgtgatgttagagaactacagaaacctggtcttcctgggtattgctgtctctaagccagacctgatcacctgtctggagcaagaaaaagagccttgggagcctatgaggagacatgaaatggtagccaaacccccagttatgtgttctcattttacccaagacttttggccagagcagcatataaaagatcctttccaaaaagcgacactgagaagatataaaaactgtgaacataaaaatgtacatttaaaaaaagaccataaaagtgtggatgagtgtaaggtgcacagaggaggttataatggatttaaccaatgtttgccagctacccagagcaaaatatttctatttgataaatgtgtgaaagcctttcataaattttcaaattcaaacagacataagataagccatactgaaaaaaaacttttcaaatgcaaagaatgtggcaaatcattttgcatgcttccacatctagctcaacataaaataattcataccagagtgaatttctgcaaatgtgaaaaatgtggaaaagcttttaactgcccttcaatcatcactaaacataagagaattaatactggagagaaaccctacacatgtgaagaatgtggcaaagtctttaattggtcctcacgccttactacacataaaaaaaattatactagatacaaactctacaaatgtgaagaatgtggcaaagcttttaacaagtcctcaatccttactacccataagataattcgcactggagagaaattctacaaatgtaaagaatgtgccaaagcttttaaccaatcctcaaaccttactgaacataagaaaattcatcctggagagaaaccttacaaatgtgaagaatgtggcaaagcctttaactggccctcaactcttactaaacataagagaattcatactggagagaaaccctacacatgtgaagaatgtggcaaagcttttaaccagttctcaaaccttactacacataagagaatccatactgcagagaaattctataaatgtacagaatgtggtgaagcttttagccggtcctcaaaccttactaaacataagaaaattcatactgaaaagaaaccctacaaatgtgaagaatgtggcaaagcttttaagtggtcctcaaagcttactgaacataagttaactcatactggagagaaaccctacaaatgtgaagaatgtggcaaagcctttaactggccctcaacccttactaaacataacagaattcatactggagagaaaccctacaaatgtgaagtatgtggcaaagcctttaaccagttctcaaaccttactacacataagagaattcatactgcagaaaaaccgtacaaatgtgaagaatgtggcaaagcttttagccggtcctcaaaccttactaaacataagaaaattcacattgaaaagaaaccctacaaatgtgaagaatgtggcaaagcttttaagtggtcctcaaagcttactgaacataagataactcatactggagagaaaccctacaaatgtgaagaatgtggcaaagcttttaaccatttctcaatccttaccaaacataagaggattcatactggagagaaaccctacaagtgtgaagaatgtggcaaagcttttacccaatcctcaaaccttactacacataagaaaattcatactggagagaaattctacaaatgtgaagaatgtggcaaagcttttacccaatcttcaaaccttactacacataaaaaaattcatactggaggaaaaccctacaaatgtgaagaatgtggcaaagcttttaaccagttctcaactcttactaaacataagataattcacactgaggagaaaccctacaaatgtgaagaatgtggcaaagcctttaagtggtcctcaacccttactaaacataagataattcatactggagagaaaccctacaaatgtgaagaatgtggcaaagcttttaaactgtcctcaaccctttctacacataagattattcatactggagagaaaccctacaaatgtgaaaaatgtggcaaagcttttaaccgatcctcaaaccttattgaacataagaaaattcatactggagagcaaccctacaaatgtgaagaatgtggcaaagcatttaactattcctcacaccttaatacacataagagaattcatactaaagagcaaccctacaaatgtaaaagaatgtggcaaagctttcaaccaatattcaaaccttactacacataacaaaattcatactggagagaaactctacaaacctgaagatgtgacagtgattttgacaacacctcaaactttttcaaacataaaataaattatactggtgagaaattctagaaatgtaaagaatgtgataaaggctttacatggttgtcacacttgattgtaggtaagataatttacattggagtaaacttctacaagtgtgaagaatgtggcaaaacttttaattaatgctcataccttattgcacaggaaagaatttttacttggaaaaaggtatatacacaaagaatgtggaaaagccattaatatgtgctcatatcttactcaacatcagagagtctgtacttaataaaaccattatagatgcaactagtgtcaaaagatctttcagaaaataaaagcctttaaagtgaagaagataattcattctgaagacaaacattacaaatattaagagggttgtagtaccattacttgcatcacagatcttattgtacacattttgtactaaagaaaaccctgaagcagttgctcaaatactgttcaacatcagaaaatttatattggaaaaaacccctggaaaatgtaataaatttgtaaaaacagttttgaaaaactacagcttataaaacatgagggtctataatgcttggttgatagtacaaagtttattcaacatcagggaatttatattggagaaaaaccctacaaatgtaatcagtttggaaaaacatttttaaaaaaaccacagcatagaaaacaccacagggttcatactaaaatatgtttttgcagatgcagtaaaaatgaaaaaaatttaatccgaaattaagtttatgtaaatatctgagaattcacagtagaaatatctaaggcgcggacacttcagacattacactaaatcagtgctaagtacagaaaacaacacaaaataaaacttggtggataaattatttgtatataacattaaaagaagtagaagattttcagttataattacaattaaagtatacttttatcttgaaaaaattactgatttttaaattagtgaataatgatgtaattaaactctcaaataactttatgctcttttttcattcctgctatattcacatgtgaaagcatgtgaccaattgttgctgcaccaaagatatgagagattcttttattaggtgggcattatttaaaacattttttatggaacagtaaggatattaaagtgtaagatgcagccaggcatggtggctcatgcctgtggtcccagcactttgggaggctgaggccggtggatcacctgaggtcaggagtttgagaccagcctgaccagcatggtgaggccctgtctttactaaaaatacaaaaatttaccaggcacctgtgatcccagctacttcaaaggctgaggcaggagaatcacttgaacctggaaagtggaggtctcagtgagccgaggtcgtgccattgcactccaa

SEQ ID NO: 13134 - DNA, 2844 bp, Homo sapiens
  misc_feature 2824, 2825, 2826, 2827, 2828, 2829, 2830, 2831, 2832, 2833,2834, 2835, 2836, 2837, 2838, 2839, 2840, 2841, 2842, 2843,2844: n = A,T,C or G
gcgtccgcccacgcgtccgcgcattgcaccaggatgactctgaaatggacttcagttcttctgctgatacatctcagttgttactttagctctgggagttgtggaaaagtgctggtgtgggccgcagaatacagccattggatgaatatgaagacaatcctgaaagagcttgttcagagaggtcatgaggtgactgtactggcatcttcagcttccattctttttgatcccaatgatgcatccactcttaaatttgaagtttatcctacatctttaactaaaactgaatttgagaatatcatcatgcaacaggttaagagatggtcagacattcgaaaagatagcttttggttatatttttcacaagaacaagaaatcctgtgggaattatatgacatatttagaaacttctgtaaagatgtagtttcaaataagaaagttatgaaaaaactacaagagtcaagatttgacatcgtttttgcagatgctgtttttccctgtggtgagctgctggctgcgctacttaacataccgtttgtgtacagtctccgcttcactcctggctacacaattgaaaggcacagtggaggactgattttccctccttcctacatacctattgttatgtcaaaattaagtgatcaaatgactttcatggagagggtaaaaaatatgatctatgtgctttattttgacttttggttccaaatgtctgatatgaagaagtgggatcagttttacagtgaagttttaggaagacccactaccttatttgagacaatgggaaaagctgacatatggcttatgcgaaactcctggagttttcaatttcctcatccattcttaccaaacgttgattttgttggaggattccactgcaaacctgccaaacccctacctaaggaaatggaggagtttgtacagagctctggagaaaatggtgttgtggtgttttctctggggtcagtgataagtaacatgacagcagaaagggccaacgtaattgcaacagcccttgccaagatcccacaaaaggttctgtggagatttgatgggaataaaccagatgccttaggtctcaatactcggctgtataagtggataccccagaatgaccttctaggtcttccaaaaaccagagcttttataactcatggtggagccaatggcatctatgaggcaatctaccatgggatccctatggtaggcattccattgttttgggatcaacctgataacattgctcacatgaaggccaagggagcagctgttagactggacttccacacaatgtcgagtacagacctgctgaatgcactgaagacagtaattaatgatccttcatataaagagaatattatgaaattatcaagaattcaacatgatcaaccagtgaagcccctggatcgagcagtcttctggattgaatttgtcatgcgccacaaaggagccaaacatcttcgagttgcagcccacaacctcacctggttccagtaccactctttggatgtgattgggttcctgctggcttgtgtggcaaccgtgctatttatcatcacaaagtgttgtctgttttgtttctggaagtttgctagaaaaggaaagaagggaaaaagggattagttatatctgagatttgaagctggggaattccgtttattgaagattcaggttaacctgaatcaagttaacccagtctcaaatgctcacttatcctatctccttggcacaaatctctcctctcctggattgccaaagaaaattcaaattattcttcaattagtcaggatgatttgactatcagcagttcatagtacccatcttcataactaagccacctagggatccggcagaaaaaaaagggatgcaggggagtcatcatacagggggtggatcatttaccaggatccacacttcctacaaagcggttgtaatattaaataacaaaactgttttttattccaatcttcacataaaacaggaataattgtatactttcttactaatgtgttccatggagtttttcctccaagaagtggcttaggggaaaatgagccccagtaatgctttgtggcatccaatccttctaccccgaccctttgactttctgccccagcccctcttagttctcctagaattaggactaaggttaagtgccctcttgggatatgacttccttcccttcctcttgatacaaaaagagcctattaccaaccctcatacacacaagagttcccttcctagttgcagactcttctgctccagctggactcccctagctctggactcccactagatcacacaggggtccctgcatgtcagtaaactttggatgaccttgggagaccaaaaaatggaatatcattttttgatctaaacaaaatagtttcctgatttaacactggccaggaaggtgggctgcaccctcagtctctctctcccatcatggttttcacatgatatcaaaggactctcataacagtctgattcttatgagttgggcatcctgtgtttccctttaggggcctgcttccttcaaatagaggagatgggtgctatgaaacctattcactctggacttgggatggctcttctccatcttcccaagtctgagctggagcctccatgcccaactctgctctgctcttctatttcctgacagcagctaaggcatgttcctgttctgcccccaaattgaccttactaacagtgagaacttggaggagtcttcgggtcttgggaaatccaagttttcccggaaacgttttgttgtaaacagtgtccacactctttgctccaataaagctcggttccttaagggaannnnnnnnnnnnnnnnnnnnn

SEQ ID NO: 13135 - DNA, 507 bp, Homo sapiens
  misc_feature 507: n = A,T,C or G
acctaaaaacagaggtcagcgggccagagtttaagagaaaaagagaggggaaaaaagagcaggaaatccttgaaaggagctataataaaggacagagaatataaaggataaaaatggattccaaggaggaaaaagaatgggaggaatgtttattgaccatctgctgttgccaggcactagcctagggcttttccatatgttatctaatcttagaacccagttagatgaacaaccactatcaatattcccattttacagatggggaaactgggtttcagggggataaagtgacttccccaaggtcacagaaagcagcagtttgagctgaggcctgtgtgacccccagccaacaagtcatccatcgtcttgagggctagtccctcattcctggccatggtttgtagtcctagatgagagccgcacttgagatcttgagatttgacagatacttggagatcatactccaaggaatatggccattcctttgctgggaggcaattgctgtgn

SEQ ID NO: 13136 - DNA, 194 bp, Homo sapiens
acgcgggggaaaatgctctgtgcagaagaagagcagagtaggacgtgctgggtgaccgcgattagattgcttaagagaagtatatcagagaattccctggtagcaatggacttctcaggccagaaaagcagagttatagaaaatcccactgaagccctttcagttgcggttgaagaaggactcgcttggagggt

SEQ ID NO: 13137 - DNA, 457 bp, Homo sapiens
  misc_feature 456, 457: n = A,T,C or G
acacacacacgcacacacacacacacacacacaaacgtgtgtatgcacctaccttcatacttgcctaaactgtgtgcaatacagtctggatttttctattatattctctagttgtgttgtgtttataagctggatataatccactaaagtgattcacgacacactagttgattgtgaccttcagtttgaaaaattctattacagaatcaagagaccagggtgtgaatagatttaacatcttagaattctgttagataaatgagcgcatatgcaacattattttaaagatctatggctgaatggtttactttattctaaaatatccataaagatagaccaacaaaattcaatttttatagacaggcaaaatctactgggcttagccaaaggtcgcagtgttatagatacagaccaacacgacacttatttattactattgcctgtcaaaatcttacnn

SEQ ID NO: 13138 - DNA, 3470 bp, Homo sapiens
acaatttacgtcctaagggggggctactctaattatcccattcaaatggaatttttttcaaaattggatagaaggaattgaagagttgtaagtagtgattagtctgctaatcagttcttcagatgagatattgaatggtaacactctgagcttaaaactcagcagtgtgtctgtgacctccacgcaaatcagaggaagcaatgcatccacgctgagcctcaccatgtcttcctcccaactctcttcatactctctgtgtcttccagctcttctttctctggccggctctctttcctcttctctctgcatatgtgagaacgcctgggcatcctgggtaacagcagccccagctgccctctcctgttccctgttccaagtcccctgcactgacctttcttgagtctctctggctctgtgcatgtctttgggactctcctcatctggcttttcctctgtgtgtgcctctctgtttgcttatgtctctggctctgtcttccccacccctcccctcacacacacacatactcccaaatgtaaggctctgtggcaggttggaatcggagtaaggcttgagattcactgagttctgtaggtagggaaagaagtcaagggagtggaggttctataaggaattaacagctgaggacggaagggtttgtttcccgtttgaacctaaacgcaagtggaaaagaatactcagaatgtatttttctactttacatctgctggggaaggaaatgtgtcaggaagccgctgcatctggtcatttcatcgcatcagaatcacagcagacgtggaagattccatgtggtggggaataaagaaataactttatgctctcctgaaaaacagcgggagcctatgtgtgtgtgcgacactgtaatctcaaggagattcactcagagctgtctcagtccaactcctgcatgaccagatcttcccttagcatcttttctgtgatgaaatattatcttgtgttagagttaggaataggaactaacctgtaggagcatgtccccaaatggacatttgaatggactaacaaaaacaactggaaagactgaatttccgacacaaaggaatgatgggatcaaaaagaaagcagtgaggagttcttgagtcttgtagtacctattcttattttaacttgcttcatccttgatctacctgagacactaagaaggaaattagttttccaagagctctttgaacctgtctaggactgtagttaaacctatttgccctatgggggttcttcacactcgaaaaactatttccttatcaccaacgacccacccagaaaggccaatgaggccaaatgtaacaatttttaacatttaaatataactattaaaattgcattaattgtgaacagtgaattaaagggttgtcttctccaggagacagtatgtggcacttttcgtaaatttcatttaatatataaaaatttaaatcactcactgcaacatgcatttaaaatcttccaagaaggtagaggtatcattttctgttttgctttgttttaaaacagttgcctcaagcttctgtcttaagagtagtgacttagaatccagatatcttttgttttagaaaaacaagcaaaactatgttgcaagactgacagttgtaatgtttatttgccacagatcaaaggttcacaaagtatatcaaatttacatctacttggggtaccttgatagattattattgtttttcttttatctttcccttcaggaatttggaaactcgttgtcactttttttaattttaaaaatactaaattgtaatagttttcttttgccaaatgtgtgcgtacatattcaaagcaatgaaactatttcaagccatacaaccacaggggtgggaacccttttcacaaattttaatgtgtttgtatgtaaatagatgtttgtatgaaatattttcatgatagaatgaatatatttaaatgaagttgaattattccagtgctacttaaacacattacaaaaattttggtgagaattatctgagtctattgagatgtaatgcagatcaattttgatttttaaaaatcaaaagcctacaataactctgactctcagcaacttcctcggcgttgttgcacctgacgtggagagagctcgtaggcttccccagtgcctcagccgcttcctggtggaagttaggtgctaatggaggtgtgttcaccttttagtgatatcactgcaggcctttgaggggcctgagagtgaatcagaggcattagagacaccggtgcagttatctggagcacaatttctttgcagggcagcagaatcagaagccagacttggccatgtgaacctcgaaactcggtttcccggccgccatcaaccgccacccttactgcctagtcacacacgtcagggaggctgccctcagtggagttggggttgagaccccagggtgggacttcacagttttgccagcaatctctaccttctgacttctgcctcgcagagaggaaggagaggggagcatctggcaaggggcccatttctcagcacagtacatttcctgtctcagctctggaagactatgcacccaagcaccaaacttccaaccagagagagagacgtcctccgataacaaaaatccttgcttcctctgtctgtgactttacacacagttgttcaaagttgttaaatgtcaagagtcaatcacatccctaggacatacctcccaactctcctgactcttatgttattgaaaaaacaaacaaacaaaaactcctttatgatgatattcaacttgagtggggttttttttccactttggtcctggatataatgaaatgatacatattaggataaattttcactgtgtatagtagcaatacgaacacacatgccaatgtatcaacatatctacttggttacattttggtttatgataattaaccttgattcatgtattgggaagctacagggactacgtaatacctgcttatcacataggaaaattatgtccatgattctgagctcccttcttcaaaagtttcctcctgggtgttctatgttctctctttatcctgaaatacatttattaggttgtgaggtatgttgaagaagtagaagccaggggtatgctttcagcatttattgcaaccaaaagttaaccccatcacggttaacgagcatctttggtctcttgtggaatttgaactaaaactatgagccttattcaatatctataattctatgatttttttaaattatgggaaattaatgaaagatgtttacatgaataatgtttgcccttactgtgttatgaatgagttttttgtagtgtgtctgggtgcatgatgcaagagagtaggaaaaatgtttctgaaacaaaacttgacaaatatttgtaatgaaagtaaatttaaagattgctataattgcgctatagaaacaatgcaagtattaaacaaaatatacaatcaaaaaaaaaaaaaaaaaaag

SEQ ID NO: 13139 - DNA, 430 bp, Homo sapiens
  misc_feature 1, 2, 396, 420, 421, 422, 423, 424, 425, 426, 427, 428, 429,430: n = A,T,C or G
nngcgggggtgtgtgtgcgtgcgtgtgtgtgtgtgtagctctcgctctttccctcagtctgtgcctcttgtgtgtgtgtgtgtgtgacagagagagagcgagagagagagcgcgagaggagagagagcgagaaagagagagagagagagcgagagagcgagctgtgagctgtgctgccccctctgccctttgatcccgacattagtgttaggggctcggacacacagagcgcggacatagacaccgccgcaccggctctcatttatatatacctcctatcacacacgcgagcatgggacacacacacactcacacctattagatgcgtttccattgaagaatattacgctcggagacaagccgggcgcgcgatcaaaagaaaaaaataaaaaaaanttcccccccccccctttaaaaaannnnnnnnnnn

SEQ ID NO: 13140 - DNA, 5767 bp, Homo sapiens
  misc_feature 5764, 5765, 5766, 5767: n = A,T,C or G
cgacccacgcgtccgtgccggggaagtttgtgtctccacgaatcccctcagtgctccccagccccgcgcgctccggccgttcccgccgtccccgcctgtggctgccccctgcccaaccccgcgatgtgaccctacagccgaaagccgccgctgccgacccgggggctccgcagcccctgccgccgccgccgccgccttcaccgccgccgcgttgggatttttcgtcgccgccgcccgcggcggaggaggaggcggcgataaagttggtgtgctggtcccgcgcgcagattgggggcgtcactgcgggccccggtccgagggggggtgtcggcgttggagttgtgaattcgctgcgtttccatgaaatcctgcggagtgtcgctcgctaccgccgccgctgccgccgccgctttcggtgatgaggaaaagaaaatggcggcgggaaaagcgagcggcgagagcgaggaggcgtcccccagcctgacagccgaggagagggaggcgctcggcggactggacagccgcctctttgggttcgtgagatttcatgaagatggcgccaggacgaaggccctactgggcaaggctgttcgctgctatgaatctctaatcttaaaagctgaaggaaaagtggagtctgatttcttttgtcaattaggtcacttcaacctcttattggaagattatccaaaagcattatctgcataccagaggtactacagtttacagtctgactactggaagaatgctgcctttttatatggtcttggtttggtctacttccattataatgcatttcagtgggcaattaaagcatttcaggaggtgctttatgttgatcccagcttttgtcgagccaaggaaattcatttacgagttgggcttatgttcaaagtgaacacagactatgagtctagtttaaagcattttcagttagctttggttgactgtaatccctgcactttgtccaatgctgaaattcaatttcacattgcccacttatatgaaacccagaggaaatatcattctgcaaaagaagcttatgaacaacttttgcagacagagaatctttctgcacaagtaaaagcaactgtcttacaacagttaggttggatgcatcacactgtagatctcctgggagataaagccaccaaggaaagctatgctattcagtatctccaaaagtccttggaagcagatcctaattctggccagtcctggtatttcctcggaaggtgctattcaagtattgggaaagttcaggatgcctttatatcttacaggcagtctattgataaatcagaagcaagtgcagatacatggtgttcaataggtgtgctatatcagcagcaaaatcagcccatggatgctttacaggcctatatttgtgctgtacaattggaccatggccatgctgcagcctggatggacctaggcactctctatgaatcctgcaaccagcctcaggatgccattaaatgctacttaaatgcaactagaagcaaaagttgtagtaatacctctgcacttgcagcacgaattaagtatttacaggctcagttgtgtaaccttccacaaggtagtctacagaataaaactaaattacttcctagtattgaggaggcgtggagcctaccaattcccgcagagcttacctccaggcagggtgccatgaacacagcacagcagaatacttctgacaattggagtggtggacatgctgtgtcacatcctccagtacagcaacaagctcattcatggtgtttgacaccacagaaattacagcatttggaacagctccgcgcaaatagaaataatttaaatccagcacagaaactgatgctggaacagctggaaagtcagtttgtcttaatgcaacaacaccaaatgagaccaacaggagttgcacaggtacgatctactggaattcctaatgggccaacagctgactcatcactgcctacaaactcagtctctggccagcagccacagcttgctctgaccagagtgcctagcgtctctcagcctggagtccgtcctgcctgccctgggcagcctttggccaatggacccttttctgcaggccatgttccctgtagcacatcaagaacgctgggaagtacagacactattttgataggcaataatcatataacaggaaatggaagtaatggaaacgtgccttacctgcagcgaaacgcactcactctacctcataaccgcacaaacctgaccagcagcgcaaaggagccgtggaaaaaccaactatctaactccactcaggggcttcacaaaggtcagagttcacattcggcaggtcctaatggtgaacgacctctctcttccactgggccttcccagcatctccaggcagctggctctggtattcagaatcagaacggacatcccaccctgcctagcaattcagtaacacagggggctgctctcaatcacctctcctctcacactgctacctcaggtggacaacaaggcattaccttaaccaaagagagcaagccttcaggaaacatattgacggtgcctgaaacaagcaggcacactggagagacacctaacagcactgccagtgtcgagggacttcctaatcatgtccatcagatgacggcagatgctgtttgcagtcctagccatggagattctaagtcaccaggtttactaagttcagacaatcctcagctctctgccttgttgatgggaaaagccaataacaatgtgggtactggaacctgtgacaaagtcaataacatccacccagctgttcatacaaagactgataactctgttgcctcttcaccatcttcagccatttcaacagcaacaccttctccaaaatccactgagcagacaaccacaaacagtgttaccagccttaacagccctcacagtgggctacacacaattaatggagaagggatggaagaatctcagagccccatgaaaacagatctgcttctggttaaccacaaacctagtccacagatcataccatcaatgtctgtgtccatataccccagctcagcagaagttctgaaggcatgcaggaatctaggtaaaaatggcttatctaacagtagcattttgttggataaatgtccacctccaagaccaccatcttcaccataccctcccttgccaaaggacaagttgaatccacctacacctagtatttacttggaaaataaacgtgatgctttctttcctccattacatcaattttgtacaaatccgaacaaccctgttacagtaatacgtggccttgctggagctcttaagttagacctgggacttttctctactaaaactttggtggaagctaacaatgaacatatggtagaagtgaggacacagttgttgcagccagcagatgaaaactgggatcccactggaacaaagaaaatctggcattgtgaaagtaatagatctcatactacaattgctaaatatgcacagtaccaggcctcctcattccaggaatcattgagagaagaaaatgaaaaaagaagtcatcataaagaccactcagatagtgaatctacatcgtcagataattctgggaggaggaggaaaggaccctttaaaaccataaagtttgggaccaatattgacctatctgatgacaaaaagtggaagttgcagctacatgagctgactaaacttcctgcttttgtgcgtgtcgtatcagcaggaaatcttctaagccatgttggtcataccatattgggcatgaacacagttcaactatacatgaaagttccagggagcagaacaccaggtcatcaggaaaataacaacttctgttcagttaacataaatattggcccaggtgactgtgaatggtttgttgttcctgaaggttactggggtgttctgaatgacttctgtgaaaaaaataatttgaatttcctaatgggttcttggtggcccaatcttgaagatctttatgaagcaaatgttccagtgtataggtttattcagcgacctggagatttggtctggataaatgcaggcactgttcattgggttcaggctattggctggtgcaacaacattgcttggaatgttggtccacttacagcctgccagtataaattggcagtggaacggtacgaatggaacaaattgcaaagtgtgaagtcaatagtacccatggttcatctttcctggaatatggcacgaaatatcaaggtctcagatccaaagctttttgaaatgattaagtattgtcttctaagaactctgaagcaatgtcagacattgagggaagctctcattgctgcaggaaaagagattatatggcatgggcggacaaaagaagaaccagctcattactgtagcatttgtgaagtggaggtttttgatctgctttttgtcactaatgagagtaattcacgaaagacctacatagtacattgccaagattgtgcacgaaaaacaagcggaaacttggaaaactttgtggtgctagaacagtacaaaatggaggacctgatgcaagtctatgaccaatttacattagctcctccattaccatccgcctcatcttgatattgttccatggacattaaatgagaccttttctgctattcaggaaataacccagttctgcaccactggtttttgtagctatctcgtaaggctgctggctgaaaactgtgtctatgcaaccttccaagtgcggagtgtcaaccaactggacgggagagagtactgctcctactccaggactctcacaaagctgatgagctgtacttcagaaaaaaataataatttccatgttttgtatatatctgacaaaactggcaacatcttacagactactgacttgaagacaacctcttttatatttctctatttctgggctgatgaatttgttttcatctgtcttttcccccttcagaattttccttggaaaaaaaatactagcctagctggtcatttctttgtaaggtagttagcaattttaagtctttctttggtcaacttttttttaatgtgaaaagttaggtaagacacttttttactgcttttatgtttttctgtcttgttttgagaccatgatggttacacttttggttcctaaataaaatttaaaaaattaacagccaagtcacaaaggtaatggattgcacatagactaaggaataaacttcagatttgtgatttttgtttctaatcttgatgtaaatttacactatttataaatacatatttattgcttgaaaatatttgtgaatggaatgctgttattttttccagatttacctgccattgaaattttaaggagttctgtaatttcaaacactactcctattacattttctatgtgtaaataaaactgcttagcattgtacagaaacttttattaaaattgtttaatgtttaaagagtttctattgtttgagttttaaaaaagactttatgtacagtgcccagtttttgttcatttttgaaatctgattatatatattttatatatacttatgtatgtatatataatatatatagaaatctggatatatatgtataaatctttagaacttaaatttttctcgttttaagtttcacatctatggtagatttttgaggtgtctactgtaaagtattgcttacaaaaagtatgattatttttaaagaaatatatatggtatgtatcctcaagacctaaaatgtcagactggtttattgttaagttgcaattactgcaatgacagaccaataaacaattgctgccaaaatgtagtannnn

SEQ ID NO: 13141 - DNA, 3497 bp, Homo sapiens
  misc_feature 3178: n = A,T,C or G
acgcgggtggttggatctcagctggaagttctgtttggagcccatttctgtgagaccctgtatttcaaatttgcagctgaaaggtgcttgtacgcggggaggcgattactgggcaggctcagtctttcgcctcagtctcgagctctcgctggccttcgggtgtacgtgctccgggatcttcagcacccgcggccgccatcgccgtcgcttggcttcttctggactcatctgcgccacttgtccgcttcacactccgccgccatcatggtgaagctcgcgaaggcaggtaaaaatcaaggtgaccccaagaaaatggctcctcctccaaaggaggtagaagaagatagtgaagatgaggaaatgtcagaagatgaagaagatgatagcagtggagaagaggtcgtcatacctcagaagaaaggcaagaaggctgctgcaacctcagcaaagaaggtggtcgtttccccaacaaaaaaggttgcagttgccacaccagccaagaaagcagctgtcactccaggcaaaaaggcagcagcaacacctgccaagaagacagttacaccagccaaagcagttaccacacctggcaagaagggagccacaccaggcaaagcattggtagcaactcctggtaagaagggtgctgccatcccagccaagggggcaaagaatggcaagaatgccaagaaggaagacagtgatgaagaggaggatgatgacagtgaggaggatgaggaggatgacgaggacgaggatgaggatgaagatgaaattgaaccagcagcgatgaaagcagcagctgctgcccctgcctcagaggatgaggacgatgaggatgacgaagatgatgaggatgacgatgacgatgaggaagatgactctgaagaagaagctatggagactacaccagccaaaggaaagaaagctgcaaaagttgttcctgtgaaagccaagaacgtggctgaggatgaagatgaagaagaggatgatgaggacgaggatgacgacgacgacgaagatgatgaagatgatgatgatgaagatgatgaggaggaggaagaagaggaggaggaagagcctgtcaaagaagcacctggaaaacgaaagaaggaaatggccaaacagaaagcagctcctgaagccaagaaacagaaagtggaaggcacagaaccgactacggctttcaatctctttgttggaaacctaaactttaacaaatctgctcctgaattaaaaactggtatcagcgatgtttttgctaaaaatgatcttgctgttgtggatgtcagaattggtatgactaggaaatttggttatgtggattttgaatctgctgaagacctggagaaagcgttggaactcactggtttgaaagtctttggcaatgaaattaaactagagaaaccaaaaggaaaagacagtaagaaagagcgagatgcgagaacacttttggctaaaaatctcccttacaaagtcactcaggatgaattgaaagaagtgtttgaagatgctgcggagatcagattagtcagcaaggatgggaaaagtaaagggattgcttatattgaatttaagacagaagctgatgcagagaaaacctttgaagaaaagcagggaacagagatcgatgggcgatctatttccctgtactatactggagagaaaggtcaaaatcaagactatagaggtggaaagaatagcacttggagtggtgaatcaaaaactctggttttaagcaacctctcctacagtgcaacagaagaaactcttcaggaagtatttgagaaagcaacttttatcaaagtaccccagaaccaaaatggcaaatctaaagggtatgcatttatagagtttgcttcattcgaagacgctaaagaagctttaaattcctgtaataaaagggaaattgagggcagagcaatcaggctggagttgcaaggacccaggggatcacctaatgccagaagccagccatccaaaactctgtttgtcaaaggcctgtctgaggataccactgaagagacattaaaggagtcatttgacggctccgttcgggcaaggatagttactgaccgggaaactgggtcctccaaagggtttggttttgtagacttcaacagtgaggaggatgccaaaagctgccaaggaggccatggaagacggtgaaattgatggaaataaagttaccttggactgggccaaacctaagggtgaaggtggcttcgggggtcgtggtggaggcagaggcggctttggaggacgaggtggtggtagaggaggccgaggaggatttggtggcagaggccggggaggctttggagggcgaggaggcttccgaggaggcagaggaggaggaggtgaccacaagccacaaggaaagaagacgaagtttgaatagcttctgtccctctgctttcccttttccatttgaaagaaaggactctggggtttttactgttacctgatcaatgacagagccttctgaggacattccaagacagtatacagtcctgtggtctccttggaaatccgtctagttaacatttcaagggcaataccgtgttggttttgactggatattcatataaactttttaaagagttgagtgatagagctaacccttatctgtaagttttgaatttatattgtttcatcccatgtacaaaaccattttttcctacaaatagtttgggttttgttgttgtttctttttttgtttgttttgtttttttttttttggcgttcgtggggttgtaaaagaaaaaaaagcagaatgttttatcatggtttttgcttcaacggctttagcgacaaattaaaagtcaactctggtgccagacgtgttacttcctaaagagtgtttccccttggaatgtcactggagagcatggcaaagccagctctgccacttgcttcacccatcccaattggaaatggcttagtgcgtgtttccagtatcccagccctaactaactgtggttgaaatgctggtgaggggacctgctcctgcagcccgtgggtgctgacttgaaggctgctgcagcttctcctacttttagcaggtctgaggattatgtcctgaagaccactctggaaagaggtgcaggaacagattagtcaggtttcctaggacaaggaagagcttcagggaagagcagtggtaactcctgtaatcccnaacacttggggaggccgaggcaggcagatcaactgaggtccggagttgagacagctggcaacttgttgaaaagcccatctttattaaaattccaaaaatttagtgcgctgggggtgttaccgtatccagctatcagggcgagggtggttcttgtacgcggaacatggtgggctccttttttccgcggtgcaacggatccttccaaaagtggtaaaagcctttttaccggctttgctgcggggaagcacctccaccacattttcctttttcttctgtctccctctaaagagggatttctgcatccatccgttattttttc

SEQ ID NO: 13142 - DNA, 1414 bp, Homo sapiens
  misc_feature 1412, 1413, 1414: n = A,T,C or G
ccgggcaggcgagggagagacgtagacgacatagggctgtttctgaagggagcagaaagtggttcctgcataagaacacttaggaggacaaggaaggagacttctcggtgtgcaggaactgtaaaagacatgtagtctctgccaacttcaccctccatgaggcttactgcctgcggttcctggtcctgtgtccggagtgtgaggagcctgtccccaaggaaaccatggaggagcactgcaagcttgagcaccagcaggttgggtgtacgatgtgtcagcagagcatgcagaagtcctcgctggagtttcataaggccaatgagtgccaggagcgccctgttgagtgtaagttctgcaaactggacatgcagctcagcaagctggagctccacgagtcctactgtggcagccggacagagctctgccaaggctgtggccagttcatcatgcaccgcatgctcgcccagcacagagatgtctgtcggagtgaacaggcccagctcgggaaaggggaaagaatttcagctcctgaaagggaaatctactgtcattattgcaaccaaatgattccagaaaataagtatttccaccatatgggtaaatgttgtccagactcagagtttaagaaacactttcctgttggaaatccagaaattcttccttcatctcttccaagtcaagctgctgaaaatcaaacttccacgatggagaaagatgttcgtccaaagacaagaagtataaacagatttcctcttcattctgaaagttcatcaaagaaagcaccaagaagcaaaaacaaaaccttggatccacttttgatgtcagagcccaagcccaggaccagctcccctagaggagataaagcagcctatgacattctgaggagatgttctcagtgtggcatcctgcttcccctgccgatcctaaatcaacatcaggagaaatgccggtggttagcttcatcaaaaggaaaacaagtgagaaatttcagctagatttggaaaaggaaaggtactacaaattcaaaagatttcacttttaacactggcattcctgcctacttgctgtggtggtcttgtgaaaggtgatgggttttattcgttgggctttaaaagaaaaggtttggcagaactaaaaacaaaactcacgtatcatctcaatagatacagaaaaggcttttgataaaattcaacttgacttcatgttaaaaaccctcaacaaaccaggcgtcgaaggaacatacctcaaaataataagagccatctatgacaaaaccacagccaacatcatactgaatgagcaaaagctggagcattactcttgagaagtagaacaaggcacttcagtcctattcaacatagtactggaagtctcgccacagcaatcaggcaagagaaagaagtaaaaggcannn

SEQ ID NO: 13143 - DNA, 338 bp, Homo sapiens
ccgggcaggtactgtggctgatttggcactcaaactacaatataaagtcattcctactcttctctcccctttctacaggcagagaagcctctccctgtatccaccaccaccactgatccatagggagttctgccaggccaccactgatattcccctaaagcccaagtgctcttcagccagcttttggtaaacgttgtcagtccggggactcacccttcagaacagtgggctcccctttggtccaaggcaggttcataaatgctgtccaagagcctaagcctggacttggggaccctaaaagcctgtttgttgctctaccccactctggacaagctggt

SEQ ID NO: 13144 - DNA, 243 bp, Homo sapiens
  misc_feature 1, 2, 3, 4, 5, 210, 217, 222, 238, 239, 240, 241, 242, 243: n = A,T,C or G
nnnnncctcagtggatgcctttcggggccaggcggaagcccggctccgggccagcatccgagagcccggactggagagtcaacttttataacactgttactgggaatacttgacttactaagcttttactgaacactttactgaacactttaattttgggagtacaatttctaaactcacgaaataatcttcatgcaacaagatgttatnttatcanatttnggtattacatgctcannnnnn

SEQ ID NO: 13145 - DNA, 285 bp, Homo sapiens
acctgggcatgtcctgtgatggccccttcaaactggatgactaccactactgagaaccaggcctgcccttcacctaccagctgctgtccttgccctggccctgcctcccctaagagcaaatgacaccaactttgtgattgttttcagtgtcccccattgactccctggggctggtcacttaggttttggcctctactgcatccctcatactgttgcaagtgtggcagggggaattgaaaagcccccccccctcaagctctggtcatgatgaaggtacctgcccgg

SEQ ID NO: 13146 - DNA, 907 bp, Homo sapiens
  misc_feature 907: n = A,T,C or G
gtccggcagaggatgcagtgaacagagatcgtaccactacactccagcctgggtgacagagtgagaccccatctcaaaaaaaaaaaaaatgaattatgtaaatgggtttacaagggttatctttcctttgcagacccagaagtccacattcccctcgagaatctacagcagtttcctgccttcaattcttatacctgctcctctgattctgctttgggtcccaccagcaccgagggccatggggccctctccatttctcctctcagcagaagtccaggttcccatgcaggtaaacaggtgaaatttaatgaattcacccatcagttagaccttatgcaaagctttggtgtctgagtttacaaccccggcccactcagcatggtgtggacttcaggggcataaccttactttggtagtcctgaggtacatcaaattcttttattcatctttcccacttgctatactgactgctttaccctgccagcttctaagcacctcaaggagctctttaggcaggatagttgaaaatggagtcttccctttgacccacctatttttgtttctagtttttgtttgagatactcccctgtatgcctaaacatctttgtacatgtctctttattgtagcatcgttttaatagctcaaaaaaaaaaaaacagtttagaaagcctaccaataagaaaatgactaaattatagtatttatactgtaaaatgtttcacaccagaaggccgggcgtggtggcttatgcctgtaatcccagcactttgggaggccaaggcgggtggatcacgaggtcaggaattcaagaccagcctgaccaacacagtgaaaccctatctctactgaaaatacaaaaattagcagggcatggtggcaggcgcctgtagtcccagctacttgggn

SEQ ID NO: 13147 - DNA, 553 bp, Homo sapiens
  misc_feature 553: n = A,T,C or G
acttttttttttttttttttttttttactttttttctacagatggggtctcactatattgcccaggctattttggaactcctgggctcacatgatcgtcctgccttggcctcccaaagtgctggacttacaggcacgagctgacatgcctggcctgatatgtcagttttcagtggttgtcagggtttctttgttttctcctctgtcctaggcacttgtcactaggaaagtgcctaatgactccatcaggtgtggcatttattattgttgcaacagggaattgataagagaaaagaaggctatctgggggatgagttagccaagaagtggaaaaagacagctgttattaggttgctgtcaaaatagcttgctttaactctctggcatgtatcactccagggaatgaaataatccaagaatgataagctctcaattgccatctgttggtttgtgatgctgcttgccttgttctagttaacattgaacactgacctcacatggcacttgcagaaacttagaggaggataagatgatcatagggtgtaaagcaaacn

SEQ ID NO: 13148 - DNA, 145 bp, Homo sapiens
  misc_feature 1, 2, 3, 4: n = A,T,C or G
nnnngcctgtgccgcctccccctaactctgtgctgcctgagcatgcagaacccttgaggggagagattctgacacaagtcagttagaaagggctaccaaccttagccagcctggccctgcaggagccacccctcactaggcctgt

SEQ ID NO: 13149 - DNA, 282 bp, Homo sapiens
actttttttttttttttttttttgtatactttctgagcttccctgagaaactcacttaggagacagtcttcccaattgtctgtcttttgtaacttttttgaaatgtctggccaacttttagtgacaaattggagtttcaacattccttgcccaaggggatcatccaaatcgaggcctgcatattacctcatttgctccctcagtctgtctaggaatctcataggcccttcatccttttcctgttgtatatcaaatgctttagaaagatttggggttcagggt

SEQ ID NO: 13150 - DNA, 419 bp, Homo sapiens
  misc_feature 417, 418, 419: n = A,T,C or G
acttttttttttttttttttttttgcttatccattcaccagttgacggacatttgaggtgtttccaaattttggctgtaaactgtttatattttgagcccatttcattttttgcttccaaagaggctggttgacctaaaacacactgcagtttttcctgaaaaatctgtgctggagtcatacggagtggtagattcagactctttttcttggacctcatgaaattgctatcacgtttacagaacagctggaaagccacaccaattgaaacagacgtcttccagtctccaagtttatattgccaaccacacagcctctggaaccaggccaccaattaatagtaattcaagcgcatattcaactgtccacacattagaaaggattctgatctttaacaacactggccaccttaaaatgnnn

SEQ ID NO: 13151 - DNA, 1117 bp, Homo sapiens
  misc_feature 1116, 1117: n = A,T,C or G
acagtgtctccgtccgcggaaaaagaagcctctgaacccgcgccggcccgcagcccccgtgccttccggccgcccgggcaggtacacaagctgacaataatccttttctgtatgtgtgtgtttgtccgaaatggatgggaggcctccagccagtccttccattgctcactgaagggacgtccctgagccgtgcgctctccttttgcactcattcctggaggacggattccgctagacaccctccagcatcgctgactttataaagcggaaaaacggaaaacgtgactttgtaatagacaaacatgttttttaatggggttccatgggggggcgttcagcctttctgtttgctgtgtgctgtccagatgcctcttgggcgtcctgttgttctcttcccgtgttgtacgaagggtaccgtggccacgtgtacatgccagagctgttgatgagagttaccagtattatgaatgtctgtgcatccaggaaaagtgttctgttggagagtcccaaaatagctgtaaatgctctcttctagctctgccattaaattattgggacatttgtttctttctctcccctcctccaagcccaccactttctgaagctgtgttactgatgtgatgactgtccaggatttgtatcatcccctgccttatgccctccggtctcctctcctgtgggactctctccttcttaggcacagctgcacttagaattgtaatccagtggctctcactggtttcactgaggcagttagagggaatgccttagtaaactgaactggagcagaatctagtttgattaggagctagattataatctaggttccagtccagaacttggagcttcgactgtgactggaatcatttccttttgagcgacctgtgtttagggctgttccatatgagcgagccggtggcagtttgtcctggatgtcccccttgggagggagcgaagcgggttgcggcgttacctgatggccattctgggagggttcgtggacggccccgggcttgggcccggggggcgccacgggttgcagtgttcgcgcgccaccgcggttaactcaggtcgcgtggagccctctctcctctgcggtctgtcgcttctttctcnn

SEQ ID NO: 13152 - DNA, 2218 bp, Homo sapiens
  misc_feature 1, 2, 3, 4, 5, 2203, 2204, 2205, 2206, 2207, 2208, 2209,2210, 2211, 2212, 2213, 2214, 2215, 2216, 2217, 2218: n = A,T,C or G
nnnnnatttgaggagagacacatgggtgggaaattgcaataaaacggcggccgaggggcaggtacgcggggatggctggccagaggaggaacgctttgtgttctcatcggagctgcatgggaagtctgcatacagcaaagtgacctgcatgcctcaccttatggaaaggatggtgggctctggcctcctgtggctggccttggtctcctgcattctgacccaggcatctgcagtgcagcgaggttatggaaaccccattgaagccagttcgtatgggctggacctggactgcggagctcctggcaccccagaggctcatgtctgttttgacccctgtcagaattacaccctcctggatgaacccttccgaagcacagagaactcagcagggtcccaggggtgcgataaaaacatgagcggctggtaccgctttgtaggggaaggaggagtaaggatgtcggagacctgtgtccaggtgcaccgatgccagacagacgctcccatgtggctgaatgggacccaccctgcccttggggatggcatcaccaaccacactgcctgtgcccattggagtggcaactgctgtttctggaaaacagaggtgctggtgaaggcctgcccaggcgggtaccatgtgtaccggttggaaggcactccctggtgtaatctgagatactgcacagacccatccactgtggaggacaagtgtgagaaggcctgccgccccgaggaggagtgccttgccctcaacagcacctggggctgtttctgcagacaggacctcaatagttctgatgtccacagtttgcagcctcagctagactgtgggcccagggagatcaaggtgaaggtggacaaatgtttgctgggaggcctgggtttgggggaggaggtcattgcctacctgcgagacccaaactgcagcagcatcttgcagacagaggagaggaactgggtatctgtgaccagccccgtccaggctagtgcctgcaggaacattctggagagaaatcaaacccatgccatctacaaaaacaccctctccttggtcaatgatttcatcatcagagacaccatcctcaacatcaacttccaatgtgcctacccactggacatgaaagtcagcctccaagctgccttgcagcccattgtaagttccctgaacgtcagtgtggacgggaatggagagttcattgtcaggatggccctcttccaagaccagaactacacgaatccttacgaaggggatgcagttgaactgtctgttgagtccgtgctgtatgtgggtgccatcttggaacaaggggacacctcccggtttaacctggtgttgaggaactgctatgccacccccactgaagacaaggctgaccttgtgaagtatttcatcatcagaaacagctgctcaaatcaacgtgattccaccatccacgtggaggagaatgggcagtcctcggaaagccggttctcagttcagatgttcatgtttgctggacattatgacctagttttcctgcattgtgagattcatctctgtgattctcttaatgaacagtgccagccttcttgctcaagaagtcaagtccgcagtgaagtaccggccatcgacctagcccgggttctagatttggggcccatcactcggagaggtgcacagtctcccggtgtcatgaatggaacccctagcactgcagggttcctggtggcctggcctatggtcctcctgactgtcctcctggcttggctgttctgagagctccgctgagcatctggccttgaagtttgtgttcttccctctggcaatggctcccttcagcacttctgctttccactccaattcacacaggcttggtattaacagaatcaaggccaggctaggttaggaaaagggaagagctttcaccttctttaaaactctcggctgggcgcagtggctcatgcctgtaatcccagcattttgggaggctgaggcaggtggatcacctgaggtcagcagttcaaaatcagcctggccaaaatgctgaaactccgtctctactaaaaatacaaaaattagccaggcatggtggcaggcgcctgtaatcccagctactcgggaggccaaggcaggagaattgctcgaactcagggggtggaggttgcagtgagttgagattgtgccattgcactccagcctgggcaacagagcaagactctgtctcannnnnnnnnnnnnnnn

SEQ ID NO: 13153 - DNA, 3284 bp, Homo sapiens
ggtggctcctttgtcctacggcgggcaggtgggccgacgcggaggcggcagcggcgggcctgaggcgaaggagcggccgggagcccgccgcgctggtagcgatattaataaggcagcggaaagaagaaatatgaatacggctccatcaagacccagccccacacgaagggatccatatggctttggagacagtcgagattcaaggcgtgatcgatccccaattcgaggaagtccaaggagagagcccagggatggcagaaatggccgggatgcccgggacagcagagacattcgagacccccgagacttgcgggaccacagacatagtagagatttgcgggatcacagagacagcaggagtgtgcgcgacgttcgggacgtgagggatcttagagactttcgtgatctaagagactctagggattttcgagatcagcgagaccccatgtacgacagatacagagacatgagagactcccgagatcctatgtacaggagagaaggctcttatgaccgatacctacgaatggatgactattgcaggagaaaggatgactcttattttgaccgttacagagatagctttgatggacggggccctccaggcccagaaagtcagtctcgtgcaaaagagcgtttgaaacgtgaggaacggcgtagagaagagctttatcgtcaatattttgaggaaatccagagacgctttgatgccgaaaggcccgttgattgttctgtgattgtggtcaacaaacagacaaaagactatgctgagtctgtggggcggaaggtgcgagacctaggcatggtagtggacttgatcttccttaacacagaagtgtcactgtcacaagccttggaggatgttagcaggggaggttctccttttgctattgtcatcacccagcaacaccagattcaccgctcctgcacagtcaacatcatgtttggaaccccgcaagagcatcgcaacatgccccaagcagatgccatggtgctggtggccagaaattatgagcgttacaagaatgagtgccgggagaaggaacgtgaggagattgccagacaggcagccaagatggccgatgaagccatcctgcaggaaagagagagaggaggccctgaggagggagtgcgtgggggccaccctccagccatccagagcctcatcaacctgctggcagacaacaggtacctcactgctgaagagactgacaagatcatcaactacctgcgagagcggaaggagcggctgatgaggagcagcaccgactctctgcctggcccgatttcccgccaaccactcggggcgacctcgggtgcctcgctgaagacacagccaagctcccaaccgctccagagcggccaagtgctcccctctgctacacccactccatctgcaccccccacctcccagcaagagcttcaggccaaaatcctcagcctcttcaatagtggcaccgtgacggccaatagcagctctgcatccccctcggttgctgccggaaacaccccaaaccagaatttttccacagcagcaaacagccagcctcaacaaagatcacaggcttctggcaatcagcctccaagcattttgggacagggaggatctgctcagaacatgggccccagacctggggctccttcccaagggctttttggccagccttccagtcgcctggcacctgctagcaacatgactagccagaggcctgtgtcttccacaggtatcaactttgacaatccaagtgtacagaaggctctggataccctgatccagagtggccctgctctctcccacctgggttagccagaccacagcacagatggggcagccacaggcccccatgggatcttaccagaggcattactgaagctaaatctttcaactctccccagtcccctcatcccctggcctcctcccacttacttgttctaaatagagctgtttggaggatgttctctgcgctcccaggccggcatcgagtgtcatcaatttctaccacctgctctctcttctgcccaaggctgtgttgcttattccttacaaagtttatactgcatttggggctgtatctttttttgttttttgttttgtagaaaataaatatctccgggggcagtacaggtgtctgggcttgtatttgatggggtttctccggtccctgtttctactggatttggagccaggcccagctagccaagtttggaatggcatttgtcatgtcagtagccaccacctttgttcattgtgaacctaccaaggctttccagcttcatacacattgaccagagctcaagctcctgcctgcaactcctgcctagagttgaagaaaagcaaactggccttggcaggcacagtgtcatcataccctcaccccatatgtttggggtctgcttgaggattcataaatcagccactctggattgttgaggaatggccatggcagccacagaaaaaagaatttttctctctgagccaaggttgttttttgtttttttctcttttcttttttgttttcatttcattggaagatctccaatggactgaacagctccagtcagcagcagttaccacaaactgtgaatctgggccccaccactcttccctgttaaccagttctgtcagcatccccctctccagcagcacttccatgaagttggttctgagactctggccgtgaacacccgtttcttcagtgatttgttttgggcttttggctcaaaaccccaggctcttgtttttgtctagactcttattctgtttcctgagcagcaggaggtagggaccactttgatgtcagacttctggtagctggacatgttctcgagatgggtggctgttcgcgacttttgtaccagagtgaaattgttagaaggagggtttctggctgtggttctaaatggagccccaggaagctgccctctccccagggtttgtgctcagtagagccctgtggatcacagtcttgaggtcctctagcaggggtgagggagagcagcgacttcagctgagtccctgccagtggttaagcaaacaatggtttcaaaattcaaggtccccaaatggcagcattttatgttctgacctgtttgtgttatatagtggtttttttttcctctttggaactcttgtgttgttaataaaatgaaatgattactttttaattaaaatgaaaaacgtcgacgcggccgcgaatttagtagtagtaggcggccgctctagaggatccaagcttacgtacgcgtgcatgcgacgtcatagctcttctatagtgtcacctaaa

SEQ ID NO: 13154 - DNA, 185 bp, Homo sapiens
  misc_feature 1, 2, 3: n = A,T,C or G
nnnacccatagctgagaaatctgcagatggttcacatcacaggacccagtgtagacaacccccagcaccagcccagagcctggtagacctgctgggtggctagatccacaagagagatgacagtcactacaacttggctctcaggaagccacatccctaggaaaagagggagagtacctgcccgg

SEQ ID NO: 13155 - DNA, 1140 bp, Homo sapiens
ttcatcgtcgctggcatacatgccgcttcactggcagtgagatccgccaccgtgatgatgctctaccttttgcccacgtggccattgcagtagagggtcctggctgggccagcccggacaatgtggccttgcaagtggccaatgccatcatcggccactatgactgcacttatggtggtggcgtgcacctgtccagcccactggcttcaggtgctgtggccaacaagctatgccagagtttccagaccttcagcatctgctatgcagagacgggcttgctgggtgcacactttgtctgtgaccgaatgaaaatcgatgacatgatgttcgtcctgcaagggcagtggatgcgcctgtgtaccagtgccacggagagtgaggtggcccggggcaaaaacatcctcagaaatgccctggtatctcatctagatggcactactcctgtgtgtgaggacatcggacgcagcctcctgacctatggccgccgcatccccctggctgaatgggaaagccggattgcggaggtggatgccagtgtggtacgtgagatctgctccaagtacatctatgaccagtgcccagcagtggctggatgggaaagccggattgcggaggtggatgccagtgtggtacgtgagatctgctccaagtacatctatgaccagtgcccagcagtggctggatatggccccattgagcagctcccagactacaaccggatccgtagcggcatgttctggctgcgcttctaggcgggaagcctatgtaagcaagagggcagggccggggtttgtggtcccccccccaccacaaacacagcacttcggctcctctaacctgtgccacaggtgaccaccaataaaatcctctgctgagaaaaaaaaaaaaaaaaaaaaaaaatattaaaaaataaaaaaaaagataaataaaaaacaaaaaaaaataaaaaaaaaaaaaaaaatactataagaagggagaaaaaaaataaaaaaaaaaaggcccctcccgggggggcccccggggaagttcccggggacttttgggggcccagggcaaaagatccccctgcccccagatttttaaacccccccgggccaaaaaagggaaccttttcttttacaaatattaaaaaatttaccc

SEQ ID NO: 13156 - DNA, 2199 bp, Homo sapiens
  misc_feature 1, 2190, 2191, 2192, 2193, 2194, 2195, 2196, 2197, 2198,2199: n = A,T,C or G
nagtcgtcccgacccacgcgtccgcatggctgcgcccgcactagggctggtgtgtggacgttgccctgagctgggtctcgtcctcttgctgctgctgctctcgctgctgtgtggagcggcagggagccaggaggccgggaccggtgcgggcgcggggtcccttgcgggttcttgcggctgcggcacgccccagcggcctggcgcccatggcaattcggcagccgctcaccgatactcgcgggaggctaacgctccgggccccgtacccggagagcggcaactcgcgcactcaaagatggtccccatccctgctggagtatttacaatgggcacagatgatcctcagataaagcaggatggggaagcacctgcgaggagagttactattgatgccttttacatggatgcctatgaagtcagtaatactgaatttgagaagtttgtgaactcaactggctatttgacagaggctgagaagtttggcgactcctttgtctttgaaggcatgttgagtgagcaagtgaagaccaatattcaacaggcagttgcagctgctccctggtggttacctgtgaaaggcgctaactggagacacccagaagggcctgactctactattctgcacaggccggatcatccagttctccatgtgtcctggaatgatgcggttgcctactgcacttgggcagggaagcggctgcccacggaagctgagtgggaatacagctgtcgaggaggcctgcataatagacttttcccctggggcaacaaactgcagcccaaaggccagcattatgccaacatttggcagggcgagtttccggtgaccaacactggtgaggatggcttccaaggaactgcgcctgttgatgccttccctcccaatggttatggcttatacaacatagtggggaacgcatgggaatggacttcagactggtggactgttcatcattctgttgaagaaacgcttaacccaaaaggtcccccttctgggaaagaccgagtgaagaaaggtggatcctacatgtgccataggtcttattgttacaggtatcgctgtgctgctcggagccagaacacacctgatagctctgcttcgaatctgggattccgctgtgcagccgaccgcctgcccactatggactgacaaccaaggaaagtcttccccagtccaaggagcagtcgtgtctgacctacattgggcttttctcagaactttgaacgatcccatgcaaagaattcccaccctgaggtgggttacatacctgcccaatggccaaaggaaccgccttgtgagaccaaattgctgacctgggtcagtgcatgtgctttatggtgtggtgcatctttggagatcatcgccatattttacttttgagagtctttaaagaggaaggggagtggagggaaccctgagctaggcttcaggaggcccgcgtcctacgcaggctctgccacaggggttagaccccaggtccgacgcttgaccttcctgggcctcaagtgccctcccctatcaaatgaagggatggacagcatgacctctgggtgtctctccaactcaccagttctaaaaagggtatcagattctattgtgacttcatagtgagaatttatgatagattattttttagctattttttccatgtgtgaaccttgagtgatactaatcatgtaaagtaagagttctcttatgtattattttcggaagaggggtgtggtgactcctttatattcgtactgcactttgtttttccaaggaaatcagtgtcttttacgttgttatgatgaatcccacatggggccggtgatggtatgctgcagttcagccgttgaacacataggaatgtctgtggggtgactctactgtgctttatcttttaacattaagtgcctttggttcagaggggcagtcataagctctgtttccccctctccccaaagccttcagcgaacgtgaaatgtgcgctaaacggggaaacctgtttaattctagatatagggaaaaaggaacgaggaccttgaatgagctatattcagggtatccggtattttgtaatagggaataggaaaccttgttggctgtggaatatccgatgctttgaatcatgcactgtgttgaataaacgtatctgctaaatcaaaaaaaaaaaaaaaaaaaaaaaaaaaaaaaaaaaaaaaaaaaannnnnnnnnn

SEQ ID NO: 13157 - DNA, 396 bp, Homo sapiens
  misc_feature 371, 372, 373, 374, 375, 376, 377, 378, 379, 380, 381, 382,383, 384, 385, 386, 387, 388, 389, 390, 391, 392, 393, 394,395, 396: n = A,T,C or G
ccgggcaggtacttttagtagagacaggatttcgccatgttggtcaggctggtctcgaactcctaacctcgtgagccacctgcctcggcctcccaaagtgctgggattacaggcgtgagccactgcgcccggccagaaaccagatttctgaagcctggacaactaacgtctactttttcccacaacttctctcttttctaaatttctaaaaatcacccagcctcaccaacccaaacataaccaatgttaacactttaaaaattttcctgtcagtcttttattatcccaataaattttttattttgcaggattataatcaccctgtatatgcaaattcttattactgtggaataaacattttctctatcacnnnnnnnnnnnnnnnnnnnnnnnnnn

SEQ ID NO: 13158 - DNA, 3712 bp, Homo sapiens
  misc_feature 1, 3706, 3707, 3708, 3709, 3710, 3711, 3712: n = A,T,C or G
naattccgtaaagctagaccgatctccggggagccccgagtaggcgagcggccgccagctagttgagcgcaccccccgcccgccccagcggcgccgcggcgggcggcgtccaggcggcatggagaaggacggcctgtgccgcgctgaccagcagtacgaatgcgtggcggagatcggggagggcgcctatgggaaggtgttcaaggcccgcgacttgaagaacggaggccgtttcgtggcgttgaagcgcgtgcgggtgcagaccggcgaggagggcatgccgctctccaccatccgcgaggtggcggtgctgaggcacctggagaccttcgagcaccccaacgtggtcaggttgtttgatgtgtgcacagtgtcacgaacagacagagaaaccaaactaactttagtgtttgaacatgtcgatcaagacttgaccacttacttggataaagttccagagcctggagtgcccactgaaaccataaaggatatgatgtttcagcttctccgaggtctggactttcttcattcacaccgagtagtgcatcgcgatctaaaaccacagaacattctggtgaccagcagcggacaaataaaactcgctgacttcggccttgcccgcatctatagtttccagatggctctaacctcagtggtcgtcacgctgtggtacagagcacccgaagtcttgctccagtccagctacgccacccccgtggatctctggagtgttggctgcatatttgcagaaatgtttcgtagaaagcctctttttcgtggaagttcagatgttgatcaactaggaaaaatcttggacgtgattggactcccaggagaagaagactggcctagagatgttgcccttcccaggcaggcttttcattcaaaatctgcccaaccaattgagaagtttgtaacagatatcgatgaactaggcaaagacctacttctgaagtgtttgacatttaacccagccaaaagaatatctgcctacagtgccctgtctcacccatacttccaggacctggaaaggtgcaaagaaaacctggattcccacctgccgcccagccagaacacctcggagctgaatacagcctgaggcctcagcagccgccttaagctgatcctgcggagaacacccttggtggcttatgggtccccctcagcaagccctacagagctgtggaggattgctatctggaggccttccagctgctgtcttctggacaggctctgcttctccaaggaaaccgcctagtttactgttttgaaatcaatgcaagagtgattgcagctttatgttcatttgtttgtttgtttgtctgtttgtttcaagaacctggaaaaattccagaagaagagaagctgctgaccaattgtgctgccatttgatttttctaaccttgaatgctccagtgtggagtgggtaatccaggcacagctgagttatgatgtaatctctctgcagctgcctggcctgatttggtacttttgagtgtgtgtgtgcatgtgtgtgtgtgtgtgtgtgtgtgtgtgtgtgtatgtgagagattctgtgatcttttaaagtgttactttttgtaaacgacaagaataattcaattttaaagactcaaggtggtcagtaaataacaggcatttgttcactgaaggtgattcaccaaaatagtcttctcaaattagaaagttaaccccatgtcctcagcatttcttttctggccaaaagcagtaaatttgctagcagtaaaagatgaagttttatacacacagcaaaaagaaaaaaaaaaaaagatattttaagagatgtgcatgcattctatttagtcttcaaaatgctgaatttacttgttgtaagtctattttaaccttctgtatgatatcatgctttatcatttcttttggaaaatagcctgtaagctttttattacttgctataggtttagggagtgtacctcagatagattttaaaaaaaagaatagaaagcctttatttcctggtttgaaattcctttcttccctttttttgttgttgttattgttgtttgttgttgttattttgtttttgtttttaggaatttgtcagaaactctttcctgttttggtttggagagtagttctctctaactagagacaggagtggccttgaaattttcctcatctattacactgtactttctgccacacactgccttgttggcaaagtatccatcttgtctatctcccggcacttctgaaatatattgctaccattgtataactaataacagattgcttaagctgttcccatgcaccacctgtttgcttgctttcaatgaacctttcataaattcgcagtctcagcttatggtttatggcctcgattctgcaaacctaacagggtcacatatgttctctaatgcagtccttctacctggtgtttacttttgttacctaaataatgagtaggatcttgttttgttttatcaccagcacacagattgctataaactgttactttgtgaattacatttttatagaagatattttcagtgtctttacctgagggtatgtctttagctatgttttagggccatacatttactctatcaaatgaacttttctccatcccccacgctgtgcttatttctagtgccttgtgctcactcctgctctctacagagccagcctggcctgggcattgtaaacagcttttcctttgtctcttactggtttctctacagtcctttatatttcataccatctctgccttataagtggtttagtgctcagttggctctagtaaccagaggacacagaaagtatcttttggaaagtttagccacctgtgctttctgactcagagtgcatgcaacagttagatcatgcaacagttagattatgtttagggttaggattttcaaagaatggaggttgctgcactcagaaaataattcagatcatgtttatgcattattaagttgtactgaattctttgcagcttaatgtgatatatgactatcttgaacaagagaaaaaactaggagatgtttctcctgaagagcttttggggttgggaactattcttttttaattgctgtactacttaacattgttctaattcagtagcttgaggaacaggaacattgttttctagagcaagataataaaggagatgggccatacaaatgttttctactttcgttgtgacaacattgattaggtgttgtcagtactataaatgcttgagatataatgaatccacagcattcaaggtcaggtctactcaaagtctcacatggaaaagtgagttctgcctttcctttgatcgagggtcaaaatacaaagacatttttgctagggcctacaaattgaatgtaaacactcactgcactgattcatctgagcttttggttagtattcatgctagagcgaacatagctttagttttgctgtgtcaaagtgtttcataggttcatcaagaaaaatgccagtgtctgactggatttcagcatccttagattttacatgagtgagagctcactttatgctagcatttgctttgatcattttaggcgtgcttggaagagatacgcaaacatctggttcaacgggcgatactcgggacgagaaggtacttgacggaaacggccagatcaggaaggaggagaactaaagtaggcaataacacaaacgagtaaaaagagactgactagatgctctactccannnnnnn

SEQ ID NO: 13159 - DNA, 503 bp, Homo sapiens
  misc_feature 1, 2, 3, 4, 5, 499, 500, 501, 502, 503: n = A,T,C or G
nnnnnatgggaatgagacctcctgtaatgtcgcaaggtggccgttactgctcttactctaaccagtctaatacgtttggagattaaaccttctctcaacttgtgctgtttatatagccaagctctccgtcaataaggcttcattgtgactttaacaaacattatcttcccacataccaggaactattggacatttattttacatgggaaaaattatttggaataataaagcaggaacttttcctgaagttgcaatttatactgtatggcttctttttcatgtttcatctaggtttttagaagtgaagtatagtaaatttggttcgttaaattgtgaaggcgctggaattacatgaacataccccctagtaaagccctgccataggacaggctgaggctgagtctcagtgttgccctgttcagtctgagcagcagaatttcagaatttgctacttactggtagagaagaaaaatcacacagccctgccagtacctcggcnnnnn

SEQ ID NO: 13160 - DNA, 7286 bp, Homo sapiens
  misc_feature 1, 2, 3, 7265, 7266, 7267, 7268, 7269, 7270, 7271, 7272,7273, 7274, 7275, 7276, 7277, 7278, 7279, 7280, 7281, 7282,7283, 7284, 7285, 7286: n = A,T,C or G
nnnccgcggcgggtgctaatccccacagtagccagggtagcccttctctcgcggtgcctctgagagccgccgccacctcgtccctcagttcccggcagacagccgcccgggccgggctccctcaccgccaccagggccggagggacgagtgagaggggcggccgggacgcgacccccgggccgggagaagcggaggcccgacgggcgcggccctcgaggtacggcttcttgggggcggcgaggacctcgacgcccttcgccgacaccgcggctggtcccgctcgcccgccccttcctgatcctgccgctgccctccacgcctccaatcccccacctccaccccctctcctttctctcttctcttccttcctctcctcctcctcccctccagccgctgggagccgcgggtcggacgagccgccgcctccttctctgcgtccatgtatgaggggaagaagacgaagaacatgttcctgacccgggctctggagaagatattggccgacaaggaagtgaagaaggcgcatcactcccagctgcgcaaagcttgcgaggtggcgttagaggaaataaaagcggaaactgaaaaacagagtcctcctcatggagaagcaaaagctggatcaagcacccttccaccagtgaaatcaaagacaaattttattgaagcagacaagtacttcttgccttttgagttggcatgccagtccaaatgtcctcgcatagttagtacatctctagattgcttacagaaacttattgcttatgggcacttgactggcaatgctccagatagtacaacaccaggcaaaaaattaattgatagaattattgaaacaatatgtggctgctttcagggccctcagacagatgaaggagttcagctgcagataataaaggctttacttactgcagtaacatcacaacacatagaaattcatgaagggactgtactgcaagctgtgagaacatgttacaatatctacttagcaagcaaaaatctcatcaatcagacaacagccaaagctactctcactcagatgctaaatgttatctttgcacgcatggaaaaccaagcattacaggaagcaaaacaaatggaaaaagaaaggcatcggcagcatcatcatctgttacagtctccagtaagccatcacgagcctgaatcacctcaacttagatatttgccacctcagactgttgatcatatatcccaagaacacgaaggggaccttgacctccatacaaatgatgtagataaaagtcttcaggatgacacagagcctgaaaatggatctgatatttccagtgcagaaaatgaacagactgaagctgatcaggcaactgcagctgaaacattatctaaaaatgaagtgttatatgacggagaaaaccatgattgtgaggaaaagccacaagacattgtacagaacattgtagaagaaatggtgaacattgttgttggagatatgggagaagggactactataaatgcaagtgcagatggcaacattggaactatagaggatggtagtgacagtgaaaatattcaagcaaatggaattccaggaacaccaatttctgttgcatatacaccatccttacctgatgatagattgtcagtctcttccaatgatactcaggaatctggaaattcttcaggaccttcacctggtgctaagttttcccacattttacaaaaggatgcctttctagtattcaggtcattgtgtaaactgtcaatgaaaccactgtcagatggaccaccagatccaaagtctcatgaactacgatccaagattctttcattgcagttacttctatccattctgcagaatgcaggacctattttcaggacaaatgagatgtttattaatgctattaagcagtatctttgtgttgcactctcaaaaaatggagtctcatctgttccagaggtttttgagctttctctttctatatttcttactttgttgtcaaatttcaagacacatctgaagatgcaaattgaggtgttctttaaagaaattttcttatacattttggaaacttctaccagctcatttgatcacaaatggatggttattcagacactgacgaggatttgtgcagatgctcagagtgtagtggatatttatgtaaactatgactgtgacttaaatgcagccaatatatttgaaagactagtaaatgatctatcaaaaattgctcaaggaaggggcagtcaagaacttggtatgagtaatgttcaggaattgagcctgaggaaaaaaggtttagaatgcttagtgtcgattttgaagtgtatggttgaatggagtaaggatcagtatgtgaatcccaactcccagacaactcttggtcaggaaaaaccctcagagcaagagatgagtgaaatcaaacaccctgagacaataaacagatacggaagtttaaattccctggagtcaacatcatcatcaggaataggcagctacagtacacagatgtctggcactgataatccagaacaatttgaggtcctaaagcaacaaaaagaaataatagaacaagggatagatttatttaataagaaaccaaagagaggaatacagtacctccaagaacaagggatgcttggcaccacacctgaagatattgcccaattcttacatcaagaggaaagattagactctactcaagtgggtgagttcctgggagataatgataaatttaacaaagaagtcatgtatgcatatgtggaccaacatgacttttcaggaaaagacttcgtttcagcccttcgtatgtttctagaaggatttcgtcttccaggggaagctcagaaaatcgatcgattaatggaaaaatttgctgcaagatacctagaatgcaaccaaggacaaactctctttgctagtgcggatacagcttatgttttggcttattcaattatcatgttgaccacagaccttcacagtccacaggtgaaaaataaaatgacaaaggaacaatacattaagatgaatagaggtatcaatgacagtaaagaccttcctgaagagtatctatcagccatctataatgaaatagctgggaaaaagatatcaatgaaagaaacaaaagaactaacaatccctacaaaatcaagtaaacagaatgtagccagtgaaaaacaaagaagacttctgtataacttagaaatggagcagatggccaagacagctaaagcactcatggaggccgtgagccatgttcaggcaccctttacaagtgcaacacatttggagcatgtgaggcccatgtttaagttggcttggacgccttttctggctgcattcagtgtgggtctacaagattgtgatgatactgaagtagcctctctttgcctggaaggtataagatgtgcaatcagaattgcatgcattttcagcattcagctggagagagatgcatatgtccaggcactagcaagatttaccttactcacagtgagttccggtattactgaaatgaaacagaagaacattgacacaataaaaacacttatcacagtggctcatacagatggaaattatttaggaaattcatggcatgagattctgaagtgcatcagtcagttggagctggcacagcttataggaactggagtgaaacctcgatacatttctggaacagtgcgaggcagagaaggatctcttactggaacaaaagatcaggctcctgatgaatttgtgggtttagggctagttggaggaaatgtggactggaaacagatagcaagtattcaggaatccattggagaaaccagttctcagagtgttgttgttgctgtagatagaatattcacaggatctacaaggctagatggaaatgccattgtggattttgtccgttggctctgtgctgtgtctatggatgaattactttccacgacacacccaagaatgtttagtctacaaaaaatagtagaaatatcatattacaacatgggaagaataagattacagtggtctcgaatttgggaagttattggagatcattttaataaggttgggtgtaatcctaatgaagatgtagctatttttgcagtagactccttgaggcagttgtcaatgaagttcttagagaaaggggagcttgctaacttcagattccagaaggatttcttaagaccttttgaacatataatgaaacggaacaggtctccaacaattcgagatatggttgtacggtgtatagcacagatggttaattctcaagctgctaacattcgatctggatggaagaacattttctctgtatttcatctagctgcatctgatcaagatgaaagcatagtggaacttgcattccaaacaaccgggcacattgtcacccttgtatttgaaaaacactttccagcgaccattgattctttccaggatgcagtgaagtgtttgtctgaatttgcgtgcaatgcagctttcccagacacaagtatggaagcaattcgacttattcgccattgtgcaaaatatgtgtctgatagacctcaggctttcaaggaatacacaagcgatgatatgaacgtagcacctgaagacagggtgtgggtgagaggatggttcccaattctctttgagttatcctgtatcatcaatagatgcaaattagatgtaagaaccaggggtttaacagtaatgtttgaaataatgaaaacatatggccacacttatgagaaacactggtggcaggatttatttagaattgttttcagaatctttgacaatatgaaattgccagaacaacagacagagaaagctgaatggatgacaacaacttgcaatcatgcactttatgcaatctgtgatgtattcactcagtatttagaagtactcagtgatgtacttttggatgacatttttgctcagctctactggtgtgtgcagcaagacaatgagcagttagcgcgatctggtacaaactgtttagagaatgttgttattctgaatggtgaaaaatttaccctagaaatctgggataaaacttgcaactgcacactggatatcttcaaaaccacaatcccacatgcgctgttgacctggcgacccaattctggagaaactgcccccccacctccatctcctgtaagtgaaaagccattggatacaatatcacagaagtctgtagatattcatgattctattcaaccaaggtctgtggataacagaccacaagcaccactggtttctgcgtctgctgttaatgaagaagtcagcaaaattaaatctacagcaaaatttccagaacaaaaattgtttgctgccctgttgattaaatgtgttgtgcagctggaactcatccagactatcgacaacattgtcttcttcccagccacaagtaagaaagaagatgcagaaaacttagctgcagcacagagagatgcggtggactttgatgttcgcgttgatactcaagaccaaggaatgtaccgctttttaacatcacaacaactttttaagctactggactgcttattagagtcacatagatttgcaaaagcgtttaattccaacaacgaacagaggactgccctgtggaaagcaggattcaaaggcaaatccaagcccaaccttctgaagcaggagaccagcagcctggcctgtgggctgcgcattctcttccggatgtacatggatgagagccgcgttagtgcctgggaggaggtccagcagaggcttttgaatgtctgcagtgaagcactaagttacttcctcactctaacatcagaaagtcatcgagaagcctggactaacttactgcttttgtttctaactaaagttctaaagataagtgataataggtttaaagctcatgcatcattctactaccctctcttatgtgaaattatgcaatttgacttgattcctgaacttcgtgctgttcttagaagattttttctgcgaatcggagtagtttttcagatatcacaaccacctgaacaggaacttggaataaacaagcaatgatgggaacttaatatttttgttggcatttacatccctctgctctttaaaaggacgctggagctgaggtttcctacctgaaaaatgatttctctggattgcagtgtctgagttactggtaaagatgcttagaagtcttactcaaacttgcaacactccagtcccttttagtgctggtggattttgtgtgttatattggcctcatgttgagcagaaagcctgtttaaacagtgtcagctcatgctcacgggtccttccctgtcttccacggcaggaaaagccccacgtttttggcaggtgtggaagtgaaacttacccaaagaactatagatgtaaagattgaacttctacaagaagtacaactcaggagagctgtattttgaaggataaaatgtttataattggggagtggggagagaagaagaaattattgttcatggtaaaagatatttagcaactatggtattcttattctgaagatttttgcacactcaggctatctgagatactggtaatcatcctgtgaaaaatgtacagagatgcaggtctgtaatataaaaatcttaaaacattatatagttcttcctgcactgttttctttattttcttattcatttgctaaatacccataatattttgtcaaatgcactaaacatttgggtggaactttcttttttattttatagggatttttagttttgccctttttggtaggtggtgattttgaggctgtaacatgcccagaagctgttgtggccgacacttcaacaatagggaaaaaaaggtagaaaatatccctactgacagtaactacctgtcacatatttctcttaggacttttaaagatgagccattaaaatagaatgatcctttatggaccaaaacttgaatcactgcaaaatgaatccagattgctgtcattttcttttcttttgggtggtggggcttgatgtagattttactctatgtacagaatttaacgttgaatatattaaaataacaaatctggcatggtttgcggaggttagatttactggaaatgtattcatactgtgaattgtgctctgatggttaaaagacaagattgtcaagcattccgtattaacagtggatgtagaaaattttttcagatggacaaaatgtatatggtacagatgtaaagttttctatgtaaaaaattctgtacaactttctgtacaatattgattcccatctggcatattctaatcaggttataggtcaataaagtttttgaattatttcaaaaaaaaaaaatannnnnnnnnnnnnnnnnnnnnn

SEQ ID NO: 13161 - DNA, 363 bp, Homo sapiens
  misc_feature 66, 363: n = A,T,C or G
actttttttttttttttttttttttgggatttttttttttttttttttttttttttctttgggganataaatgttattttattttaaggtgggagaaataatagcatgggccaatgctaagacatatgaaagcaatagtctggtagtgcctatgacacagtataatagtaagtgtctgacacatagtagctattcaacaaaagtcatttaaaaatttaacttaaaaattcagtaatatttttcccctttcttttattatcccttctgccaaaatttgcccttcttatgtttcatttacacagtgtaaagattaggtaggatgtgtctgaaagtctctttgatactaggatgtttaaaagcacn

SEQ ID NO: 13162 - DNA, 203 bp, Homo sapiens
aggtacacttggaggaaggccaagcaggcgacttgaaagataagtgccccattgaccttttacttagagttttatatgttggcttacttctgggttcctacaacccttctctgattcttcccttgtggttggctgtccatgtgtgtgcagtggcctgctagtccttgggaggtgagcatgtgcagtgtgtttactggagttgt

SEQ ID NO: 13163 - DNA, 869 bp, Homo sapiens
  misc_feature 1, 2, 726, 868, 869: n = A,T,C or G
nncagaaattggagtgaatttgattcttgaaagaaagaccccacccaggggagccacctttataaggctttttccttgaggtattccccaatccatcaggtgctagcaaatagaactcaagcagaaagctgtgtcatattggtttgaggaatcaggggatattttgagactgtgtgtcgggaaattgaagatggcaatcatagaaaggagagacccatgctggggatcaccccgaagtacatataaacacccctcacatgctagactaactgctgaactgcccatgcacaggggaagtgccacagattccagcagagatttcagtagctgcctgctgtgggagagagagaatttggaggtggagtcttgtcaagttagaggcgattcgataaacaccttggactttgctttgaaatcccagaagggctaccccttaggggcaaatactactccccagggctatggcattttccctaggactaagggcaaaacaaaaataaagcataaaattgtgcctacaccagatctacaggtgatttaactgtctactagaaaaaactgaattctgcagaagaaaacagaatccagagcctctacaaactatcaccttcaacatccagtataaaattaaaaaactactagatgtgagaagaaacaggaccctgtgacccttactgaaatgaaaactcagttaatagaaacaaattcacaggtgaacagtaactntaactatgaacaaatatgttaaaagaatttacatgaaaaaaatgggtgaaagggtaaagaggtgaagagttgcagtggagataaggaagttgtgaaaaagaaccaaatgtaaatcttagaactgaaaaacacaaaacctgann

SEQ ID NO: 13164 - DNA, 411 bp, Homo sapiens
  misc_feature 410, 411: n = A,T,C or G
actgctattataacaagtaatattttccagactggtttgagacagtcacccgtgaattcaggtatttcatcatctatcagcctttaaaatctttgatttgttactctaaaaaaaagttctattttggaggagaaaggtaaaatctttccagtttggtgtttcacacatggacggttatactaagtaaagatcatcaattcagtattttacatgtatattagcccttaaatacctcatgttccagatactaagccagacttccacctaagcctcacaggaagacgcacattctcaggattttcacactagattatttacaaaacaaacaagatctgaattattttataatctagtgctcagattctaacagcagaaataacctctgcacatgcagaaaaagctggcttcann

SEQ ID NO: 13165 - DNA, 417 bp, Homo sapiens
  misc_feature 1, 413, 414, 415, 416, 417: n = A,T,C or G
ngcccgggcggccgaggtactgggaatgggaagttttctgaataagggtaacatggggcagaatttgtctattgaggtgcaacattatgtgcatttgcttaaagttttacttaaacaaactggtgctcaggttagttctcaaacattaattaagatgctgaagaaggtcactatacataacccgtggtttccacagacaggcagtcttgatgtagaaatttgggacagagtaggaccaggattaaaacgggctcaccaaaaaggtcttaaatttgatctttttgtttttttctgcttggagtttagtccgtgctgtcctcctgccattatcttcttcttattctgctagacagcaggaatcatattccaagtctaaaaatctgaaaaaatattttgtcccacccacagtaccnnnnn

SEQ ID NO: 13166 - DNA, 1972 bp, Homo sapiens
  misc_feature 1, 1969, 1970, 1971, 1972: n = A,T,C or G
natgggtggatcgctgctgtccttctctgatgtggcttggtcagtcgttgcgtgtcgtcactgcccatgttgcgggctccgcgtgtgtcagcgtgtgttggtgttcccttcttgcgtcttgctgtgttgcacgggctctcctggcgatccccctttgactctgggctcctgtcgtcgttttctctgtgcccctgtctgtggcgccccggggctgtctgcgcgcccacggtccctgcggccgcgtgtcgtgctgttaccgggaagcgtctccgccagtggtttgtccgcccgaggtgtgggccccaagagtgtatggatgtccggtctgtggggggtgtgtgtgcctcgtgcgtgttcgtaccgtgtgcgtgaccctgtggtgctgtcagtgctgtaccagggtgtctgttgtgatgtgagctgagtggacgtaatgcgtccctgaccgagactgggggcagcaagccagttttcgcgtgcgggtcatgtgctctgatcgcatggataggtcctggactgtttctgataccgttgtatgggtgtggggagggtgctgggctctgtcctgggatggatgctaccatggctggctcgtctggaccggggctgttcagagccccgtggccttttcctgatgttccctgcgcatccagcgcatccacactttcaggaataatcatcttgaggaatttcatccccagctgtttaaatcagagttccatttgctttccctttcccttcagttgctctcagccatgctttcggtgtcacaatcttttggtggttctcctcctcctggcaactcactctcgatttcccacaggacatcgtcttcctcctccaagttgctggagatatggcacttcttgaacccttggacgatggactcacttgagatgctattccacgcgaccatgacccactccagaaagaggcccaggggtggcttcttagcattcccggttgggctcagcgccaggttcccagccagaagccagttggagtactgggcccgcacactgtcattcagtggcttgtagaccacgacatccagcacctgaagctgtgaggtcagaccccctgggatgatcaccatgtcagtgttcatgctttccatggagttcttcacggaatctgtggcatggccccggaagccattcaagatcagcatccctcgctgcttgggcactgctcctgtcctccgtctccacaccacttccaaccagtcctgcatcaagtcttcagtcatccacccataccggtggcagcgaatttccatcccactgggaaacttccccggggggatatatgttcccctcaaaatgatgtacggtggtaacttcctcccatcagccaagacaccaagcattgctgtgattttcagtttttccctgcctggtgtcttgaccaagacaggcttttcgccctggttatcaacagttacccgtgatggcacctctaaacaaatgggcgtctcatctgcattccccatctgagctacctcatagtcatgcgccctgcgcagagccaggacactgcgctggtaagtgacgagtttctcagtcaggtcttccggcaggtgctggggcacgggcactttatgcctcagagacaggtcataccttctcatcattcttcgacaccaacccaagcttgccttgaaccctttctctggaatgttcatttcctgggcgatttcgagagctttcagctgcatcgcctcccgggtgatggggtcccctttggcctgcatgtatctgacatattcggccacacgctggtccaccagagcaaacctcccattcttggggcctcggaacgcccgccgcatggcgtgggcgttttgaagctgtggcttcactttgcgccagtctcgaacgtttttttccaatactccaaactgccttggcagcctggcagttgttggtactctcagcatattccactaccatcagctggtggcatcgannnn

SEQ ID NO: 13167 - DNA, 1189 bp, Homo sapiens
  misc_feature 1189: n = A,T,C or G
actttgtttcgttttggttttagttttgcatttagagtgccttataattgatgcctattttaatagcatttctttttagcttttggttcgtatttccattcactgttcgtatctgttactttctattaaagcattatctgtttaccacatgtacaatgacagtaacagccgcgtggtgctgccaggactgcccttgggcatatcagtgacagcccaaatgtgggtggaggaaacctgtaatttccttcttaacatgtgtttgaaataccaagtgaataatactgttctggaaaaaaatgataaactagtggaaattaaagaaattaagggttttatataatagacaggccccacctctcaaaatatttttagaagtctttttgtaaactaatttcttttgatcactattttgcatcagtaaaatgatttttttaaaaccaataaatcatcaattattagaaatagttgtctcacaggtgatactggtttttctttgtgctgttatgatttaacattgacaggaacactattttaaatccttacgttcaggtgttgtaacttggccttataattaggctgaattatggcttcaaggtctacaatttatgtgtatggttcacagcctagcttctatttacatttgaaaatacagatttttaccaacttggattcttttttagttatatgttgtctttcctttttaaatgttcaaaactattttttaatggtcaagttactaacacttgaaaatcagatactgcaccaaatacagtgtttttccgtagtgtttttaatgagtgcacctattactactgtgcgagaattcatgttttaccagtcattgttatattacaacagacttggcatgaataaccagtggtacacttacttttcaggtggagtatataagaatcaggcggacggctctcctatgtgaaggcctcatggcgaaagcggagtcatctacatggccctagactttgtgagaattcaggctaggccgggtaacgggtccggcccaatacaggaaggcccgagggcaacgcaccggggacatgggggaccgaggtggcgccaagacagctccagacatacaacacccggggaaacacaggaaagacgggatgcgaggagaaacaagcgggggccaacacaacggggcgaccaaaaagagaaggaaagcaacgan

SEQ ID NO: 13168 - DNA, 126 bp, Homo sapiens
acactgaaccacagcacagagaagtccagatgccgaatgacaagaggggccaggccaggccgtgaaaagctttgtgcgctgaggtcagatttgggcttgacactgtagacagaagaaatgttctgt

SEQ ID NO: 13169 - DNA, 3507 bp, Homo sapiens
  misc_feature 1, 2, 3, 4, 5, 3507: n = A,T,C or G
nnnnnaagatactttattttataatcaaaatacgcaatacaaacaaatggacataacaaagattcatataaataactggttataaactttatgaggaaaaatacccgtcagcatggtggctgacttgtactgggtactctgaactttcaaggaggccagagcaggaaagggaaaggaataacccccaccacccccaacacaagagaggcacaaattagagggctgggcacaggctgtagccctgggtgagggggtaagcagcttgacagttgctctgtggtctctgggatataattctgcccaaggctagaaccacagagaagagtttgcactcttaagtccaggaaggggactacctggaaggcctgagaacaaaggagaaagtttagcacactaaacacatggccaggaccctagggacacaaggcagctggagagtgggatctcttgttaaatggcatggtaggcagattagagtcctggctataatccctagggccccaatcctagtagttacgtgctaaccaacacattaccctgaggcttctgggagaacaagagccctgaggaagaagcagtaagaccaggcatgagaaaacccagaaagccagctcagttcccaagaaggctggcacatggggcctgagaattcttaaatggccattgtcactggtacttgctcagcctttccaggcccctctgatgagctctctaatcagcaggaccaaggtgtgaagtgggaatgaacatggatccatcccattggatggagaagaaaggtggacagcctgttcgtctctcatgtcagcctagggctgggaacagtttgtgaggacttatctgttgtacctgccaaaagttaattagtaactcaccgtcgagagtgaattaacaggacaaacgtaatccaacatgccagtgtgggtaggacacagttccctaatcagcccttggcccccagatgcaggctctcccctcccctctgagacctctctgggaatagcagacaagagaatgtcagggcagaaacctgctggactaggctctcagcagcccagctcctccctgggggaatcccccagaattcctcactgtgtgacacagttttctcccatgtcctgggcatatctgtctgacatggtggtccttaagtcctcaatgtcacgacgcagctgttgaacctcttctagtttcctcttgatcacatctggcttctgcaaatctagctgagtctctgggtgctgtgagtgaatgcccaggagcagggagagattggggtcatggccctgggccctctgggtcacaatgctacagacagcctgcagatcttgaaggcaactggccaactcctggtgcagctcaagtgccagctgggccgtgtctggtgaaggtggagaccctggttgggcctggcgcaggtgttcctggagtgtcagattcttctcaatcaagtcctggttttgcactgaaagctccttcacggctgtgcgcagctgctgcagggctgaatcccttcgctgggcctcctctctcagggcctggcttgttccttcttcttgagccacttcctgctctaggctctgtacttgtgagcgcaactgatccatcttctgctgctgcttctccacaatcttttggagcgaatcgtatcgcttctgccaggactccatttccacttctggaccttctccactggtctcctccacagactgtttatcttgcaggctatgtccagcggaggagaattctgcttctctctgcctcaggctttccagttgaatctccttctctctgcagattgcctgggtctcctccagcaaactctccagctcagtcactttctcctgcagctctgtgctcttcaactcagaatccttaagctgctggctctgcttctgatggtcttccagtgtgggcaggtcagccaggtagcgctccaaggtctcaatacgctgctgcttctcccggttctgctctgattccttctggcatttctttttcaaattattgatatgtttatcacgacctttgaccctttcttcctgtttcttcacttcctcagaatgcttctgcaacgccactttgagcgactctctgatgagctggacttcaacttcagaagcagagagtttcttttcaaggtcaatcttttctctgctcaaggcttctgtcttctgtgcaaactgtgcacgtaagaaagtgttttctcgctgcaattcctgtagcctcagcaagcagacatcaccaaagggggcagggcggcccaagagggcactgtggacttgcagttcgctctctcgcactttctgctccagctgagagatgtgtttcctctgcttgtcaatgagaagctctttttccttcagaaggtgttcattactgttcaagatgctgatccactgtgctggctctaagatgggcagtgaaggaccaaaagcagcaggatggtggcagatggctccattctgaagctgcatttgctccatctgtaaacgaatcaattccagctgctgccgacaagtgctgagttcacaagattgctctcggggatgccaagtgtcaggactcggctgccacacctgagagggcagaggcttggagagcccgggagcaggctggagtcccaaagggaggaccccactgctattagaatgtggtccattccgctcaaacactgccccgctgcccggtgccttcttggcctcaggcaacactctgtacaactccttacttgtgctggttcttgggttgtggaagcggactcggtggtgaggatctgaataaagtgtctccatcattgccgactgattgagggtagattccatgctaggaatatcaaacttcctcgcctcttcttgtctttcatggcccactgctggaaaccaggactgctcaattccattttctccagtagcaccagagaaatacatgagatctctagataggcctggagaatgtttcattgcaccgaggtctccatttcttgtcattcccacactttcagccaaccctgacaaagggagtttagaggaagagggtccaacaggtgtagaatttggcttggcaggagaggtccctaaagtagaaggcatcacatgggctgttggaatggttacgtggcttttgatgggctggaaaggaggactgccacttgagctgcaaaaatcctccgcaatatctgagcatgatgtaccaatggctgtgtccccactgtcggctacacttgaacagcggctgaagcggctccgaaagggctccgagataactggggtctgccattcagtccccagggaactgcccttctgaatcacatcggaactcggtgaagtgacgtgagagatcccctcagttggatatttctcctgcatggccatcaatcacagttatttaagccaaacgggcctgaaagcgggcggcgaaatccctcactcgggaagactgactgcagccactacgtctgcggtgagcggtggttccctccctcagctcctctaacggccgttgcan

SEQ ID NO: 13170 - DNA, 5590 bp, Homo sapiens
  misc_feature 1, 2, 3, 4, 5, 6, 7, 8, 9, 10, 11, 12, 13, 28, 5562, 5563,5564, 5565, 5566, 5567, 5568, 5569, 5570, 5571, 5572, 5573,5574, 5575, 5576, 5577, 5578, 5579, 5580, 5581, 5582, 5583,5584, 5585, 5586, 5587, 5588, 5589, 5590: n = A,T,C or G
nnnnnnnnnnnnncggaagtcttctagnattaattaacgcggtgggtgggggttgctttttggagtgctggggaacttttttcccttcttcaggtcaggggaaagggaatgcccaattcagagagacatgggggcaagaaggacgggagtggaggagcttctggaactttgcagccgtcatcgggaggcggcagctctaacagcagagagcgtcaccgcttggtatcgaagcacaagcggcataagtccaaacactccaaagacatggggttggtgacccccgaagcagcatccctgggcacagttatcaaacctttggtggagtatgatgatatcagctctgattccgacaccttctccgatgacatggccttcaaactagaccgaagggagaacgacgaacgtcgtggatcagatcggagcgaccgcctgcacaaacatcgtcaccaccagcacaggcgttcccgggacttactaaaagctaaacagaccgaaaaagaaaaaagccaagaagtctccagcaagtcgggatcgatgaaggaccggatatcgggaagttcaaagcgttcgaatgaggagactgatgactatgggaaggcgcaggtagccaaaagcagcagcaaggaatccaggtcatccaagctccacaaggagaagaccaggaaagaacgggagctgaagtctgggcacaaagaccggagtaaaagtcatcgaaaaagggaaacacccaaaagttacaaaacagtggacagcccaaaacggagatccaggagcccccacaggaagtggtctgacagctccaaacaagatgatagcccctcgggagcttcttatggccaagattatgaccttagtccctcacgatctcatacctcgagcaattatgactcctacaagaaaagtcctggaagtacctcgagaaggcagtcggtcagtcccccttacaaggagccttcggcctaccagtccagcacccggtcaccgagcccctacagtaggcgacagagatctgtcagtccctatagcaggagacggtcgtccagctacgaaagaagtggctcttacagcgggcgatcgcccagtccctatggtcgaaggcggtccagcagccctttcctgagcaagcggtctctgagtcggagtccactccccagtaggaaatccatgaagtccagaagtagaagtcctgcatattcaagacattcatcttctcatagtaaaaagaagagatccagttcacgcagtcgtcattccagtatctcacctgtcaggcttccacttaattccagtctgggagctgaactcagtaggaaaaagaaggaaagagcagctgctgctgctgcagcaaagatggatggaaaggagtccaagggttcacctgtatttttgcctagaaaagagaacagttcagtagaggctaaggattcaggtttggagtctaaaaagttacccagaagtgtaaaattggaaaaatctgccccagatactgaactggtgaatgtaacacatctaaacacagaggtaaaaaattcttcagatacagggaaagtaaagttggatgagaactccgagaagcatcttgttaaagatttgaaagcacagggaacaagagactctaaacccatagcactgaaagaggagattgttactccaaaggagacagaaacatcagaaaaggagacccctccacctcttcccacaattgcttctcccccaccccctctaccaactactacccctccacctcagacaccccctttgccacctttgcctccaataccagctcttccacagcaaccacctctgcctccttctcagccagcatttagtcaggttcctgcttccagtacttcaactttgcccccttctactcactcaaagacatctgctgtgtcctctcaggcaaattctcagccccctgtacaggtttctgtgaagactcaagtatctgtaacagctgctattccacacctgaaaacttcaacgttgcctcctttgcccctcccacccttattacctggagatgatgacatggatagtccaaaagaaactcttccttcaaaacctgtgaagaaagagaaggaacagaggacacgtcacttactcacagaccttcctctccctccagagctccctggtggagatctgtctcccccagactctccagaaccaaaggcaatcacaccacctcagcaaccatataaaaagagaccaaaaatttgttgtcctcgttatggagaaagaagacaaacagaaagcgactgggggaaacgctgtgtggacaagtttgacattattgggattattggagaaggaacctatggccaagtatataaagccaaggacaaagacacaggagaactagtggctctgaagaaggtgagactagacaatgagaaagagggcttcccaatcacagccattcgtgaaatcaaaatccttcgtcagttaatccaccgaagtgttgttaacatgaaggaaattgtcacagataaacaagatgcactggatttcaagaaggacaaaggtgccttttaccttgtatttgagtatatggaccatgacttaatgggactgctagaatctggtttggtgcacttttctgaggaccatatcaagtcgttcatgaaacagctaatggaaggattggaatactgtcacaaaaagaatttcctgcatcgggatattaagtgttctaacattttgctgaataacagtgggcaaatcaaactagcagattttggacttgctcggctctataactctgaagagagtcgcccttacacaaacaaagtcattactttgtggtaccgacctccagaactactgctaggagaggaacgttacacaccagccatagatgtttggagctgtggatgtattcttggggaactattcacaaagaagcctatttttcaagccaatctggaactggctcagctagaactgatcagccgactttgtggtagcccttgtccagctgtgtggcctgatgttatcaaactgccctacttcaacaccatgaaaccgaagaagcaatatcgaaggcgtctacgagaagaattctctttcattccttctgcagcacttgatttattggaccacatgctgacactagatcctagtaagcggtgcacagctgaacagaccctacagagcgacttccttaaagatgtcgaactcagcaaaatggctcctccagacctcccccactggcaggattgccatgagttgtggagtaagaaacggcgacgtcagcgacaaagtggtgttgtagtcgaagagccacctccatccaaaacttctcgaaaagaaactacctcagggacaagtactgagcctgtgaagaacagcagcccagcaccacctcagcctgctcctggcaaggtggagtctggggctggggatgcaataggccttgctgacatcacacaacagctgaatcaaagtgaattggcagtgttattaaacctgctgcagagccaaaccgacctgagcatccctcaaatggcacagctgcttaacatccactccaacccagagatgcagcagcagctggaagccctgaaccaatccatcagtgccctgacggaagctacttcccagcagcaggactcagagaccatggccccagaggagtctttgaaggaagcaccctctgccccagtgatcctgccttcagcagaacagacgacccttgaagcttcaagcacaccagctgacatgcagaatatattggcagttctcttgagtcagctgatgaaaacccaagagccagcaggcagtctggaggaaaacaacagtgacaagaacagtgggccacaggggccccgaagaactcccacaatgccacaggaggaggcagcagcatgtcctcctcacattcttccaccagagaagaggccccctgagccccccggacctccaccgccgccacctccaccccctctggttgaaggcgatctttccagcgccccccaggagttgaacccagccgtgacagccgccttgctgcaacttttatcccagcctgaagcagagcctcctggccacctgccacatgagcaccaggccttgagaccaatggagtactccacccgaccccgtccaaacaggacttatggaaacactgatgggcctgaaacagggttcagtgccattgacactgatgaacgaaactctggtccagccttgacagaatccttggtccagaccctggtgaagaacaggaccttctcaggctctctgagccaccttggggagtccagcagttaccagggcacagggtcagtgcagtttccaggggaccaggacctccgttttgccagggtccccttagcgttacacccggtggtcgggcaaccattcctgaaggctgagggaagcagcaattctgtggtacatgcagagaccaaattgcaaaactatggggagctggggccaggaaccactggggccagcagctcaggagcaggccttcactgggggggcccaactcagtcttctgcttatggaaaactctatcgggggcctacaagagtcccaccaagagggggaagagggagaggagttccttactaacccagagacttcagtgtcctgaaagattcctttcctatccatccttccatccagttctctgaatctttaatgaaatcatttgccagagcgaggtaatcatctgcatttggctactgcaaagctgtccgttgtattccttgctcacttgctactagcaggcgacttacgaaataatgatgttggcaccagttccccctggatgggctatagccagaacatttacttcaactctaccttagtagatacaagtagagaatatggagaggatcattacattgaaaagtaaatgttttattagttcattgcctgcacttactgatcggaagagagaaagaacagtttcagtattgagatggctcaggagaggctctttgatttttaaagttttggggtggggggttgtgtgtggtttctttcttttgaattttaatttaggtgttttgggtttttttcctttaaagagaatagtgttcacaaaatttgagctgctctttggcttttgctataagggaaacagagtggcctggctgatttgaataaatgtttctttcctctccaccatctcacattttgcttttaagtgaacactttttccccattgagcatcttgaacatactttttttccaaataaattactcatccttaaagtttactccactttgacaaaagatacgcccttctccctgcacataaagcaggttgtagaacgtggcattcttgggcaagtaggtagactttacccagtctctttccttttttgctgatgtgtgctctctctctctctttctctctctctctctctctctctctctctctgtctgtctcgcttgctcgctctcgctgtttctctctctttgaggcatttgtttggaaaaaatcgttgagatgcccaagaacctgggataattctttactttttttgaaataaaggaaaggaaattcagacaaaaaaaaaaaaaaaaaaaaaaaaaaaaaaaaannnnnnnnnnnnnnnnnnnnnnnnnnnnn

SEQ ID NO: 13171 - DNA, 3138 bp, Homo sapiens
  misc_feature 1, 3133, 3134, 3135, 3136, 3137, 3138: n = A,T,C or G
nataggtagtctaccacgcgtccggtagttacaggatgagaaggctataaaacttcccttgagtcactcacagttcatttgagggccaataacgcccccaaaatctgtttctaattttacagaaatcttttgaaacttggcacggtattcaaaagtccgtggaaagaaaaaaaccttgtcctggcttcagcttccaactacaaagacagacttggtccttttcaacggttttcacagatccagtgacccacgctctgaagacagaattagctaactttcaaaaacatctggaaaaatgaagacttgggtaaaaatcgtatttggagttgccacctctgctgtgcttgccttattggtgatgtgcattgtcttacgcccttcaagagttcataactctgaagaaaatacaatgagagcactcacactgaaggatattttaaatggaacattttcttataaaacattttttccaaactggatttcaggacaagaatatcttcatcaatctgcagataacaatatagtactttataatattgaaacaggacaatcatataccattttgagtaatagaaccatgaaaagtgtgaatgcttcaaattacggcttatcacctgatcggcaatttgtatatctagaaagtgattattcaaagctttggagatactcttacacagcaacatattacatctatgaccttagcaatggagaatttgtaagaggaaatgagcttcctcgtccaattcagtatttatgctggtcgcctgttgggagtaaattagcatatgtctatcaaaacaatatctatttgaaacaaagaccaggagatccaccttttcaaataacatttaatggaagagaaaataaaatatttaatggaatcccagactgggtttatgaagaggaaatgcttgctacaaaatatgctctctggtggtctcctaatggaaaatttttggcatatgcggaatttaatgatacggatataccagttattgcctattcctattatggcgatgaacaatatcctagaacaataaatattccatacccaaaggctggagctaagaatcccgttgttcggatatttattatcgataccacttaccctgcgtatgtaggtccccaggaagtgcctgttccagcaatgatagcctcaagtgattattatttcagttggctcacgtgggttactgatgaacgagtatgtttgcagtggctaaaaagagtccagaatgtttcggtcctgtctatatgtgacttcagggaagactggcagacatgggattgtccaaagacccaggagcatatagaagaaagcagaactggatgggctggtggattctttgtttcaacaccagttttcagctatgatgccatttcgtactacaaaatatttagtgacaaggatggctacaaacatattcactatatcaaagacactgtggaaaatgctattcaaattacaagtggcaagtgggaggccataaatatattcagagtaacacaggattcactgttttattctagcaatgaatttgaagaataccctggaagaagaaacatctacagaattagcattggaagctatcctccaagcaagaagtgtgttacttgccatctaaggaaagaaaggtgccaatattacacagcaagtttcagcgactacgccaagtactatgcacttgtctgctacggcccaggcatccccatttccacccttcatgatggacgcactgatcaagaaattaaaatcctggaagaaaacaaggaattggaaaatgctttgaaaaatatccagctgcctaaagaggaaattaagaaacttgaagtagatgaaattactttatggtacaagatgattcttcctcctcaatttgacagatcaaagaagtatcccttgctaattcaagtgtatggtggtccctgcagtcagagtgtaaggtctgtatttgctgttaattggatatcttatcttgcaagtaaggaagggatggtcattgccttggtggatggtcgaggaacagctttccaaggtgacaaactcctctatgcagtgtatcgaaagctgggtgtttatgaagttgaagaccagattacagctgtcagaaaattcatagaaatgggtttcattgatgaaaaaagaatagccatatggggctggtcctatggaggatacgtttcatcactggcccttgcatctggaactggtcttttcaaatgtggtatagcagtggctccagtctccagctgggaatattacgcgtctgtctacacagagagattcatgggtctcccaacaaaggatgataatcttgagcactataagaattcaactgtgatggcaagagcagaatatttcagaaatgtagactatcttctcatccacggaacagcagatgataatgtgcactttcaaaactcagcacagattgctaaagctctggttaatgcacaagtggatttccaggcaatgtggtactctgaccagaaccacggcttatccggcctgtccacgaaccacttatacacccacatgacccacttcctaaagcagtgtttctctttgtcagactaaaaacgatgcagatgcaagcctgtatcagaatctgaaaaccttatataaacccctcagacagtttgcttattttattttttatgttgtaaaatgctagtataaacaaacaaattaatgttgttctaaaggctgttaaaaaaaagatgaggactcagaagttcaagctaaatattgtttacattttctggtactctgtgaaagaagagaaaagggagtcatgcattttgctttggacacagtgttttatcacctgttcatttgaagaaaaataataaagtcagaagttcaagtgcaaaaaaaaaaaaaaaaaaagcggccgctcggttccaggttttatcacagaaagaggtgtttgtgcaaagcaagtgcatgaataacattagggtggtcatggaggagaagaatctagaagtggttttggatttctgtcatgagaactccaaatactggaaccaacagctcagagtaggcaaaagcattgttcagaaaatgcaagtgaatcacgtttgagatgtttgcactctatgctgtccctccaagaaatgtttattacannnnnn

SEQ ID NO: 13172 - DNA, 500 bp, Homo sapiens
  misc_feature 495, 496, 497, 498, 499, 500: n = A,T,C or G
actttttttttttttttttttggagacgcatcttctttaaagaagtaaaatttgtaaaaagactaaagagaactgaatgactgggagaataagttactggagagaaaggatgatttcattcaggctgctcttgctgtaaagtctaacaaggatgggacctgtttacgttaaacacacacacaagcgtgcacgtgcacgcgcgcgcgcacacacacacacacacacacacacacacacacacacactgaaagaaaaacctagaaccagatggcttcactgaagaattctaccaaacatttaaaggagaattaataccaatcctcctgaaactattacaaaagttgaagaggaggaacatttctaaatttattctatgagaccaatattatcctaataccaaagccagacaaatacactacaagaaaactacagaacaataatattcctggtgaatattgatgcaaaaatcctcaacaaaatactagcaaactgaannnnnn

SEQ ID NO: 13173 - DNA, 1608 bp, Homo sapiens
  misc_feature 1, 2, 3, 4, 5, 6, 7, 8, 9, 10, 11, 12, 13, 14, 15, 16, 17,18, 19, 20, 21, 22, 23, 24, 1607, 1608: n = A,T,C or G
nnnnnnnnnnnnnnnnnnnnnnnnggccgctggatgcaggaaagtttttatttttaggtgtacatcggctcagtggaattgcatccagaaaatctaagcatagatcaaagaaaacgaatgtcttttaagcattttgaggcaggaattacgtgaagcaggaagcaggcttacagaagcaagaacaaagtccattaattatcttgtgacacttttgcaacatgtcttacatctctgggaaaacttagtatgcagcttatgcttatctgtcttgtgaccttgcagctgtacaaggagggaagaaaacacgagcttacagagcctacaaaatacctgaagggcagatatggttaatgtttcttgggactggcagttaatatccttctttaactctaacttcaggggggctacttaaattctttttagccttggttggtacagcaattcattctatgagctattatttctgttactataattttactattattacttatgctattatcctattttaattttccacttcattcccccctttggtgctctatataaatgttggttaatagcaccacagttgtttattttttcttgagtcggtacatattattcttggggcaatacttagtcaatgccattatttgagtagtagtgtatttggccacaactgcctctatagttgactgaacacttctgatgagaagaggtaggagacaagggagaattaggcaggcacctgtgataagcaggaacccacctattaaggttttgaacccactaaaggttgaaaaccatccttcaaagagagaatctggagaccaacctgaccaggtttgaactggaacttgggctaacttccacatcctggcagtaattcccatgacagctcgcctattgtctacgtctaaacagcagtttgttagattaaacttcccacatactcctccttctgaggctaggaggtaatctagtgccagcctgttttgatatatggcattccttatctgtgtagcttgtaacagctagtaaatcttgatgttcataggttcatcaaaaagctcttgatgtttcataggttattatttcaagaacagcctgtaaccttatgatacagttgagcatataaattggggtgtggtatccccattacctattttgtgcctaggtagctggcccatagtatttaatgattttttcaggaggccattgattatttttctagcctcctatgtctatgtcttttttgatatttatatttatttttgagatcatgctccttttagttcttttattctcattatagactggatatcctaagagttccccttgctttagaggaattagaaagaaggatggcttgattgttcctaatacacatgctcttgtccatttagctggcagttgctgatatgcctgtgctccacagatccatataggccttttcctgaacaaaacagtaacataataataagataatcagtattactaagatcactactaggcttataagttctatccacatttacttatctagtgaagactcctcaagctttggccatgcgtagactagtcagcttccagtgtgtgactacagcagggtttgacttctcaann

SEQ ID NO: 13174 - DNA, 272 bp, Homo sapiens
ccgggcaggtacgcgggggcgaccggggttcggcgctcgggtgaggagctggtggcgtcggcaggttcgaggcgattcgagctccagctaggatgatcgaggttgtttgcaacgaccgtctggggaagaaggtccgcgttaaatgcaacacggatgataccatcggggaccttaagaagctgattgcagcccaaactggtacctcggccgaatgttgcaggctactctctgccgaccaggccgccgcccgtccctcgtgactacccccgcgt

SEQ ID NO: 13175 - DNA, 1101 bp, Homo sapiens
  misc_feature 1101: n = A,T,C or G
acgtgggcctgactcctcctcggtgcccagctcagtattggcaactaggagagtagtgagattgaacttggccttgaggaacagctgcctctagagttggatcagacaagggtgctgagagccgggactcacaaccaaaggagaaatgagcaatccgcggtctttggaagaggagaaatatgatatgtcaggtgcccgcctggccctaatactgtgtgtcaccaaagcccgggaaggttccgaagaagacctggatgctctggaacacatgtttcggcagctgagattcgaaagcaccatgaaaagagaccccactgccgagcaattccaggaagagctggaaaaattccagcaggccatcgattcccgggaagatcccgtcagttgtgccttcgtggtactcatggctcacgggagggaaggcttcctcaagggagaagatggggagatggtcaagctggagaatctcttcgaggccctgaacaacaagaactgccaggccctgcgagctaagcccaaggtgtacatcatacaggcctgtcgaggagaacaaagggaccccggtgaaacagtaggtggagatgagattgtgatggtcatcaaagacagcccacaaaccatcccaacatacacagatgccttgcacgtttattccacggtagagggatacatcgcctaccgacatgatcagaaaggctcatgctttatccagaccctggtggatgtgttcacgaagaggaaaggacatatcttggaacttctgacagaggtgacccggcggatggcagaagcagagctggttcaagaaggaaaagcaaggaaaacgaaccctgaaatccaaagcaccctccggaaacggctgtatctgcagtagaagtagaaagaccaggaggagctttccttccagcattctttctgtctcacagaaatttagaggcagctcttacctctccccaagatcttctgttcccaaggccaaatggcacccagtttcttttccatcacacccttcatgcaggtcctcctgtccttattagagcaagccagccaaaacttagcacaaggcatggtggcaacattaacatcacctcccgtcaggcn

SEQ ID NO: 13176 - DNA, 312 bp, Homo sapiens
aggtacggcatcatcaccatgcgaggcctgacgacccctgagctccgggtatacccgcacaaaaccctctacgtccctaatcggaaggtgaattctatgtgctgggcctcactgaatcacttggattcccaccttctgctgtgcttcgtgggacttgcagatactccaagctgtgccgtgctgctcccagcgtcgctgttcataggtagcttcccaggaatgcgtcggcctggcatgctttgcagtttccagatccctgatgcctggtcctgtgcctggtccctgagcatccacgcgtatcactctttcagt

SEQ ID NO: 13177 - DNA, 528 bp, Homo sapiens
  misc_feature 523, 524, 525, 526, 527, 528: n = A,T,C or G
actttttttaatttttgtgtttttagtagagatggggttccaccatgttggccaggctggtctcaaactcctgacctcaggtgatctgtccgccttggcctcccaaagtgctgggattacaggtgtgagccaccacacctggctgagttcaactttttgtaagtagtatccacttaaggcatttgctaactcctaattgtgtgtgctagggctcagacacaaagtttttcactagccaaaattcaacactctcacagaataggagggacaaatattgtagtttatggtcttcaaaggaggagagagccatggtaatacaccctaggctttcaacttgatatctgagaaaaattttgttctgagagtaagagcaaaccaaaatagatcagcctcaacagttactagagtggtatgctaatattctatctgccgaaagaaaatggaattctctttggaggaagataacatcatccagagcttctgtaattttccataagtatagggtgcagcattcagtcaaaannnnnn

SEQ ID NO: 13178 - DNA, 550 bp, Homo sapiens
  misc_feature 548, 549, 550: n = A,T,C or G
acaacaaggattttgcaatgccatattctatagagaaaacaaacttcaatcaaatttctttgatatggtagcaggaagagttcagggcatggctgtgtcaagttttctcatgtgggacctgaccttacatgcttcttggatgggccacactggtgaccacgcgaggctttgatgctctcatcacagggacctgttctgagttttatgttgtctttgttggtttcaacattttatgccaaatcagcaagaaatttaaatcttttttcatcatgatcattgtattcattctccttcattcattggtgagcctgttcctggaagccatctgtaccctcggacagccagcaacgactgagctacacatggatagaaccatgaaccacaagaaatacccctgaattctgaactatttccatatcaacttctcccaaaatacccacagccagtccaacaccatccaactggatgggagcagggaaggcggggaatcagagtggaaagagacttagctgagttatttttattatttttaaaagccttattcatannn

SEQ ID NO: 13179 - DNA, 314 bp, Homo sapiens
  misc_feature 312, 313, 314: n = A,T,C or G
acagagttacctggttgccatggtgtgtgaggatccttttcacctgcgttgctgagagtccaggtttattcatcatgctgggggaggtcttgatccctcatccctgaggccaccacagtgaggcagggggacgcatctcctcatgagagatgatcagggacctcttcctggatgagaaaggcaatcgcggatgagcccccaagttgttagaaacaagagcttggagtcacaaggaaaacaagcacccaaatgccaaatgaaggatttctcagcaaagcaaatttacttctgcagaagggtgctggtcacacnnn

SEQ ID NO: 13180 - DNA, 507 bp, Homo sapiens
  misc_feature 1, 2, 3, 506, 507: n = A,T,C or G
nnnacagccatcaaatcaatattgtggctactgatgcggaggaagggacaggtgcggaggccaatgccactcagaatatctgcatttctgcacaaatgggatcaatgacctttgaagacaccatcaatttttaccatccaaatttccccttcagtgggaagataagagtttggggccatgatgactccttcctcaagaaccatctagtggttctggtgatttatggcacaaatggaaccttcaaccagaccctggttactgataacaatggcctatctccctttaccttggagacatccggttggaatgggacagacgtttctctggagggaaagtttcaaatggaagacttattatatactccggaacaagtgccacgttactaccaaaatgcctacctgcacctgcgacccttctacagcacaacccgaagcttccttggcattcaccggctaaacggccccttgaaatgtggccagccccaagaagggctggtggattattann

SEQ ID NO: 13181 - DNA, 431 bp, Homo sapiens
  misc_feature 431: n = A,T,C or G
acttttttttttttatttttttttttttaagggagagaatcgtttggtttggggagaatatttttatgggctaagattaagttgttcacaaaaacctgtcaaattttaattacccaaagtggtaacatcaaaacttcatttacttgcttattccaaaagggagttgaatatatttcacttactcaacagcagtttttccagtagatctagtaaagactgttatagcacctgggcgcggtggctcacacctgtaatcccagcactttgggaggccgaagcaggcagatcacttgaggtcaggagtttgagaccagcctgcccaatatggtgaaaccctgcctctactaaaaacacaaaaattaaccgggcatggtggcaagcgcctgcagtcccagctactcatgaggctgaggcaagagaattgcctgaan

SEQ ID NO: 13182 - DNA, 395 bp, Homo sapiens
actttttttttttttttttttttgtttttgctttacctgagtatgtgcttagaaatcaggagaggaaggggaggaggtgggagagagtgtgcaggggagggctgacgcttagatgccttgggaagtcttctgttccaccagacaaattctttctacgagttccttccagagctcagtatcaccagaggatgcagtcagagggcaaggagaccggaaggggttctggtgtgtctgtgaaatttggctgcagggtctaaatgaaattgacctttgggccaaaagaatcttcataaaactaaaaacagaccaaaccccaaacctgcttctgagatctcactgatgccctgtgattccctattactttggctgccaggaagctcggagctcaatttggt

SEQ ID NO: 13183 - DNA, 591 bp, Homo sapiens
  misc_feature 586, 587, 588, 589, 590, 591: n = A,T,C or G
accacatatcccgtttgatttctatttgtgtgaaatggccctcccctgggtcaagccaacacctgatgcaacttccttcagtgaggccttcctgaagagcaatcaggacccagctcctgattctgctgagcaggcctcttacttttccctggtgacaaaaataaacaatgtgattggcaatctgtggctccagggacatctgaagtgcaaattgaagaagttggataggtgggatcctataaaaagagaatggtcactacaggccacagtgcagctgccccgctggtaatacacaagattctgccaaggctggaagctgttgctgccctgggaaacaaagtcgggggaagcctgagagcacaggatccttctgaagttttgaccatgcctaccatgctgacgaaactggcttggaaatcagttcttctgatgctacagtgaagactgtcattacaacagtgccacccagtcttccaaaactggacccagaactccgtttggatatcaaggtattgcagggtgccttagcagccattcggcatgcccgctggttcaaggaaaatggctctcagttcacagttaaagnnnnnn

SEQ ID NO: 13184 - DNA, 1037 bp, Homo sapiens
  misc_feature 1037: n = A,T,C or G
acgcgggggtgatcaaagagggagacacagacacagagagacaaaggcaaggaggactgtctgggagccacgcgggcgatacagtttccgaggcacgccgcgtcccgcctagcctgttgaacagtgcggacgcagtgcggatttgcgaggcgcgccctggagctgctagagatccggaagcacagccccgaggtgtgcgaagccaccaaacatcccagttaccagtgtccttgaattgatagtggcttctgtttgtcagtctcatataagaactacagctcatcaggaggagatcgcagcagggtaagagacaccaacaccatgttctgcacgaagctcaaggatctcaagatcacaggagagtgtcctttctccttactggcaccaggtcaagttcctaacgagtcttcagaggaggcagcaggaagctcagagagctgcaaagcaaccgtgcccatctgtcaagacattcctgagaagaacatacaagaaagtcttcctcaaagaaaaaccagtcggagccgagtctatcttcacactttggcagagagtattgcaaactgattttcccagagttgaacggctgaatgtggcacttcagagaacattggcaaagcacaaaatacaagaaagcaggaaatcttggaaagagaagactttgaaaaaaacaatttgcagagcaagcagttgcagcaggtggagaccattggcgatgcctatggtgtagctgggggattacccaagagagtgatactcatgctgttcagatagcgctgatgggccggacgaagaaggaggctctctgatgaagtatgctcccaggggaactatcaagatgcgaatggagacctggatccggagggcgtcgggataaagccggacggcgggaaaaggcgcgaaaaatagcgcggggccgaacaggggccaatacatcaaggcgggcggtaccaacggagacaaaccgaaccgagggggggcgggaaaaccaaggaggcaggcgacaaccgcgggccgcccggcgcaacccgcgtcgcgan

SEQ ID NO: 13185 - DNA, 696 bp, Homo sapiens
  misc_feature 465, 486, 487, 501, 502, 513, 514, 532, 533, 545, 546, 561,562, 568, 569, 578, 579, 603, 604, 605, 621, 623, 624, 649,650, 660, 661, 669, 670, 686, 687, 690, 691, 692, 693, 694,695, 696: n = A,T,C or G
caattgggtgttcggcggagggaccaagctgaccgtcctaggtcagcccaaggctgccccctcggtcactctgttcccgccctcctctgaggagcttcaagccaacaaggccacactggtgtgtctcataagtgacttctacccgggagccgtgacagtggcctggaaggcagatagcagccccgtcaaggcgggagtggagaccaccacaccctccaaacaaagcaacaacaagtacctgcccgggcggccgcccgggcaggtacgtgggcctgtctgcaaacccagtgtgccgtgccagccaaggacagggtggactgcggctacccccatgtcacccccaaggagtgcaacaaccggggctgctgctttgactccaggatccctggagtgccttggtgtttcaagcccctgcaggaaagcaggaatgcaaccttctgagggcacctccagcttgcccccggnccgctctagaaaactagtggnnatcccccgggctgnncaggaattcgnnatatcaagcccttatcgnnataccgtcgacnnctcgaggggggggcnnccggtnnacccagctnntttgttccctttttagtgagggtnnntaattgcgcgccttgngnncgtaatcatttggtcatttagctgnntttccttgtnngtgaaatnntgttatccgcttcacnnaannnnnnn

SEQ ID NO: 13186 - DNA, 564 bp, Homo sapiens
  misc_feature 538, 552, 553, 554, 555, 556, 557, 558, 559, 560, 561, 562,563, 564: n = A,T,C or G
acaaagtgacggcaaaatgttttggtcatttgacgaagcaattgatgacattggctgatggacgtgtggtgttggctctagaaggaggacatgatctcacagccatctgtgatgcatcagaagcctgtgtaaatgcccttctaggaaatgagctggagccacttgcagaagatattctccaccaaagcccgaatatgaatgctgttatttctttacagaagatcattgaaattcaaagcaagtattggaagtcagtaaggatggtggctgtgccaaggggctgtgctctggctggtgctcagttgcaagaggagacagagaccgtttctgccctggcctccctaacagtggatgtggaacagccctttgctcaggaagacagcagaactgctggtgagcctatggaagaggagccagccttgtgaagtgccaagtccccctctgatatttcctgtgtgtgacatcattgtgtatccccccaccccagtaccctcagacatgatctttgtctgctgactgggtggcacagaattcaatngaacataaacaacnnnnnnnnnnnnn

SEQ ID NO: 13187 - DNA, 1736 bp, Homo sapiens
  misc_feature 1, 2, 3, 4, 5, 6, 7, 8, 9, 10, 11, 12, 13, 14, 15, 16, 17,18, 19, 1735, 1736: n = A,T,C or G
nnnnnnnnnnnnnnnnnnncgttgttcacatttttttattttctcaatcatcgtttttaattggctttataagctaaagtgcatagtaaagacaaaaaaaggaaatgcatacataggaaagggacacttagaaaggacctgagatacctaaatgtctgttctaaggaacactggaaggagggaatgcagatgcaggcagcaggcctgggtctggcttctggcctgggtttggagcctgcagaagctgctggcatgctagctctacccagggaacagctccaagagggagtgttgggatgaaggatcacacttgggataggtgctgctggtaccaaatgtgattttagctccattcagggcccaggggtaaccagcagtgccaccaaacctgtcagcaggtaaagaaacttctaccatcccaaagtgcaggttacaggaaaggggtcactccttaatgacgacctgggcctgctgcataaggcccatcttatgcagcatgtgggctgtcccatcttccccactctcagtgactatgtaactgtgtcagggtgagttggtgcagtcttttgtcttatcacgtgcctccatctcctggaggcagggtgcccaaggagggcagggaggggttcttgtgctcctttaagggataagcagttcataaacaactatgggcctctgtttattatgagagttagtctgcaaattagggcctggcaattagaatcggtctgcatcaatgagctcatactctgttcctggggaacaatgtagaataaacatctgaccaagtaaagacccagagataccactaggtggccctaggtggaagccccaaacatgttccagggagtctgtccactaatttgcaggagagaaggggtgagatttgttaactttgctctcagttctggagataaagtgcttactctagcgcaggggtaaatctagaaacaaatgtgggtgagccctaaaagtggatccttaagtaggtgctaagactaaaaagaatgattttttttttttgagacagagtcttgctcctgtcgcccagactggagtgcaatggcatgatctcagctcactgcaacctccgcctcctgggtttaagcgattcttctgcctcagcctcccaagtagctgggattacaggcgcccgccataacgcccagctaatttttgtatttttagtagagacggggtttcgccatgttggtcaggctggtctcgaactcctgacctcgtgatccgcctgcctcggcctcccaaagtgctgggattacaggcgtaagccactgcgcccagcctaaaaaggatgataataaaaaacaaacttcagttccttcattagggagctggccccagtcattcagtggcgagggcaaaaggcagtggtgtaccatcttcctacatcatcccctggatctcctcaaagttcatcaggttgttggccgtgtcagaccaggcagcatgctgggctccatccatttcagaagcaagctggttgcttctttccagagtatgatttgtgccaccaatcacttccttacagtcaggacacgtgcccctctccatggctcccccacaatcgccaatcacatagatatggccattgcggcacttgaaccagtgaccacgaggataacctatggcactgacaatctgcactcgctcttcctctgagatgcccaggccagagcagggaagggtggctttcagagcttccatcttttcctgnn

SEQ ID NO: 13188 - DNA, 232 bp, Homo sapiens
acgcgggggcccttgtgacaggcggggacaccaaacaactcattacacaaagaggtaaggtcccagaccacgccaaagcttcctgagacctctcctcatctgtgcatggacggatgaccaactctggggcccaggctgttgcttcccagtataatgatgaatccgccatagtctggtgagtgtagaggctgactctggagcccaggctgtacctgcccggtcggccgccacc

SEQ ID NO: 13189 - DNA, 573 bp, Homo sapiens
  misc_feature 568, 569, 570, 571, 572, 573: n = A,T,C or G
acttttttttttttttttttttttttttgagacggagtctcgctgtgtcgcccaggctggaatgcagtggcgagatctcggatcttggctcactgcaacctctgcctcccgggttcaagcgattctcctgcctcaacctcccgagtagctgggactacaggcatgtgccaccaggcccggctaattttttgtatttttagtagaaacggggtttcaccatgttagccaggatggtcttgatctcctgacctcgtgatccacccaccttggcctcccaaagtgctggggctacaggtgtgagccactgaacctggccagttgaaactatttttaagaaagaaaaagcaagtccataactccagaacatggagacaagatgctgcttagtatactggcttaaaaaaaaaagttaaaaccttcattatattaaaaatattttttaaatttattttaaattatacactgtgaaattcacctttttggtgggcattttctatgaattttaacaaaggcatagcattatataactaccattccgaacagtttaattactccccccaaaattccnnnnnn

SEQ ID NO: 13190 - DNA, 1915 bp, Homo sapiens
  misc_feature 1, 2, 3, 4, 5, 6, 7, 8, 9, 10, 11, 12, 13, 14, 15, 16, 17,18, 19, 1914, 1915: n = A,T,C or G
nnnnnnnnnnnnnnnnnnnaataggatttattagttcaaattctttattaggatatgctaacaatgagactattatgatgaacccccacattttaaaccataggtttttatacaagtagcagtatcaaatttattgtaatattttactttgcacaaatcaaggaaatcctgattgaatctaggtagttacaaatggttttttaataattcactttgtactgtccagatattctttaattaaaatatccaaaattagaagaccagtagggcttttgtttcaaaagctaacaatacccaactactgcttgctttccttattatagacaaggcatgtgaggaacacctagacgtttttaaagccccaaaactaggatattgtgacacagaatgttttttattcagtgctgagatgggagtttatcccaagcgattgtcctggcccctcatacaactatagtggtgaccagtcaggggctgtgggtgaggagacctgccagaggtggctggaggcactttattgccagcctggcgggctggcgagcgccaatgaagtaaaatctggtgacacacttgagtttgcatgtggcattttattttattggttttttttaaaggaagagattataaaaagacatttcacattaaagatttgcagtcctgggacacagtttggaaaacactatttataaggttgcacatattacaaacagctcccaaatggtgaaactggtattctaagatgaaagcttaatgaacataatgaagtgaataaacgcgtgtgaactaatgtttaaaaagttagagcttgtctcaagtcagtacagctcttaagataataaatacagtaacactactttttatttctttgctcttttatccctttcaggttcgatttgctgctttgattactgtgttagcactggctgaaaaactaaaggagaattatattgtcttgctaccagaatccattcctttcttagcagagttgatggaaggtaattcccaaactattcccaaccattaaacaattaaggaataattcagtaaaattctgtgaaaatgtgcccaatgataatgcagatttggatataacgtgactagcagttgatccagtcctcatacaggcagctccagtctcaaatacaggcaggctcgagctcctgttttgagttgggtggagggagcaagttgcgaagtgaccacctcctgatcatttgagagtccgtttacagtgtaatcttcacgatcttttcttttgtggtggtttgtgatcatacaagcagattacagtagtgtttttaattaacctcatacatttatatgattgaagttttggtccccagattgtatggaaatgcctagtggcattaaggatgcggtaggatgtccacttttagtagcaaccgatgttcattcactactccatgttaggtgctttacttggattatctcacttaaaaaccacaacattttatctctgttttacaaaggaagaaactagaggcttaaaagatttcagttatttgacaaagatcacaagctagtgggtgtgacatggggagctgtgacagttctggaacataagtcttaggcccaggaaataacagtaaatgttattattaagggaggggtggtggagcaagtagatcagtcctttactgattcattgcttatctaagctacaaaagtacattctcctttgtttcttagctcttggaggggggaggtgtgagctactaaaggggtggcatccctaggaagtttgagttttggggactcttattcagcttccagtgcagatgtggggttcagtccagaggcagaagacgtgcaaggagttgtgccaagaatgtgatacgggtttgtctcctgatgtagatcttttctttctgtttctgtgcccgaccgaaatgnn

SEQ ID NO: 13191 - DNA, 928 bp, Homo sapiens
  misc_feature 1, 2, 911, 912, 913, 914, 915, 916, 917, 918, 919, 920, 921,922, 923, 924, 925, 926, 927, 928: n = A,T,C or G
nngcccttgcacccaccctcatgggtgacttgtctacgacaaaggcaggtacataacacttggaaaggtgcactcaatcaaatatgcaaatatcaatgcaaggctaccagaagggagacatcaagaaaatatgacgtagccagaagaacacaataactttccaatgaccagttccaaacaatggagatttataaattgccagacaaagaattcaaaataagtatcttaaagaagcccagtaagctgtaagatagtacttagcagcagtcttcctgtctggaaaggaaacattgctcagattggagatactggccattttatagacttcaaagcaacttaggccactgaactgtcaggcgggaaaacaggatgtcttccatttggaagcccctctgcttctaagaagttccagagaccagcccaggcccacagagttataaggattcatctgggcactgaagacatttgggacctcagtgaagtttctccgaggccagatggtcacattgattttctggaatcattttgaataaaaatgagcgaggtggtgaacacaatgcaaggctctccacgtactgtctggtattgttcaaccagctccacgactccctgagggcagagatgagcagatgttaatggataaagccaggtgggatgatgttataacatttctcctacagccccaaatctcccaactcctgcctgtgtgacctgagtaagactcggtgcaagaagacatcggtgttcccatctgtgaaatgaaggaattgacccccgaggatcttccatttctgacagtgctttggatttcattggttttgtcacaggtaccccccaaaagcctccatctttggataagtgattaaaactgctgagtaattttcaattaataaaagttcagcgctggctcnnnnnnnnnnnnnnnnnn

SEQ ID NO: 13192 - DNA, 1332 bp, Homo sapiens
  misc_feature 1325, 1326, 1327, 1328, 1329, 1330, 1331, 1332: n = A,T,C or G
gttgggcaaagcaatcatgatgtcagcagttccccatacaactttcctgaaatgcagggggatctcttggccccaattataagggaaacaccaaatcaaccataggtccaagaacaattgtctctggacggcagctatgcgactcaccgtgctgtgtgctgtgtgcctgctgcctggcagcctggccctgccgctgcctcaggaggcgggaggcatgagtgagctacagtgggaacaggctcaggactatctcaagagattttatctctatgactcagaaacaaaaaatgccaacagtttagaagccaaactcaaggagatgcaaaaattctttggcctacctataactggaatgttaaactcccgcgtcatagaaataatgcagaagcccagatgtggagtgccagatgttgcagaatactcactatttccaaatagcccaaaatggacttccaaagtggtcacctacaggatcgtatcatatactcgagacttaccgcatattacagtggatcgattagtgtcaaaggctttaaacatgtggggcaaagagatccccctgcatttcaggaaagttgtatggggaactgctgacatcatgattggctttgcgcgaggagctcatggggactcctacccatttgatgggccaggaaacacgctggctcatgcctttgcgcctgggacaggtctcggaggagatgctcacttcgatgaggatgaacgctggacggatggtagcagtctagggattaacttcctgtatgctgcaactcatgaacttggccattctttgggtatgggacattcctctgatcctaatgcagtgatgtatccaacctatggaaatggagatccccaaaattttaaactttcccaggatgatattaaaggcattcagaaactatatggaaagagaagtaattcaagaaagaaatagaaacttcaggcagaacatccattcattcattcattggattgtatatcattgttgcacaatcagaattgataagcactgttcctccactccatttagcaattatgtcacccttttttattgcagttggtttttgaatgtctttcactccttttaaggataaactcctttatggtgtgactgtgtcttattcatctatacttgcagtgggtagatgtcaataaatgttacatacacaaataaataaaatgtttattccatggtaaatttaaaacaaaaaaaaaaaaaaaaaaaaaaaaaagggggaaaaaatacccggggggcaaattaggggaccggtttttgtaaaggggccaaagggaggaaaaaaaaggagggggggaaaaannnnnnnn

SEQ ID NO: 13193 - DNA, 1286 bp, Homo sapiens
gcgtccgcgcgcgtggcggcgccggctccctagccaccgcggccccaccctcttccggcctcagctgtccgggctgctttcgcctccgcctgtggatgctgcgcctctccgaacgcaacatgaaggtgctccttgccgccgccctcatcgcggggtccgtcttcttcctgctgctgccgggaccttctgcggccgatgagaagaagaaggggcccaaagtcaccgtcaaggtgtattttgacctacgaattggagatgaagatgtaggccgggtgatctttggtctcttcggaaagactgttccaaaaacagtggataattttgtggccttagctacaggagagaaaggatttggctacaaaaacagcaaattccatcgtgtaatcaaggacttcatgatccagggcggagacttcaccaggggagatggcacaggaggaaagagcatctacggtgagcgcttccccgatgagaacttcaaactgaagcactacgggcctggctgggtgagcatggccaacgcaggcaaagacaccaacggctcccagttcttcatcacgacagtcaagacagcctggctagatggcaagcatgtggtgtttggcaaagttctagagggcatggaggtggtgcggaaggtggagagcaccaagacagacagccgggataaacccctgaaggatgtgatcatcgcagactgcggcaagatcgaggtggagaagccctttgccatcgccaaggagtagggcacagggacatctttctttgagtgaccgtctgtgcaggccctgtagtccgccacagggctctgagctgcactggccccggtgctggcatctggtggagcggacccactcccctcacattccacaggcccatggactcacttttgtaacaaactcctaccaacactgaccaataaaaaaaaatgtgggttttttttttttttaataaaaaaaaaaaaaaaaaaaaaaaaaaaaaaaaaaaaaaaaaaaaaaaaaaaaaaaaaaaaaaaaaaaaaaaaaaaaaaaaaaaataactaacgcacacagcaaaggaaaagaaagaacaagcaactggccaaaaacacagaacacagagacaccaaaaaagagggggggggggcacaaaacacagcacacagagagcggggcaaggatacacccaccaagcaccataggagagagggacagacaacacgcagggggacaactaaaagcggcagcgcgggcgaacaacacgtaggggaggacaaaaggagaggagggagagggggaaacacaccc

SEQ ID NO: 13194 - DNA, 9240 bp, Homo sapiens
  misc_feature 1, 9240: n = A,T,C or G
nagacggaagccgaacgagttcctcggcggctgcaggatgggggactccaaagtgaaagtggcggtgcggatacgacccatgaaccggcgagagactgacttgcataccaaatgtgtggtggatgtggatgcaaacaaggttattcttaatcctgtaaatacgaatctttccaaaggagatgcccggggccagccgaagtgttttgcttatgatcattgtttctggtctatggatgaatctgtcaaagaaaagtatgcaggtcaagatattgttttcaagtgccttggagagaatatcctgcagaatgcttttgatggctacaatgcatgtatctttgcctatggacagactggctctggaaaatcttataccatgatgggcacagctgaccaacctggattaatcccaagactttgcagtggactctttgaacgaactcagaaagaggaaaatgaagaacagagttttaaagtagaagtgtcctacatggaaatttataatgaaaaagttcgagaccttcttgatcccaaaggaagccgtcagacgttgaaagtcagagagcatagtgtgttgggaccttatgtcgacggactttctaaactggctgccacaagctacaaggatattgagtcgttgatgtctgagggtaacaaatctcgcactgttgctgcaaccaacatgaacgaggagagtagccgatcccatgcagttctcaaaatcaccctcacacatactctctacgatgcgaagtctgggacatctggagagaaagtgggcaaactcagcctggtggatttagctggcagtgaacgagcaacgaagacaggcgctgcaggggacaggctgaaggaagggagcaacattaacaagtccctcacaaccctcggtctggttatctcagctcttgcagatcagagtgctggcaaaaacaagaataaatttgttccatatcgtgactcagttctcacttggctgctcaaagacagcctcgggggtaacagcaagaccgccatggtggctactgtgagtcctgcagctgataactatgatgaaaccctctcaactctgcggtatgcagatcgagccaagcacattgtaaaccacgctgtggtgaatgaggaccctaatgcccgaattatccgggatctccgggaagaagttgagaaactccgggagcagctgaccaaagcagaggcaatgaaatctccagagctaaaggaccggctggaagaatctgagaagctaatccaggaaatgactgtgacctgggaggagaaattaaggaaaacggaggagattgcacaggaacgacagaaacagcttgagagtcttggaatatctcttcagtcttcgggaatcaaagttggggatgataaatgcttccttgtgaatctgaatgctgacccagctctgaatgagcttctggtgtactatttaaaggaacatacattgatagggtcagcaaattcccaagatatccaactgtgcggcatgggaattcttcctgaacactgtattatagacatcacgtcagaaggccaggttatgctgactcctcagaagaacaccagaacatttgtaaatgggtcatctgtctccagtccaatacagctacaccatggggacaggatattatggggaaacaatcatttcttcagactcaatttgcctaaaaagaaaaagaaagcagaacgagaggatgaggaccaggatccctccatgaagaacgagaatagttctgagcagctggatgtagacggagactcctccagcgaggtgtccagtgaagttaactttaattacgaatacgcacagatggaggtcaccatgaaggccctgggcagcaatgatccgatgcagtccatattaaacagcctagaacaacagcatgaagaagaaaaacgatctgcactggagcgccagaggcttatgtatgagcacgaattggagcagctccggagaaggctgtctcctgagaagcagaactgccggagcatggacaggttttctttccactcgcccagcgctcagcaacgcttaagacagtgggctgaggagagagaagcaacgttgaataacagcctgatgaggctgagggaacaaattgttaaggccaatctattggtgagagaagctaattacattgctgaggagctggataaaagaacagaatacaaagttaccctacagattccagcctccagcctggatgccaacaggaagcgaggctctcttcttagtgagcctgcaatccaggtgagaagaaaaggaaaaggaaagcagatttggtctttggaaaaactggacaacaggctgttggatatgagagacctttatcaggagtggaaagagtgtgaagaagataacccagtaatacgatcatacttcaaacgtgctgatccattctatgatgagcaggaaaatcacagtctcattggggtggccaatgtcttcctcgagtcacttttctatgatgtgaagttacaatacgctgttcccatcatcaaccagaaaggagaggtggcaggtcggctgcacgtggaggtgatgcgactcagtggtgatgttggggagaggatcgcaggaggcgatgaggtggcagaggtctcctttgagaaggagacccaggagaacaaactggtgtgcatggttaaaatcctgcaagctactgggttgccacagcatctgtcccactttgtgttctgcaaatacagcttctgggatcaacaggagccggtgattgtcgctcctgaagtggacacctcctcctcttccgtcagcaaggagccgcactgcatggttgtctttgatcattgcaatgagttttctgttaacatcaccgaagactttatcgagcatctttccgaaggagcattggcaattgaagtatatggacataaaataaacgatccccggaaaaaccccgccctgtgggatttgggaatcatccaagcaaagacacgtagtcttcgggacagatggagtgaagtgaccaggaaattggaattctgggttcaaatcttggaacagaatgagaatggtgaatactgccctgtagaagtgatttctgcaaaggatgtcccaacaggaggaatcttccagctccggcaggggcagtcccggagagttcaagtcgaagtgaagtcagtgcaggaatctgggactttaccactgatggaagaatgtatactgtctgttggcattggatgtgtcaaagttagaccgctcagagcccccagaacacatgagaccttccatgaggaagaggaagacatggacagctaccaggatcgagatttagagagacttcgtagaaaatggctaaatgcattaacaaaacgtcaggagtacttggatcaacaattgcaaaagcttgtcagtaaacgtgataaaacagaggatgatgctgaccgtgaagcgcagcttctggagatgcggttgaccctaactgaggagaggaacgcggtgatggtcccctctgctggcagtggtattccaggggccccagcagaatggaccccagtacctgggatggagacacacattcctgttatattcctggacttaaatgctgatgatttcagctctcaggataatcttgatgacccagaagctggtggatgggatgcgaccttgactggggaagaagaagaggagttctttgaattgcagattgtgaagcagcatgatggggaggtgaaagcagaagcctcctgggactccgcggtgcatggctgccctcagctcagcaggggcacgcccgtggacgagcggttgttcctgatcgtgcgcgtgacggtccagctcagccaccctgctgacatgcaactggtgttacgcaagagaatctgtgtcaatgttcacggccgccagggttttgcacagagtctcctaaaaaagatgtctcatcgaagttctattcctggctgtggagtgacttttgaaattgtctccaatattccagaggatgcccagggagtggaagaacgggaagcattagcaagaatggcagccaatgttgaaaacccagcttctgctgactcggaggcttatattgaaaagtacctcaggagcgtgctggctgtagaaaacctcctgactttagatcgtctgcgccaggaagttgcagtgaaggaacagttaacaggaaaaggaaagttgagcaggaggagtatcagttctccaaatgtgaacagattgtctggaagccgacaagatctcattccatcatacagtctaggcagcaacaagggccggtgggaaagtcagcaggatgtatcccaaaccacagtttccagaggaatagctcctgcccccgccctctctgtttctccccaaaataaccattctccagatccaggactcagtaaccttgcagcatcctacttgaatcctgtcaaatccttcgtgccgcaaatgccaaagctcctcaagtctctctttcccgtccgcgatgagaagaggggcaagcggccgtctcccctcgcacaccagcccgtgccccgcatcatggtgcagtcagccagcccggacatcagggtgaccaggatggaggaggctcagccggagatgggccctgacgtgctggtgcagacgatgggggccccggccttgaagatctgcgacaaacctgccaaagtgccttccccaccgcctgtcatagctgtcacagcggtcaccccggctccggaggcacaggacgggccccccagccccctgagtgaagcctctagcgggtacttctcccacagcgtctccaccgcgaccctgtcggacgccctgggccccggcctggacgctgcggccccgccggggtccatgcccaccgcccctgaggccgagcccgaggcgcccatcagccaccccccaccgcccacggccgtccccgccgaggagccccctggcccccagcagctcgtgagccccggtcgggagcgccccgacctcgaggccccggcgcccggctccccgttccgcgtccggagggtgcgggcctcggagttgcgctccttctcgcgcatgctggctggggaccccggctgctccccgggggccgaggggaatgcgccggccccgggcgccgggggacaggccctggcctctgattccgaggaagctgacgaggtcccggagtggctccgagagggcgagttcgtcaccgtgggcgcccacaaaacgggcgtggtgagatacgtggggcctgccgacttccaagagggcacgtgggtcggcgtggagctcgacctgccctcaggtaagaatgacggttccatcggcgggaagcagtacttcaggtgtaaccctggctacgggctgctggtcaggcccagccgggtccgcagggccacgggccctgtgcggcggcgcagcacaggactccggctgggtgcccccgaggcccgccggagcgccaccctctcgggctccgccaccaacctggcctcgctgacagctgccctggccaaggccgacaggagccacaagaaccctgagaaccggaaatcctgggccagctgagccgctgccttagggcgaacttttctgggggtgcccggccccttttgagccctgccagtgacagccctgaggagccaggagcccggtggccccttccccaggggcagggcgatgaatgctttttgcacgacacagggctggtgacctccctgggcctctggaagctttgtttcttctgtacccgggtaaagtgggggcctcaactgtgcctcctccggtggatggaaggttctgggtgcccgcaggggctgggggatgctaggactgagaccctgggtggtgcagcgcctggtgatcttgctgtgtgcctgtgcctggggccttatgttgctctttctatcatttccattctggtggccccactaatgtcttaacctaaaccataattgtaaccagtgcctttcctccccactggagggcaagcccccccacccacccaggatgtcctggctcactccgcaagccccccagcctcccaccctggtcccagtttcccgcaaagtgcctctgggggaccccccagcctcccaccctggtcccaggttccacaagtgcctctggagggccctgggctctggcagatggtcctggtgccccagacgggggccgagggcctgagcccccccatccctcctctgccagggtttcttagcggtttctctgtggatgttttggcatctttagacacctggaaagtctcttatgtttgccgtttattcccttcacagaaggcttggaatgtatttatttatatttattttttcaaaatccgaaatcatttgcgagccgcaatcgtcgtctgcctgtgtgggggggcccagggcctgccttgcacgttgcagcctctctggccattgcagagctgctggcctcctgcccaggtggagggtcctggggacggcagaggataaagccccctcctcacatccctctattgcggatccacagtggccttactcttaacttggatgagagcaaaaacctgggagaatgatgtgcttctgtagtcggtgacaaaggaagaggcattgctactttatttggtgcacttttggtttctaggaaggtctttgggtcattttaacttctcggcaactcccagactctcagagtgtggggctggggcctggcggctgggctggtgcagggagtgtgctggttagtctccagaccctcacagcagccacgcccccaggcccaccgtgcatggtgtgggcgggacagccggaagcttccggggtggcctccacctcctggctggggcacttatgctcccagagcctttggtgccaggtttgtgggatgggggttagcgtctatgtgtggaaggccaccaatctagggacaggagtcctgggtcaagattcacacagccacccttggagctggtttctagttctcacatttagtcaacatctagaaagcgctgcggaaggctctggttctctagggacttgaaggcgccaacagagtagtctccatggtgggcctgtcccagccctggctgcgaggacaggttgtctttctctccccagttggcgagggacacgaaggctgcggccgggctggcagagggcccggcccctggggggaggcactcctccagggctctccctgtccttagccgattttgagggaaccctgtggcacctgtccctggatgaagagctgtcacctctgccttgccctttaactcaacccgcttcccagcacagcggctttctttttaaaacctgtttcactgagaagtttgtttttgggtccgctggtgtcactatggcctgggtgagaggccagcactgctgctgccctgaggggaaacgcctgggccgtgtagtggggacgctctgggaatggtggcggacgggcagcgtgggtgggacctggcacttcgtggtggctgagccatccacccagcagcggcctcctgtagcaccatcttgggaaagtcctgggggacgtgtgtgtcgtgctttttaccatcggtttgacttacagtggagtagaacgagccagagttcctgacttgagcaggtggatttgggcccaggccctgttcactcttgcttctcggtgcggactaatgtcagcttgtggctgggaaagagggatgtgcagtgacgtggtcaccaaggcagtgagccccgctgaccccgggccagcacttggcaggcaggaggtgcggtctccagagtggtgggccagggcgggctggcctccgtcttctatcttcttttcttgcctccctgaccagcagactcacctcccaagaacgcctgcccgcccacccgccttaggactcccgatgcgctcctggaaggccccaggagtggcaccttagtgtgggtcggcccgcagatggcacccaaggccgggaagggcagtaactgcacacgcggcgctgtcagagatgggggtgggggatgcttctgggggccctgcctccccattgtgtgcccagaacatccctggccccaccccgccacttccctcgggcccttatgaaggactgaggctccagggtgagaaggctcacttctgccccgggcactgcgtccagcagcagaggggacagggggcaggtgtgtgactgggttcctgggtacccaggcctgaccagagggagcgggagggcagaggtgaggagggggaagatgtttctgggcctaccaaggttcaacaagagaacggagctgggaatgtgactgctggagcctgagaggtggaggagttctgatcccccgttacttcctagcattttctcctcttgccttaaaagttccctgtatgtgaaacgggaagtcctgagagtgtgtgttggtggctgtgcgcacgcacacaagacgggagtcaccctgtgcttcctgcccaagatactgacccattgaacccccaaagcatctttctctccacaaagtccgtggtgccttcctggtgggctgcagacactaatggtgttggggggtcttggaacagcttctctatgtgtggattcgtgtaaatgcgaagagttcacatataaagaagtgactttgattctgtgattatattgatttggtacacagtaaatgggagtttaaaaaatccaaagactctaatgacttgtaaagactctaatgatttgtatcatgtaatgaactaaaccacctgtaattttgtaccgtatgtgtctttccatcaaatgaccaacagcttctcaataaaaccagaccatttctcacctgcaaaaaaaaagaagcaagaatgaaaaaaacaagatggaaaggacgacgacaaaagagagaaggagacggggaaaacacaaaaagaagagaacaaaaaaaaagtgggggggggggcgcaacccacaaaataaggtattaaaaaccaaggtagcttgggcggacgcaccaaaaaaggtaggaagagcgagtgacagacgtgctaacccaaaaagcacagcggcaacagagcgggggcggaccccacaaaaaaaccgcgcggggagcaccatgtgttgcgaaccaaccacaagagggggggatgcatacgtgggaacaaacagagcggcgaggacataaaaaccacccggcggggaggaagacgcagccgaggtcacgctagaccacggagacagaccaagacgaccgaagtctgaagctagacgaagctagccaaacgaagaaggaagaagctgcacagcaatgagacaaacaacatgcagatgagacaagaacacatan

SEQ ID NO: 13195 - DNA, 424 bp, Homo sapiens
  misc_feature 424: n = A,T,C or G
actttttttttttttttttttttttggagcacaagataggaactgcagagatacctgcagggcaagagaatttggtgcccacctgagacatgatgacacggcccctcctgtccctccgccaacacgaacaccaacttgttcacatccccagtgactgtgccatgcggagaaggtagaggcaaaagctgagcactagaaccaaaaaagctgagtttgactggaccacgttccttctgcatcccaacaacaactcacacataatagcttcttgacaccaggtgaagtctctaaccttaatatcctcatttgcgaaatggagaaattgacaccacctgagcagggatggcataaggagcagagataatgaggaattcctgccacaaggttaggagatataaatgggagggtgtttctgttttgatgn

SEQ ID NO: 13196 - DNA, 279 bp, Homo sapiens
  misc_feature 267, 268, 269, 270, 271, 272, 273, 274, 275, 276, 277, 278,279: n = A,T,C or G
accctccttctgttgtgctacccacgaggaaatgtgctcttcgctagtgcagaaaacatttagaattatccagtaatgagcccagcaggatggatgaagcttggggaactcctaagagcttattgaattacagagaaattccagttgtcaaagcattatatagaggaaaagttatagggtgttacttatcagcagggagcctgcatttggagagaattttcttttctcttaataaaacatggaccaattgcagaaagggcttaatannnnnnnnnnnnn

SEQ ID NO: 13197 - DNA, 606 bp, Homo sapiens
  misc_feature 603, 604, 605, 606: n = A,T,C or G
tatagggagtcgactcaagctgacaaagggtaaacaaaaataagaaagccagaaactcactgatacgtcagacaatatgcagcagtgtaacatacatgtaatcaatatctcaaaaaggaagggtgggggaattataggtgaataaagaatggtacactcattcctgagggcaccgaggagggaggatagctttagattcctaagggagggtattatccattcatgaaggtccaacccccatgaacaaacacctcccagtgagccccacctgcaacattggggataaaattttaacatgagattggaaggggcaagcattcaaaccatagcaagagttaaatttcctttttaaaaaaaaaatcactgatatgattccatttcgccatagataaaagctagtatttcagcctaccattgagtgtatttatagctcaccaaaagggcactctgtctcgggaatacagctttgcctagaggtatcctattgcagtcaaagaaagagcaatgagggatagaaaaagttagtgatggagacaccagcgctgcattttgcaacaaacaatgtaaaaactttacggattggttctgctaacttactacagnnnn

SEQ ID NO: 13198 - DNA, 1348 bp, Homo sapiens
  misc_feature 1, 2, 3, 4, 5, 6, 7, 8, 1342, 1343, 1344, 1345, 1346, 1347,1348: n = A,T,C or G
nnnnnnnnccgcccggcaggtacgcgggggatgacgcaagagcccgctctcacttttcagcggcaggcgaagggggctgaggaaaggaggtgggtctaggcaggggaaattggggtgccaccagacggagacagcttggactaccagaatcaagcactcttttggaagagggtaatctctctccaaaaactgaggacacttaccttccccatatattgagtccagctgtgtttggtggcccaggtactaatttcaagatgccaggacgttccagttcaaattcaggttcaactggtttcatctccttcagtggtgtagagtctgctctctcctccttgaaaaacttccaagcctgtatcaactctggtatggacacagcttctagtgttgctttggatcttgtggaaagtcagactgaagtgagtagtgaatatagtatggacaaggcaatggttgaatttgctacattggatcggcaactaaaccattatgtaaaggctgttcaatctacaataaatcatgtgaaagaagaacgtccagaaaaaatacccagcattctacaactctatctggctagcacgaagcaccatccctctggccttttacccgcacgcaacgaccttcctcgatgcaccacctcttcaccaccttacctgcacccacatttgctacaagctttaaaccacacagcctgcacagcaacacctacaccgaagccacacgctggtccttcaacgcctgtaccagagcacagctgcacgggcaaccagcaaagggagctgggcctgcaccgcactcattacctctgctcgacccccacaagggccaggaccacacctttctccgtggcccccactcacccacacagcgcacggcacactttgccactacaacccccaactgttcatcaacaccttaccacctgtctgtcatgtcaccctcacccctattcacaccaacagacatgcccccattacgttacacacacatgaaacatcgacactgcaccaggaccacaaacccgccgccgaagccacgaccaacgggcctctacttgaccccccctcaacacctggcgcctgtgatcgacccaccccagggcgcacatacgaaaccccgcccggacacctcttaacccgcgcgcgtaaacaccccctctccagacgcgagcactggagctacaccaccaacacacatcgcaacaccacacgctagcgccaccacgcacagagcaaagcctccccgcccctccgtgagccacgcccaacacccactcacctcgccaccagcatctccctaaacccccgtcgccgcggatcgaagcgtccgacgctaccatcannnnnnn

SEQ ID NO: 13199 - DNA, 703 bp, Homo sapiens
tagggagtcgcccacgcgtccgcttatttacttttcctttcttaattttcctccctaaaagataaactaatactcttaaatggtctttcagtatagtggttcttacgtagtttaacatagctataaattgagtttaacaatttataaactcaagagaataatttttataaaccctgttttccaatctgtcatttacttaaattattttggttgtttttccctttttttccttcttttcccaccccctccccctccatgtgaagatttgggtgcttaacatatcatttttttccctgccggaattttagcattgatatgaaccatggacaagtatattctgctgccacaaagactgtaaagtgcttcatttcaacagctgaggaaggtgtcttgctgcaggtaactaatgaagaagtggtcaaccacagagtcttcaagaaataagaaattctgtaccatctgaaagtagttcttgttggtgccttcatttaaaaagcactctttaaaataaaagggaaatgttttctgataaaacaaacatttagttgaggttcttgatataaaacaattacaaaatgagtgttgtttgtaaaacagtaacatcaaattggctagagagataaatgtatcatgttttaaattaggttttgtgagtagacagattacaattctattttaaatataaagtttataaaataaatac

SEQ ID NO: 13200 - DNA, 479 bp, Homo sapiens
  misc_feature 1, 2, 3, 4, 5, 6, 7, 8, 9, 10, 11, 12, 13, 14, 15, 16, 17,18, 19, 20, 21, 22, 23, 24, 25, 26, 27, 479: n = A,T,C or G
nnnnnnnnnnnnnnnnnnnnnnnnnnnaccaatttgtgctgccttaagtagttttttaaaggaaaataaacatatgagggctttaatcctcttgaaaaatgaaacgctaacatttcaagtgtgccaggcatgcagtcctcatattctgagaaagtccatctcaccagggaatatatcttgaggtcatcggtacctagcagaacacagatttaaacatttccatatttagatgaagaaaacagggcaaaactaactaattttctcaaattaaattactggcaaaataaaggtggtgggaaccgttaaggtacctgcccggattttgcatctccgaaaacaaaccaaccaaaaaccagaaatccgtcattttcagcagctagacagtgtctaaggaacgcacatgttcttcacaaagagacaatttgctttaaaaaaaaaaaaccctttaaaaatataaatgacaattaattctactagcn

SEQ ID NO: 13201 - DNA, 855 bp, Homo sapiens
  misc_feature 593, 594, 595, 596, 597, 598, 599, 600, 601, 602, 603, 604,605, 606, 607, 608, 609, 610, 611, 612, 613, 614, 615, 616,617, 618, 619, 620, 621, 622, 623, 624, 625, 626, 627, 628,629, 630, 631, 632, 633, 634, 635, 636, 637, 638, 639: n = A,T,C or G
  misc_feature 640, 641, 642, 643, 644, 645, 646, 647, 648, 649, 650, 651,652, 653, 654, 655, 656, 657, 658, 659, 660, 661, 662, 663,664, 665, 666, 667, 668, 669, 670, 671, 672, 673, 674, 675,676, 677, 678, 679, 680, 681, 682, 683, 684, 685, 686: n = A,T,C or G
  misc_feature 687, 688, 689, 690, 691, 692, 693, 694, 695, 696, 697, 698,699, 700, 701, 702, 703, 704, 705, 706, 707, 708, 709, 710,711, 712, 713, 714, 715, 716, 717, 718, 719, 720, 721, 722,723, 724, 725, 726, 727, 728, 729, 730, 842, 843, 844: n = A,T,C or G
  misc_feature 845, 846, 847, 848, 849, 850, 851, 852, 853, 854, 855: n = A,T,C or G
aggggcccgcccactgcgtccgtgttaaatttctgctgtgtgtcagtaaggtgaagaaaatagcaaatctgaatttttgctgctcagatattatggaggaggtaaaaaggggaatctccgtggacaaggacactggtactttgggctttagccatattcatttttttgaaaccaccaattatataatacttaaataatttatatcattgaacttgtgattcttttcaaatcacactgaaggttcagccgtactcctttcatgtttggtttaatactgttgtatggatgaaaaacctaaaagggatgatagtgtttattttttaatttatttggtactgtaaaacaccttttcagaatgagtaaatgctgcatatgcattttggagttgttaatatgtgaaagatattacagattcagcaagaaaggaaatttgtgcttccttgttgaatgttaaattattttactttgcattttataagagtacaaattaaaactgagccattgaactgcaataaatcaacaatagtgtctcatttcaagaaattttttgtactgtacatagatttgttcaataaaacgtccttgttggtaannnnnnnnnnnnnnnnnnnnnnnnnnnnnnnnnnnnnnnnnnnnnnnnnnnnnnnnnnnnnnnnnnnnnnnnnnnnnnnnnnnnnnnnnnnnnnnnnnnnnnnnnnnnnnnnnnnnnnnnnnnnnnnnnnnnnnnnnngggggggggctgtttgtttttttcataaaaaaaccccccaaacctgcccccgaatccggaaaaaaaaaagagaggctggggtgggtgaacattttttttgggggatttaaannnnnnnnnnnnnn

SEQ ID NO: 13202 - DNA, 301 bp, Homo sapiens
  misc_feature 1, 2, 297, 298, 299, 300, 301: n = A,T,C or G
nncactatagggagtcgacccacgcgtccgcaagcgtgagcttccgcgcctggcctgtgacctcattttaacttggttacctctgtaaagagcttgtctcagataaggtcacatctgagatactgggggtcaggattctacatgtgagtctgggaagacactgttcaccccttaacatccctgttctccagggtcttcagatatagttttgggtgcaaggaaaggcagctaagtaccaagttaattatgagaaggaccagttttgaggatttcaggaaaaaaaaaaaaacaattacnnnnn

SEQ ID NO: 13203 - DNA, 449 bp, Homo sapiens
  misc_feature 448, 449: n = A,T,C or G
acagatggggttttggtgtggatgtcctttctgtttgttagttttccttctaacagtcaggatcctcagctgcacgtctgttggagtttgctggaggtccactccataccctgtttgcctgggtatcagcagtggaggctgcagaagagcggatattggtgaacagcaaatgttgctgcctgatcattcctgtggaagttttgtctcagaggagtacgcggcagccctatctcaacaagctcaactaccgtcggacggaccatgaggatccacgggttaaaaagacagctttccagattagcatggccaagccaaggcccaactcagctgaggagagcaatgggcccatctatgcctttgagaacctccgggcatgggaagaggcaccacccagtgcagcccactttcggttctaccaaattgagggggatcgatatgactacaacann

SEQ ID NO: 13204 - DNA, 832 bp, Homo sapiens
  misc_feature 1, 2: n = A,T,C or G
nnacccacgcgtccgggaacccgcgccatgaagtgcgtgtttgttaccgtagggaccaccagctttgacgacctcattgcgtgtgtgtcggcgcccgacagtctgcaagtgagtgagggaggcgagcaggcggcggcttggctcgccacccgccatctccggccatactgccagccgcgttagccttgcctgaccgtcgcgctcggaaagaaacccccgcaactctaccacagaaaatcgagagccttggttacaaccgacttatcctgcaaattggtagaggaacggtggtacctgaacccttcagtactgagtcgtttactctggatgtttacaggtacaaggattccttgaaagaagacattcagaaagcagatcttgttattagtcacgcaggtgcaggaagctgtttggagactctggaaaaaggaaagccactcgtagtggttataaacgaaaagttgatgaacaatcatcagctggaactggcaaagcagctacacaaagagggtcatctcttctattgtacctgcagcacgcttcctgggctgttacagtcaatggacttatcaacactgaaatgttatcctcctggccagccagaaaaattttctgcatttttggataaagttgttggattacaaaaataaacactaaactctcaacactttaaaagcaacccccaaattcaactatgtaatgtgattaaatcaaattacatacctaatatatatttacaaaataacataattaataaccttcctccctctataaaaaaaaaaaaaaaaaaaaaaaaaaaaaaacccaaaaaaaaaaaaaaaaaaaaaaaagt

SEQ ID NO: 13205 - DNA, 440 bp, Homo sapiens
  misc_feature 439, 440: n = A,T,C or G
acgtcatacacataatctgtagcagtggcggtttaagtgaatctcctttgtgcttaaacaacgtatctttagttagctggtgggagtgggcttaactaggagcctgcatatctagccacattccagtgcttcagaggagcgcctttcttcttgagcacagtgtttatagataagagagcaggttgtgctcagagcatgggaacataatggcgataagaaggctttcctcctcagagtcctcttgtggctttccacaacttactgtcccatgtttttatggccagtttatgcaggcaccctgtaagcctttttcccaacatgccccccttttttcttttttaaaactgccattgctattaagacttgttcctggggtctggtctctctccagaggcatcttccgcatttgcagacaccatggtaattaccggaatcatann

SEQ ID NO: 13206 - DNA, 1640 bp, Homo sapiens
accgcggtggcggccgaggtacgcggggagctctgcttcagctgtgagcgcagaaggtaggactcgggacaatcttcatcatgacctgctcccctctcctcctcacccttctcattcactgcacagggtcctgggcccagtctgtgttgacgcagccgccctcagtgtctgcggccccaggacagaaggtcaccatctcctgctctggaagcagctccaacattgggaataattttgtatcctggtaccagcagttcccaggaacagcccccaaactcctcatttatgacaataataagcgaccctcagggattcctgaccgattctctggctccaagtctggcacgtcaggcaccctgggcatcacgggactccagactggggacgaggccgattattactgcggaacatgggatgacagcctgagtgcttgggttttcggcggagggaccaaggtgaccgtcctaggtcagcccaaggctgccccctcggtcactctgttcccgccctcctctgaggagcttcaagccaacaaggccacactggtgtgtctcataagtgacttctacccgggagccgtgacagtggcctggaaggcagatagcagccccgtcaaggcgggagtggagaccaccacaccctccaaacaaagcaacaacaagtacgcggccagcagctatctgagcctgacgcctgagcagtggaagtcccacagaagctacagctgccaggtcacgcatgaagggagcaccgtggagaagacagtggcccctacagaatgttcataggttctaaaccctcacccctcccctgggatcctgcagctctagtctcccgtgggggggggtgagggttgagaacctatgaacattctgtaggggccactgtcttctccacggtgctcccttcatgcgtgacctggcagctgtagcttctgtgggacttccactgctcaggcgtcaggctcagatagctgctggccgcgtacttgttgttgctttgtttggagggtgtggtggtctccactcccgccttgacggggctgctatctgccttccaggccactgtcacggctcccgggtagaagtcacttatgagacacaccagtgtggccttgttggcttgaagctcctcagaggagggcgggaacagagtgaccgagggggcagccttgggctgacctaggacggtcagcttggtccctccgccgaacacccaagtgctattatctccatatgagcagcagtaataatcagcctcatcctcagcctggagcccagagattgtcagggaggccgtgttgccagacttggagccagagaagcgattagaaacccctgagggccgcttactgacatcatagatgaggagtttgggggctttgcctgggtgttgttggtaccaggagacaaagttataagcaccaacatcactgctggttccagtgcaggagatggtgactgactgtccaggagacccggacactgagggaggctgagtcagggcagactgagcccaggatcctgtgccctgagtgaggaggctgaggaggagcagagcccaggccatggtggagattgtcccgagagcgctgcctcctgagaccccccccgcgttaattaattctagaagacttccga

SEQ ID NO: 13207 - DNA, 3011 bp, Homo sapiens
  misc_feature 1, 2, 3, 3008, 3009, 3010, 3011: n = A,T,C or G
nnnacgcgtccgcccacgcgtccgcagcatcccaactgaggagagaaaaccctaatttgttaatgacccagccttgtgctgctctccagttccttttatcagatttactgcagagcagattcatcaacatgaagttcaattcccagtagactaatgaaaagagggcaacagacttgagaagagccaaaatgcagacagtgtgtattaatcacagacaacagaaacgtgttagctttaatgtctgtttgcttttatcttgaaatgaaaatgcatctctgttacctggaccctttttactgcacatttcagaacagaaatgggacacccacacacgtattgagggtccttttccccggcaggaggagctaccagagaaatgagcccacattttgtgtgcagagagaatcaacccacaggtctcagctgcagactccagcacctctgcagagaaggcaggcaaagggatgaggaggtagcatctcctcttcagaaggattcataagggcctctgtgaggagggccttgcttgtgcctgtgggtcatggatgttaatataaaggctcatccacccttggtggcaaaagtgcatccatcctggccaatatagaacactcacatctggagcccacgcccacccacctccagctcctctacatggctgcaagagcatggctgatgtgtgggattcagaagaggtctgctcatgttcactagccaaactttaggtggtgtgatacagcaaaaagctttttttgtttttctgtttttgttttgtttttggcgtggaggagaaatttagacttgaaagtcagggctgatcactcaaaaagtaagataggagatattgagggaaaatgtgactcatagttggagaggaaacaggagagtgggtacaagtgacagcaccaggaacaaccccctcccccagatgccaaagcattgctctgtatctaaagatgcatccaagtttgcaaaaaattatgggtaaatctggccatgtgaccaaagaggcagtcaaatcaattgcttccaaagtcagagctgtttgaaggtgatcagctcttaattgaactagtcatgatgaatcaatccaactgactgcatccagtctgacctcggtggtttccataaagggttgttgatgtcctgagctggacagggtgggcaggaggttgaagaaaaccagttggtgagtatagaaaagaaattgcatgtagaagttgtttgttctcaaagaaatctgtaggtgttagagctgggtttgttatgttattgtcagggacattataatattggtaaggaggagagaatgatttggtggggtattcgagaaatttgagtacaaaatataaattatcagagatgagtaggctatggacagctgattatatatatgtgtgtgtgtgtatatgtgtgcatatatgtgtacatatacacataccccaaagccatatacatatctataatacagaagtaagaataaagtcataagtaccagcatattttaaatccttagaagcactggttgggatgttacatgttttttcactgttgttgtttaccgttagctctcaaagcagtgggaatagtgcttggcacatagtaggagtttggtaaacatttggaaattgaagacccagcttatcactccttcatagagactcagtagtatgagtataccccaaattgaatgagccacagagaaatgcatccagccacactccctcttagctgaggagaagcctctgtgaatccacagattccatgcaatattcagccagccgcagacacaaggtctggctcccttgtcgtgagagtgaaggcatgctgcacacagtgggtttgcatgcacctagactgcatctgctgaacacccaacagctgtttctacaagctaaagttgtagcttctctctaccactgtctaaagctgtagcttgtctctactattgtctctacaccgttgcccaaacacttggtataatgctattgaatttttcacctccaggcatgattttgtaaccaatgtaaaggttctgggttcagccagtctaaaaagtctaataatttcttctctcagtccttcccttctcccttgtctggagctgccaccgccatttaaaagtgttggacgctgtttattcccagcttctcaacctcagtgtgtgtgggaaaggcctgaaagagagaggtatgttttctctcctccagagtctctgtggtgttgacacagcagagagaggagggggagcagcctcgtcttgcagaatcaccttcaatcactgctactgtctgggccattactgccagtctggccggtgtctcccacagtggatggctttgcctccagcggtggaccagtgtgtacctgacatgtatcagacttctgagctcttcaagctgcctcaaagaatgaatctttttagtctagaaaatgtgtttatttgataaatatactattgtgtatgagtgtgaaacaatgcagactttggagtatctcattagaaggactgtatgaatttatagaaaattgaatctaatttcagaagagcgcactgtcttctcagtcaacaaggttgcccagccacagagggtcagagaaaatgtcctttcccctccccactccttttcatagaatcctctctcaggcctaactgagctgtcatatccaattcagactgacacagagtgaggggcgctgagagtctctatgtatataaagatataggaagaaaataaggatcatcacaggaatctgttgggcttctccccatgactgtgatcttacccatgtttgaatcacaaactttaaatttataataattatgattcttgcagttttcaagtaatttgttaaatgcctattcaacacagacagatttttattttcagctgtggcttgtaaatgcctacaaactgattcatgttggtggtcgttatgacactttctgtgaattggtgaataaatatgattttagaatttcacagtaaaaaaaaaaaaaaaaaaannnn

SEQ ID NO: 13208 - DNA, 382 bp, Homo sapiens
  misc_feature 371, 372, 373, 374, 375, 376, 377, 378, 379, 380, 381, 382: n = A,T,C or G
acgcggggggtgagggaggagaatcgcttgaacctgagaggtagaggttgtggtgagctgacatcatgccactgcacaatgcctgggtaacagtaagactttgtctcaaaaaaaaaaaaaaatagaatttacaaaatatagaatatgtaaaacgatgtcaacttttatctttgttttttaaagaaaggcagctaacgcatttaaagagcataaaccaaaagatagaagaacccatggccttataaaagtcatttaaccacactcacccctgggcactgattctccatacagagtatgggagtggtgaaatctgcttgctaggcttggtgtgagtgctaaatgagtgagggcagggggagccctttgtccannnnnnnnnnnn

SEQ ID NO: 13209 - DNA, 3652 bp, Homo sapiens
  misc_feature 3642, 3643, 3644, 3645, 3646, 3647, 3648, 3649, 3650, 3651,3652: n = A,T,C or G
gatcgaccacgcgtccgggactctggagccgccgccgccgctgctgcggttcatatccggagtagacggagccgcagtagacggatccgcggctgcaccaaaccactgcccctcggagcctggtagtgggccacaagcccccagtcccagaggcgtgattttctggcatccttaaatcttgtgtcaaggattggttataatataaccagaaaccatgacggcggctgagaacgtatgctacacgttaattaacgtgccaatggattcagaaccaccatctgaaattagcttaaaaaatgatctagaaaaaggagatgtaaagtcaaagactgaagctttgaagaaagtaatcattatgattctgaatggtgaaaaacttcctggacttctgatgaccatcattcgttttgtgctacctcttcaggatcacactatcaagaaattacttctggtattttgggaaattgttcctaaaacaactccagatgggagacttttacatgagatgatccttgtatgtgatgcatacagaaaggatcttcaacatcctaatgaatttattcgaggatctactcttcgttttctttgcaaattgaaagaagcagaattgctagaacctttaatgccagctattcgtgcatgtttggagcatcgacacagctatgttagaagaaatgctgttttggccatctataccatctatagaaattttgaacatcttatacctgatgctcctgaactgatacatgattttctggtgaatgagaaggatgcaagttgcaaaaggaatgcatttatgatgctaattcatgcagatcaggatcgagctttggattacttaagtacttgcattgatcaagttcaaacatttggagacattctgcagctggttattgttgaactgatttataaggtctgtcatgctaatccatcagaaagagctcgttttattcgctgcatctataacttattacagtcatccagccctgctgtaaaatatgaagctgctgggacattagtgacactctctagtgcaccaactgcaatcaaggctgctgctcagtgttacattgatttaattattaaggagagcgacaacaatgtaaaactcatagttttggatcgcttgatagaattaaaagagcatcctgctcatgaacgagtactacaggatctggttatggatatcctaagagtattgagcacaccagacttagaagtacgaaagaaaactctgcagttagcactggatcttgtctcttctagaaatgttgaagagctggttattgtcctgaagaaggaagtgataaaaacaaataatgtgtctgagcatgaagatactgacaaatacagacaactcctagtgcgaacattgcattcctgttctgtccgatttccagatatggctgcaaatgttattcctgtgttaatggaatttctcagtgacaacaacgaagcagcagctgctgatgtcttggagtttgttcgtgaagccattcagcgctttgataacctgagaatgcttattgttgagaagatgcttgaagtctttcatgctattaaatctgtcaagatttaccgaggagcattatggatcctgggagaatactgtagtaccaaggaagacattcagagtgtgatgactgagatccgcaggtcccttggagagatcccaattgtagagtcagaaataaagaaagaagctggtgaattaaaacctgaagaagaaataactgtagggccagttcagaaattggttactgaaatgggtacctatgcaactcagagtgcccttagcagttctagacccaccaagaaagaggaagacagacctcccttgagaggattccttctggatggagatttctttgttgctgcctcccttgccacaactctgaccaagattgcattgcgctatgtagctttggttcaggagaagaaaaagcaaaattcttttgttgctgaggctatgttgctcatggctactatcctgcatttgggaaaatcctctcttcctaagaagccaattactgatgatgatgtggatcgaatttccctgtgcctcaaggtcttgtctgaatgttcacctttaatgaatgacattttcaataaggaatgcagacagtccctttctcacatgttatctgctaaactagaagaagagaaattatcccaaaagaaagaatctgaaaagaggaatgtgacagtacagcctgatgaccccatttccttcatgcaactaactgctaagaatgaaatgaactgcaaggaagatcagtttcagctgagtttactggcagcaatgggtaacacacagaggaaagaggcagcagatcccctagcatctaaacttaacaaggtcacccaattgacaggtttctcagatcctgtatatgcagaagcttacgttcatgtcaaccaatatgatattgtcctggatgtacttgttgtgaaccaaaccagtgatactttgcagaattgcacattagaactagctacactaggggatctgaaacttgtggaaaagccgtctcctttgactcttgctcctcatgacttcgcaaatattaaagctaacgtcaaagtagcatcaacagaaaatggaataatttttggtaatatagtttatgatgtctctggagcagcaagtgacagaaattgtgtggttctcagtgatattcacatcgacatcatggactatatccagcctgcaacttgcactgatgcagaattccgtcagatgtgggccgaatttgaatgggaaaacaaagtgacagttaacaccaacatggttgatttaaatgactacttacagcacatattaaagtcaaccaatatgaaatgcctgactccagaaaaggccctttctggttactgtggctttatggcagccaacctttatgctcgttccatatttggtgaagatgcacttgcaaatgtcagcattgagaagccaattcaccagggaccagatgctgctgttaccggccatataagaattcgtgcaaagagccagggaatggccttaagtcttggagataaaatcaacttgtcacagaagaaaactagtatataaaaataaacaaaaagtccttgaagctttacagttaatttaggtatgggcttactggactccaacatcttttgtactctttcatgcttatatagaatctgagttcatgctgaatacttttcagccaataatttatagcctttcccttaaatcaagattgagtttaaaattatagtttgtcttttgtcttaacagttctgaatgctgtcctcaaagtatataatgtttcatgtaccaagacccttttcacagtacaataaacagatctattcataaatttttgttattttataaataaatgattacataattttaaaaaaaaaaaaagaaagaaaagaggacaaaaaaaagtgttcgaggaccggagccatcgaagagagttttatgaaacacaagcacagtatggggcacggaccaatgagaataagaaccactggcaacaacgggtaaaaagaaaaccggggaaaagagaggtgtgggttgctcacacatggaaaagcggagagaacgagagtctgaacaaaccaaacggagacggagcaaaagagatctaaacagagaaaagagannnnnnnnnnn

SEQ ID NO: 13210 - DNA, 2153 bp, Homo sapiens
  misc_feature 1, 2151, 2152, 2153: n = A,T,C or G
nagcagtcggagccgcagctgcctcccggagcccgagcccctccctccgggtccggcctagcccgcctgactcccactctgatcacctccacagcccgccgacctgagaactactacgcccatgagccttcgcggcgccggtgatttaggggacgctcctcagtgccccctgcgaccgccagagagaactacgttgcccctcagcccgagaggcgcgagtggtggaaaacctctccatcatactccgccctcgagacaccagccccctccatgacgtcttcagccgcgcgcccgacgtcggctgagacggccatagacactggcggctagaggggcccggaaggtagaggctggggttaatcggccgagaagtgtttgcagccgcgggcgcccttcttcttctgtgcgctcgggctcctggtcccggctccccggttaccggggcgcgagtatgaccacaatggcggccgccaccctgctgcgcgcgacgccccacttcagcggtctcgccgccggccggaccttcctgctgcagggtctgttgcggctgctgaaagccccggcattgcctctcttgtgccgcggcctggccgtggaggccaagaagacttacgtgcgcgacaagccacatgtgaatgtgggtaccatcggccatgtggaccacgggaagaccacgctgactgcagccatcacgaagattctagctgagggaggtggggctaagttcaagaagtacgaggagattgacaatgccccggaggagcgagctcggggtatcaccatcaatgcggctcatgtggagtatagcactgccgcccgccactacgcccacacagactgcccgggtcatgcagattatgttaagaatatgatcacaggcactgcacccctcgacggctgcatcctggtggtagcagccaatgacggccccatgccccagacccgagagcacttattactggccagacagattggggtggagcatgtggtggtgtatgtgaacaaggctgacgctgtccaggactctgagatggtggaactggtggaactggagatccgggagctgctcaccgagtttggctataaaggggaggagaccccagtcatcgtaggctctgctctctgtgcccttgagggtcgggaccctgagttaggcctgaagtctgtgcagaagctactggatgctgtggacacttacatcccagtgcccgcccgggacctggagaagcctttcctgctgcctgtggaggcggtgtactccgtccctggccgtggcaccgtggtgacaggtacactagagcgtggcattttaaagaagggagacgagtgtgagctcctaggacatagcaagaacatccgcactgtggtgacaggcattgagatgttccacaagagcctggagagggccgaggccggagataacctcggggccctggtccgaggcttgaagcgggaggacttgcggcggggcctggtcatggtcaagccaggttccatcaagccccaccagaaggtggaggcccaggtttacatcctcagcaaggaggaaggtggccgccacaagccctttgtgtcccacttcatgcctgtcatgttctccctgacttgggacatggcctgtcggattatcctgcccccagagaaggagcttgccatgcccggggaggacctgaagttcaacctaatcttgcggcagccaatgatcttagagaaaggccagcgtttcaccctgcgagatggcaaccggactattggcaccggtctagtcaccaacacgctggccatgactgaggaggagaagaatatcaaatggggttgagtgtgcagatctctgctcagcttcccttgcgtttaaggcctgccctagccagggctccctcctgcttccagtaccctctcatggcataggctgcaacccagcagagggcagctagatggacatttcccctgctcggaagggttggcctgcctggctggggaggtcagtaaactttgaatagtaagccaaaaaaaaaacaaacgcaaaaaattgaggggggaaaagaagaccgcgtctcgggccccatttcaaggggtgcggctccggtatacagcggtagatgcaaccgatacaagcacaggacaatagagatccactcttgtcgatgtaannn

SEQ ID NO: 13211 - DNA, 3568 bp, Homo sapiens
  misc_feature 1: n = A,T,C or G
natgcattgtaactcctgggtggtgttctggattttttatccttctttcttttttcatctatctctttggatctgtctttttctcgttccttttctttgtcctgttccttttccttctctttgtctcgatccttctcatgctctttttcccgttctctctctctgtccttttccttgtctttttcccggtccttttcccgttccttgtcccggtctttgtttttaccccgttccttttctttttcacgttccttttccctctctctctccttttccctgtctttctctttcactctttccttttccttgatcttttctcgagtgtcttttctcttgtcccgtgaatgcgaacgactccttgacttccgtctctcccttgatttagagcgttttttatgtgggctcttagatctacgtctgtctttctgtcttgaacgtgatctattatgggatctactcctgtgttttgattgtgatcttttccttctagaatgggattttgagctagacctggattttgagcgagtatgggaacgagatcgaccgccttttctttcattgctctttccagactctggttcaatagctgctgagataaatgactgagcttctcgtactcgcttcattacttcttctaactccttagctgcagcctgaggtgtcatctcagggggttttactattgcattgttggagtgatttattttcagtggcctgtctccaaacataactccattaaaagcaagggcccttggtacagaattttggtctgcaaattccacaaaagcaaaccgagttggctgagtctcatcacctgccatccgcacaaacttcacttctccaacttgtttaaaaaattcaagtagttgatcagctgtcgttgtctgggaattcagatttccaacataaaccgttctcctaatttcatctattttggaaggatccacgtttcccataagtggtggctgtggtatctctccaagtgttgcaatgttggggtctagtgctgctgctggtatagctcccaaactgctaagtgaaacaccaagagtagtcaaaggatttggggtcggtattggaagcaatcctgcaccaggcatcagacttgtcatggttggagcaggagccaataaagagagggctttggattcctctgggattttacctgcagaggcaagttccaaacattacaaaaagcagaaacaccacacaaactttacactatgattttacaattacccttgcagttaaaaaataataataataaatgaatctatctatcagatctgtataaagaaataaataagaacttaagtctttccttttatcctgctctactaggaaaaataaaagtgagcaaaacttcaaatattaacaatctcattaatggaatattattttaaaaattgaataatgtagacaattatttaacactttgagctatgggtcacctgtactggaaacttaatgttcatgaaccaaacgatatcaagcatggacgctttcccaggacggtgttttcgcggtgatcgaaagttgtgttacacatgacaaccgttcgtgttggctgcatcactaatagcacacagaacatcagatacagaaaagaagaacattttttaaagtttaatccccagaaatggcaaataaccaaattagtcaaaaaaaagaaaaagaaaaaacaaatatgtgcgaattgaaatttcttaatgagtgcccctatcctgttactgaaactacctatttgtgatgcaaacaattttgataaccctccaacagattccatttaatttcaaatagaaaacaaaaacttactccatgtaatcaacttcaacgtaaaaggaagcctacatccattcagttaataaagcatctcaccaacatcagagatgcctaaaagaactcagttccaaaaaatatgccttgggaaactactaaaaatgtttcaggaaaaaaaaagttccctggtttcagaaaacttcttattaacttttagaaccaatttatgtatacttatctgaagggggaggttaatgccttaaagcttgcttaaaaacattttaattgcctaataacaatagtaacattaaaataatctaataacactcagtaggaaaaaaactccctacaacctaaaaaaatgaaaaacttactctgaaataagtacgatttggcatattcattgctgaattctaatcaattacttctgataaggactgcaactttcacattatttttccttatccccttaggcaaaaaaaaaaaaaaaaaattcttaaatagttgactacatgtggatatatttagaagaacactcatgtggtagctggtaaagcatttctattattaattctccaaaagtgttttaaaagacaatgcacaaaatcatgctaaactgaaatatagcatatgcagtaaatttccacaagcaccatgcctggtttcagttgtaaaaatatttaaaacaaccacatgtgcagagagaaatccctaaacaatattatctgaatatatctttaaacatggatggaactcaagttggaatttaaaacttgatttaaataatggctatgccttatttataggaagcaaataaaacctactattttctacctttgcagcatctaagtttatattactttattactttcaaaaacaaagttatctttattatttcagtgaaaattctggagaacagatttcttaacatgcatcaacaaaaggcaggtaggccttactgaaaacatcaaataacaataatctgctttatatgtattagttattggtattaacacatgtatttatatatacccacatatacactatactatttatattgatttcacctgttttatctgttataaattggtattatctcaaaaggtttgtaaaacctgaacattcttgataaattgaggttttgaggcagaaactccatcgtcactaccttaatgtatgcacctaaggaaactcagagttctaatctagtaatgtcccaaatttaatattacttgtcctttaataagtaaaactacctattgaagacattgtagaaagactatacaaacaaaaagggtattcaacactggccaaaagttgactacttagtattatgaagtctttcactttcagcttaagtatcagtaggttgtcaaactctcccactgcctttcaaaagagtatactactataaatatagtatactactataaatgtataaatccactataagcacattttttaataaattaactttcaattaccattctaattactctatatacttattctaattacctaaaggtaatggcaaaagtactttaagaaaaagctccattgcttaatttccaagatagaattctaccaaatttaccctccaaataacagagcttataaaagtataaaacaaataagcatttagcatttttcccaaactatactcctcaaagtcaactgaggaaaacatctctcacagtattatagtcctaatctcagaatccatttagaagctagtaacctctgaaaaatattcaacaaaaaattcaagctaacaaaaaccggacgcgtg

SEQ ID NO: 13212 - DNA, 240 bp, Homo sapiens
  misc_feature 1, 2: n = A,T,C or G
nngcctggaagtcggtctgttggggcctccccgctcacattgtcccttctagcccctgaccgcctttcctttccctttggccaggtctgtgacgagccccacccactgctggtaaaggagatgatccagcactgtgtgaatgccaacattgacgaagcctacaaggttggcctccttccccccgtcctggcagaggaaccgctcacttcttgggcagaggagagcgggagcccttctggt

SEQ ID NO: 13213 - DNA, 1036 bp, Homo sapiens
cccacgcgtccgagccggcgggacaggctggccagctggggcggcccggagtctgagcctagagcctggcgccgcgaggtgcgcactgcagccgcgccagttcccggagagcagccggcctggacctgcctgcactgatcttttccggggctcacgaccccagaactcgtagagtcccacgaactggctgggtatacagaaaagtccagaggccggagagcgtttcagatcacatgtaccggatggcagttatggctatggcgatcaaagatgaccgttttaacaaagaccgatgtgtacgcctagccctggttcatgatatggcagaatgcatcgttggggacatagcaccagcagataacatccccaaagaagaaaaacataggcgagaagaggaagctatgaagcagataacccagctcctaccagaggacctcagaaaggagctctatgaactttgggaacgaggtacaaggctaagcattttaactttatactggaaaaaaaatcaaacaaaggggagggataaaggacttagtcatctttgcactggaaaacaaaatatgtaattaaattcccatagctgcatgtaacattgaattcttccaggttaaaaaaaaaagttaatcctgtgatattaatggaatgacattttgaggtcttgagaatgggcacaaaagtgggaaatgaatttcagtatgggcaaagacactgaggatgatgttgattagataattcactccgtaatgatcatgctgtgtgctagtaagtataaccctggaaagatcttgagatgcttcccagcctgttcacagatcccctgggccagaacactccttaggaaaaacagtcagctacatattaggcagcaacacgaagggtctttgaacaaaatgagtaatgttattctacagtgtagaaaggtcacagtacctgcccggcgaccactctacaggggaatgacgagaaaagctagaattctgggaacaccgatggcccatgcatctggccgttcttttacacacaggaaacagct

SEQ ID NO: 13214 - DNA, 1574 bp, Homo sapiens
acgcggggagggattgctccctgcattgtgggtgggagattgggttgggaaatgtaaagctctctttccttaccaagtttgtttaacatggcgcttcccaccccaccccaaccacatcttcgtgctacttcaagctgggaggagccaagttccagatgtagcgaatctctgcctgtgtggacaaagagacacattcagaggtgagcccagagcgggtaaagtggactggggagaacttcggaggatgttcatgtccaggagcagccccacgccctgtatggtcggtgtctagagcctcacagcaactaagaccaacccagctctcagaagaaggaatgtcaaaatgtcatgttcaattttacattcagtgcctggaatcttttcttcacaattgaaatgaaatgtgctgaaggaggtgaatccatgcattaatcttcagctcacaaaggaaatactacataagaagcaagaccacagactcaagacggacataattggatttttttttgccatggcctggaaagaaaggtacacacagttaaccacaaaacaggcctctctgaaaaagccattgccatggactgccagacagacaatgacaagacacaaataccttctggtgtgtgagccacgggacatgtgagcttccccgctgatgctcctcttatatcaaagatcactttcacaagatgagcgactcaatatcttttatcaaaccaatgatcacctgcaagctatggtatatttttgcagctgtgtagagctatgtggcatgagaatgtgggacttataaattgctgatccaataaatagacattatgggcaacagtgtcttatcagctagtgtgtacctgcccgggcggccgccgggcaggtgcagtcagaaaaattgataacctttctcagcaccaaatcagttgcagaaatatccatgaatgcacgatcccataattcacctactgtataacattctgcagaagtgatattgacggaaaggacgatatcatcttcaacatattttagtatgagattatttatcacaatgtttacattatttacaactcgtctaatcagactctgcacataacctggtggtaagtcaggatctgtaggagcagcctgctgcattctccgcggtttgattgatgattttgtgctctcagcagtactacggttggtagaattagaaccacagctttcatggtcatcctgtatcccatccttaagtttcaaaatgcattccatagtattgatggtaattaccactggttctgaacccagttttgtccatggtacatgaatcctcaattcatgaatatgtccacttaaaaaagtgaatggtaatttcagttcctgttccagcacatccaactttaactcgagcttgctgagtaccacgtctccaccccatagtgaaagctgtagatccgacggctttaagttcttgatgtagcgattcacatagctcattaaaattggagttacatatgactccagcatcttttaaggtaaggagtcgaagtcggaagacgccagagtaccgccgcgtcccgcggacgcgtgggcgacaccaa

SEQ ID NO: 13215 - DNA, 549 bp, Homo sapiens
  misc_feature 498, 529, 530, 531, 532, 533, 534, 535, 536, 537, 538, 539,540, 541, 542, 543, 544, 545, 546, 547, 548, 549: n = A,T,C or G
acaggtcttgcctaaaatcaagaagagagcaggagaactgagaaactcctccccttcccccaccagaagccttgtgtctagtaacaggtaacaacagccatctactgttggagaaagaacaaaagcatggaaaggatggagcagggaaagagggaaaaaacaacaaccactctccagcactccaggtcttaacattaagcacaaaataggagcagcctagcccaccaccggagggatttcaagtctgttgcacactgaaaataaccatggctacaacaaaacccaattcaccgcaaatgctgactaaattgactaatagccccatgctaatagcttgatggaaggatagatattcccactttgaacatttgcttcagtgtctacttttcttctatacaacatacctggcatttaatttaaaaaaaacacacactcacacacgctcacagacctatgtgaaaagataaaatagcagaaccagacccaaaggtgactcanaagttggaacgactagagactactagagacnnnnnnnnnnnnnnnnnnnnn

SEQ ID NO: 13216 - DNA, 1220 bp, Homo sapiens
  misc_feature 1220: n = A,T,C or G
acacactgaaaccactgtcagattaagaaacttccacaacttgtctcagttcttcaaacaatggagcaagttccttttctaggctgacaattagtcctgtattggcactgctgctggctatgaaactcaccaccaaaggtaaacgattaaattgaaccacctggtaggtgttatagtaacagatgatacttttatttttggaaagtccaagtttgcttccttggtctgttgcaagggcaaaagtggataagaaaccaggtcgcaaagcatgctctggagcattgtcatttgccactttaataacaggtacctgcccgggcggccgcccgggcaggtacttcactggaaatatgggcgccgaggtggccttcaactggatcattgttcacatggaagagccagattttgctgagccgctgaccatgcctggttatggaggggcagcttctgctggagcctctgtttttggtgcttctggactggataaccaacctccacaggaaatcgtagctatcatcacctccatgggatttcagcgaaatcaggctattcaggcactacgagcaacgaataataacctggaaagagcactggattggatctttagccaccctgagtttgaagaagacagtgattttgtgattgagatggagaataatgccaatgcaaacattatttctgaggccaagcccgaaggacctagagtcaaggatggatctggaacatatgagctatttgcattcatcagtcacatgggaacatccacaatgagtggtcattacatttgccatatcaaaaaggaaggaagatgggtgatttacaatgaccacaaagtttgtgcctcagaaaggccccctaaagacctgggctacatgtacttttaccgcaggataccaagctaaacctcaaatataaaaattggcgaaaagaagccatacgcctttttaatttgccaaaaaaaaaaataaatacaaaaaaaaaaaaaaactcgagggggggcccggtacccaattcgccctatagtgagtcgtattacaattcactggccgtcgttttacaacgtcgtgactgggaaaaccctggcgttacccaacttaatcgccttgcagcacatcccccttttgccagctggcgaaatagcaagaggccctgaccgatcgcccttcccaacagttggcagcctgaatggcaatggcaaattgaaagcgtaaatattaggn

SEQ ID NO: 13217 - DNA, 497 bp, Homo sapiens
  misc_feature 144, 145, 256, 272, 297, 337, 368, 369, 370, 371, 372, 373,374, 375, 376, 377, 378, 379, 380, 381, 382, 383, 384, 385,386, 387, 388, 389, 390, 452, 495, 496, 497: n = A,T,C or G
acgcggggagtgtttggggaggtcaacgggctatgctggcttgacagggctgggctcttcagaacagaagcatggatctcggaatccctgacctgctggacgcgtggctggagcccccagaggatatcttctcgacagggaccnngtcctggagctggggactccactgcccccccttcagaggttccgctgccctgtcaaaccctgtccctgacagatgaggagaagcgtctgctggggcaggaaggggtttccntgccctctcacctgancgtcaccaaggcagaggagagggtnctcaagactgtcaggagtgaaatccggtacatgcagtcanctcatgacagtcggcgggggaagaaagagtnnnnnnnnnnnnnnnnnnnnnnntactctcagcatggatcagcgcctccttaaatcaattctgcagaatcacatattgaaagtanaagttggccttaatgagctatacaacgggcaaatactggaaannn

SEQ ID NO: 13218 - DNA, 840 bp, Homo sapiens
  misc_feature 1, 2, 3, 4, 834, 835, 836, 837, 838, 839, 840: n = A,T,C or G
nnnnagcccgacccacgcgtccggcaccatggtgaacttgggtctgtcccgggtggacgacgccgtggctgccaagcacccgggactcggggagtatgccgcatgccagtcacacgccttcatgaagggcgttttcaccttcgtcacaggcaccggcatggcctttggcttgcagatgttcattcagaggaagtttccataccctttgcagtggagcctcctagtggccgtggttgcaggctctgtggtcagctacggggtgacgagagtggagtcggagaaatgcaacaacctctggctcttcctggagaccgggcagctccccaaagacaggagcacagatcagagaagctaggagagctccagcaggggcacagaggattgggggcaggaggagtctggaacacagccttcatgccccctgaccccaggccgaccctccccacaccctagggtaccccagtcgtatcctctgtccgcatgtgtggccaggcctgacaaacacctgcagatggctgctgccccaacctgggacctgcccaggaggttggagcagaaagggctctccctggggtggtgtttctcctctagggtattgggatgcatgttctgcactgccagcagagagggtgtgtctgggggccaccacctatgggacacggggtcgaaggggcctgtacactctgtcatttcctttctagcccctgcatctccaacaagtccaaggtgacagctggtgctaggggcgtggggttaataaatggcttatccttctctccacccaagtttccacctgaccaggtgaaaaacaaatcagaagggtaagatgatgannnnnnn

SEQ ID NO: 13219 - DNA, 2062 bp, Homo sapiens
agatcatagggagtcgacccacgcgtccgacagccttctcagtatggaccaaagtacccaagcctgtgctggtgagaaacattgccataacaggggtggcctacacttcagaatgcttcccctgcaaacctggcacgtatgcagacaagcagggctcctctttctgcaaactttgcccagccaactcttattcaaataaaggagaaacttcttgccaccagtgtgaccctgacaaatactcagagaaaggatcttcttcctgtaacgtgcgcccagcttgcacagacaaagattatttctacacacacacggcctgcgatgccaacggagagacacaactcatgtacaaatgggccaagccgaaaatctgtagcgaggaccttgagggggcagtgaagctgcctgcctctggtgtgaagacccactgcccaccctgcaacccaggcttcttcaaaaccaacaacagcacctgccagccctgcccatatggttcctactccaatggctcagactgtacccgctgccctgcagggactgaacctgctgtgggatttgaatacaaatggtggaacacgctgcccacaaacatggaaacgaccgttctcagtgggatcaacttcgagtacaagggcatgacaggctgggaggtggctggtgatcacatttacacagctgctggagcctcagacaatgacttcatgattctcactctggttgtgccaggatttagacctccgcagtcggtgatggcagacgcagagaataaagaggtggccagaatcacatttgtctttgagaccctctgttctgtgaactgtgagctctacttcatggtgggtgtgaattctaggaccaacactcctgtggagacgtggaaaggttccaaaggcaaacagtcctatacctacatcattgaggagaacactaccacgagcttcacctgggccttccagaggaccacttttcatgaggcaagcaggaagtacaccaatgacgttgccaagatctactccatcaatgtcaccaatgttatgaatggtgtggcctcctactgccgtccctgtgccctagaagcctctgatgtgggctcctcctgcacctcttgtcctgctggttactatattgaccgagattcaggaacctgccactcctgccccactaacacaattctgaaagcccaccagccttatggtgtccaggcctgtgtgccctgtggtccagggaccaagaacaacaagatccactctctgtgctacaacgattgcaccttctcacgcaacactccgaccaggactttcaactacaacttctccgctttggcaaacactgtcactcttgctggagggccaagcttcacttccaaagggctgaaatacttccatcactttaccctcagtctctgtggaaaccagggtaggaaaatgtctgtgtgcaccgacaatgtgactgacctccggattcctgagggtgagtcagggttctccaaatctatcacagcctacgtctgccaggcagtcatcatccccccagaggtgacaggctacaaggccggggtttcctcacagcctgtcagccttgctgatcgacttattggggtgacaacagatatgactctggatggaatcacctccccagctgaacttttccacctggagtccttgggaataccggacgtgatcttcttttataggtccaatgatgtgacccagtcctgcagttctgggagatcaaccaccatccgggtaaagtgcagcccacagaaaactgtccctggaagactgctgctgccaggaagactacttacgtgtggcgagaacccaagctatgctctggtggcatttctctgcctgagcagagagtcaccatctgcaaaaccatagatttctggctgaaagtgggccattttgcaagcacctgtactgacattctgctaaccggcttgacctgttccttttggcaaaaggaatcaaatcctagagtccaggtccttccagctggtgaatgaatggccactttaaggactgtgacctggccacagctgacagttgtgccattatggaaa

SEQ ID NO: 13220 - DNA, 7433 bp, Homo sapiens
  misc_feature 1, 2, 7429, 7430, 7431, 7432, 7433: n = A,T,C or G
nnactctcgcggtatttgtcccgactctcgcggggtttagcgtggcattgggaggcccggcctgggggaggagacggcgttccgttagcggcgttggggtttggctgcagtggcagtgctttctcttctgctcacggggacccgctcaggctggaggccagccagctcttgccgccacctcggtcgcgatgggggcgcaggaccggccgcagtgccacttcgacatcgagatcaaccgggagccggttggtcgcattatgtttcagctcttctcagacatatgtccaaaaacatgcaaaaacttcctttgcttgtgctcaggagagaaaggccttgggaaaacaactgggaagaagttatgttataaaggttctacgttccatcgtgtggttaaaaactttatgattcagggtggggacttcagtgaaggtaatggaaaaggtggagaatcaatttatggtggatattttaaagatgaaaactttattctcaaacatgacagagcgttccttttatcaatggcaaatcgagggaaacataccaatggttcccagtttttcattaccacaaagcctgctccacacctggatggggtgcatgtagtctttggactggttatttctggttttgaagtaatcgaacaaattgaaaatctgaagaccgatgctgcaagcagaccatatgcagatgtgcgagttattgactgtggagtacttgccacaaaatcaataaaagatgtttttgagaaaaaaaggaagaaaccaactcattcagaaggctcggattcctcttccaattcctcctcttcttcagaatcatcttcagaaagtgaacttgaacatgagagaagcagaaggaggaaacataagaggaggccaaaagttaaacgttctaaaaagaggcgaaaggaagcaagcagttcagaagagccaaggaataaacatgcaatgaacccaaaaggtcactctgagaggagtgataccaatgaaaaaaggtcagttgattccagtgctaaaagggaaaaacctgtggtccgcccagaagagattcctccagtgcctgagaaccgatttttactgagaagagatatgcctgttgttactgcagaacctgaaccgaagattcctgatgttgcacccattgtaagtgatcagaaaccatctgtatcaaagtctggacggaagattaaaggaaggggcacaattcgctatcacacacctccaagatcaagatcctgttctgagtcagatgatgatgacagcagtgaaactcctcctcactggaaagaggaaatgcagagattaagagcatatagaccacctagtggagaaaaatggagtaaaggagataagttaagtgacccctgttcaagccgatgggatgaaagaagcttgtctcagagatccagatcatggtcctataatggatattattcagaccttagtacagcaagacactctggccaccataaaaaacgcagaaaagaaaaaaaggttaagcataaaaagaaagggaaaaagcagaaacactgcagaagacacaaacaaacaaagaagagaaggattcttataccgtctgacatagaatcctcaaaatcttccactcgaagaatgaaatcctcttgtgatagagaaaggagttctcgttcttcctcattgtcatctcatcactcatcaaagagagactggtctaaatctgataaggatgtccagagctctttaacccattccagcagagactcatacagatcaaaatctcactcacagtcttattctagaggaagctcaagatcaaggactgcgtcaaagtcctcatcacattctcgaagtagatcaaagtccagatctagttccaagtctgggcaccgaaagagagcatcaaaatcaccaagaaaaacagcttctcagttaagtgaaaataaaccagttaaaacagaacctttaagagcaaccatggcacaaaatgaaaatgtagtagtacaaccagttgtagcagaaaatattcctgtaataccactgagtgacagtccccccccttcaagatggaagcctggacagaaaccttggaagccctcttatgagcgaattcaggaaatgaaagctaaaacaacccatttgctacccatccaaagcacttacagtttagcaaatattaaagagactggtagctcatcatcctaccataaaagagaaaaaaattcggaaagtgatcagagcacttattcaaaatacagtgatagaagttcagaaagctcaccaaggtcaaggagcagatcttctaggagtagatcttattccagatcatatacaagatcacgtagtctagctagttcacattcaaggtctaggtctccatcatctagatctcattcacgaaataaatacagtgatcattcacagtgtagtagatcatcttcatatacttctattagcagtgatgatggaaggcgagctaagaggagacttagatccagtgggaaaaaaaatagcgtttcacataaaaagcatagcagcagctctgaaaagacacttcacagtaaatatgtcaaaggtagagacaggtcttcatgtgtgagaaagtatagcgagagcagatcatctttagattattcttcagacagtgagcagtcaagtgttcaggccacacagtcagcccaggaaaaagagaagcagggccaaatggaaagaacacataataaacaagaaaaaaacagaggtgaagaaaaatccaagtctgaacgggaatgccctcattcaaaaaaaaagaactttgaaagagaatctttctgatcaccttagaaatggcagtaagcccaaaaggaagaattatgctggtagtaaatgggactctgagtcaaattcagaacgagatgtcactaaaaacagtaaaaatgactcccatccatcctctgacaaggaagaaggtgaggccacatccgattctgaatcagaggttagtgaaattcacatcaaagtcaaacccacaaccaagtcgtccacaaatacttcactgcctgatgataatggtgcttggaaatcaagcaaacagcgcacatcaacttctgactctgaggggtcctgttccaattcggaaaacaataggggaaagccacaaaagcacaaacatgggtcaaaggaaaatcttaaaagagaacacaccaaaaaagtgaaagagaaattgaaagggaaaaaagacaaaaagcataaggctccaaaacgaaagcaagcatttcactggcagcctccactagaatttggtgaagaggaggaggaggagattgatgacaagcaagttactcaggaatcaaaagagaaaaaagtttctgaaaacaatgaaaccataaaagataatattctaaaaactgagaaatccagtgaagaggacctttcaggtaaacatgatacagtgactgtttcatcagatcttgatcagtttactaaagatgatagtaaactcagtatttctcccacagctttaaatactgaggaaaatgtggcctgtttacaaaacattcagcacgttgaagaaagtgttcccaatggagtggaagatgtgcttcaaacagatgacaacatggagatctgcactcctgataggagttccccagcaaaagtagaggagacttcccctctaggaaatgcacggcttgataccccagatataaacattgttttgaagcaggatatggcaacggaacatcctcaagcagaggtagtaaaacaggaaagcagcatgtccgaaagtaaagtgttgggtgaagtggggaaacaggacagcagctctgctagcttggctagtgctggagaaagtaccgggaagaaggaggtggctgagaagagccagatcaacctcattgataagaaatggaagcccctgcaaggtgtggggaacctggcagcacctaatgctgccacatccagtgctgtggaagttaaggtgttgaccactgtgcctgaaatgaaaccacaaggcttgagaatagaaattaaaagcaaaaataaagttcggcctgggtctctctttgatgaagtaagaaagacagcacgcttaaaccgtagaccaagaaatcaggagagttcaagtgatgagcagacgcctagtcgggatgatgatagccagtccaggagtccaagtagatctcgaagtaaatctgaaaccaaatcaagacacagaacaaggtctgtctcctatagtcactcaagaagtcgatcgagaagttccacatcatcttatcgatcaagaagctactctagaagtcggagcagaggatggtacagcagaggccgaaccagaagccggagcagttcctaccggagttacaaaagtcacaggacgtccagcaggagcagatccaggagcagctcatatgatccccacagtcgatccaggtcctacacctacgatagctactatagcaggagtcggagtcgaagtagaagccagagaagtgacagttaccaccgaggcagaagttataatcggcggtccaggagttgtagatcttatggctctgacagtgaaagtgaccgaagttactctcatcaccggagccccagtgagagcagcagatacagttgaaaacgtccggatacaaattatatcttatttgtaaatatctggcaacttagcttaagaaatgtaatgacagtctgttgttctatttcaatatcagaggtgaatttcaaaaatagacacttcttaattgttactggttcatttacatgtggggagaagaatttaaaatacagatatgtctcctaaaaatatttttatgccacattttacagtagccaactatggaaatgaatttcattttcttgaatcaagaaatcgtgaaatttatctatgtataatttgcaatattattttaagtctatttcactctatcttacgtatcccttagaatacagattctttttgcctgtttttccagttttagcatatatgctgccaagcatagaactgtgaaggagaactgttaaaggcggccaaatatttatatactgattacatagagtcttgtacatatgtgctctaaaaacaaaccacccagaattgatactgttggtaaccaggagtataaggcagtggctctggggttcttaattcattcctaacttctttgatacttcacaggattaggaaagtggtcatcatacatcccacacagtctgtattacttcaggcttgtgggcaaggttaggaagaatcaatcagccttaactataaatacctgcactgtctctgaggacttactattttatgttctttttaatcaataccgatcagaagtttaggttataaaaacaattctacttcatgctttggtgcttggtaatttttggtgcgtctttaagcattactcttatatatcatatattaaaataccataaaaatgaaattcagacaaaatcactggcaccaaaaatggtttattctgagctgtcttcactttgactatttggggggcttctctcaagtacagatgtgggttggggtcccctggagcaggcaggattggcagtaagagatattggccactcaagtctactgtgtgtgtgtgcctctggaagagtgaagaatggacttcaaaagtaacatcaaaaatctaactgccaccatcctggagacattttgcagggctttcctttcaagtctttcaagtacaggatattaccacaacagcagctgaactgttgtaaccagcatgtttttcctatttccactgtgacctgcagctgactcaaagccttgcgtgacctgacccaggtgcaagagacaggggaagagggatagagggtatagcataaattacatattttcatggctttgggtggttcctccaaaaataattggacctgtaaaaactagtgtgtgtgtgtgtgtgtgtgtgtgtgtgtgtgtgtgtggttttttttttttaatctttactttgaatttgttccccaagtgtacttaatcaccttagtgccagtttaatccagttatgcagaagaaattcatattggttgcctgatgtagagctcagcaccaccctaccacaggccttgtctggtgtatttgggaagtggaaaagagccctcagttggagggagctgacaacccttggtggagggagggtgcccttgaatgtattaaaactatcacccaaagaaggtatgaaaacagggtaaggtggtcagttgtttgccaggtcaatagacagaaagtacattagaaaacaggacttaggccaaacaaacaatactggatactgaatacaaaacagtatgatttatattaaaggtttccaaaggttgcctgcaaaggagaatattactactagtcagcaggaaaaaaatgcattcagaacccaagcagaaactgccaaatgtaattaggttaagaaaagttacccttgggcagtgtattagttttctattgctgtgtgacaaattaccccaaatttagcagtttaaaaaacaatacccatagcagttctgtagctcatgagtctggcacagtgtggctggattctctgctcagggtcttaaaggctgaaataagggttggcaggacaacattccttcatggaggctctggggaagaatctgcttctaagttcattcaggttgttggcggaattcagttctttgctggctctcagctggaggcccctctctcacctcaaggctgcctgcattccttcttatgtggtcccctccagcttcaaaccagccttcctgctctttctcatgcttcatatctctctcccgtcctcctgttttaggggcatatgattagctcaagcccacagatatattttaaggttgattgtgcgatagaacataattgcaggagtactgtctcatctcatcatattcacgggttctggagattagctcattgaaagtgggaggggcattttcaaattctgcctaccacaggcaataactgcccatctcagctgtaggtggaatttttacccagaaaagataggccctagaagcctcatttcttttctccatggaaaaggacagccctctgctgcagcgttcaacttgtgtgtttactgacagagtgaactacagaaatagcttttcttcctaaaggggattgttctacattttgaagttattttttaataaaattgaattatgttgtgtattgtgcttcttaataggaaatgcattattggactgtttttgtaacatcctgtttattgcaaatagctagtatcgttcaaaaactgtataaaatacttttgtacatattagcaatgtctaatttgtatacacttcagttaaatttccctaaaacttgaaaggggaccttgtagaaattaaaatatatacttagtctaaataaaaaaaaaaaaactggagggggggcccgtacccaattgcccttaagtgagtcgtttacaattcactggccgtgttttaaacgnnnnn

SEQ ID NO: 13221 - DNA, 5504 bp, Homo sapiens
  misc_feature 1, 5492, 5493, 5494, 5495, 5496, 5497, 5498, 5499, 5500,5501, 5502, 5503, 5504: n = A,T,C or G
naagtgccgtcgccgcgccccttccccctcccgcctccccggccccctccccggaaccggcggtcgagctacggtcgcggagcagtggaaccgagactgccccgcggagccgccggtatgagcgcccctcgccaccccgtgtcccaggcccggcctttctgacaagagctagacttcgggctccttgaggatattcagttttgtatgtttgaatatcctctcaccatgttcagcataaagtaccattcttaatgattatcctcaacaagacaggtgtgagagggttgctgttgtattgcaatcatggtgcagaaataccagtccccagtgagggtgtacaaatacccctttgaattaattatggctgcctatgaaaggaggttccctacatgtcctttgattccgatgttcgtgggcagtgacactgtgaatgaattcaagagcgaagatggggctattcatgtcattgaaaggcgctgcaagctggatgtagatgcacccagactgctgaagaagattgcaggagttgattatgtttattttgtccagaaaaactcactgaattctcgggaacgtactttgcacattgaggcttataatgaaacgttttccaatcgggtcatcattaatgagcattgctgctacaccgttcaccctgaaaatgaagattggacctgttttgaacagtctgcaagtttagatattaaatctttctttggttttgaaagtacagtggaaaaaattgcaatgaaacaatataccagcaacattaaaaaaggaaaggaaatcatcgaatactaccttcgccaattagaagaagaaggcataacctttgtgccccgttggagtccgccttccatcacgccctcttcagagacatcttcatcatcctccaagaaacaagcagcgtccatggccgtcgtcatcccagaagctgccctcaaggaggggctgagtggtgatgccctcagcagccccagtgcacctgagcccgtggtgggcacccctgacgacaaactagatgccgactacatcaagagatacctgggcgatttgactccgctgcaggagagctgcctcattagacttcgccagtggctccaggagacccacaagggcaaaattccaaaagatgagcatattcttcggttcctccgtgcacgggattttaatattgacaaagccagagagatcatgtgtcagtctttgacgtggagaaagcagcatcaggtagactacattcttgaaacctggacccctcctcaggtccttcaggattactacgcgggaggctggcatcatcacgacaaagatgggcggcccctctacgtgctcaggctggggcagatggacaccaaaggcttggtgagagcgctcggggaggaagccctgctgagatacgttctctccataaatgaagaagggctaaggcgatgcgaagagaatacaaaagtctttggtcggcctatcagctcatggacctgcctggtggacttggaagggctgaacatgcgccacttgtggagacctggtgtgaaagcgctgctgcggatcatcgaggtggtggaggccaactaccctgagacactgggccgccttctcatcctgcgggcgcccagggtatttcctgtgctctggacgctggttagtccgttcattgatgacaacaccagaaggaagttcctcatttatgcaggaaatgactaccagggtcctggaggcctgctggattacatcgacaaagagattattccagatttcctgagtggggagtgcatgtgcgaagtgccagagggtggactggtccccaaatctctgtaccggactgcagaggagctggagaacgaagacctgaagctctggactgagaccatctaccagtctgcaagcgtcttcaaaggagccccacatgagattctcattcagattgtggatgcctcgtcagtcatcacttgggatttcgacgtgtgcaaaggggacattgtgtttaacatctatcactccaagaggtcgccacaaccacccaaaaaggactccctgggagcccacagcatcacctctccgggtgggaacaatgtgcagctcatagacaaagtctggcagctgggccgcgactacagcatggtggagtcgcctctgatctgcaaagaaggagaaagcgtgcagggttcccatgtgaccaggtggccgggcttctacatcctgcagtggaaattccacagcatgcctgcgtgcgccgccagcagccttccccgggtggacgacgtgcttgcgtccctgcaggtctcttcgcacaagtgtaaagtgatgtactacaccgaggtgatcggctcggaggatttcagaggttccatgacgagcctggagtccagccacagcggcttctcccagctgagtgccgccaccacctcctccagccagtcccactccagctccatgatctccaggtagtgccgcgctgcctgcacctagtgtgcagaggggacggccgcccctcctcggacagccagctgcacccgcccacccagcggcgacattgtacagactcctctcacctctagatagcaaatagctctcagatggtaaacgtagtcgtttgatcccaaaactaccttggcaggtagttttaactctgatcctaacttaactcaatagccatagattttgtatacgttgtgcacaaaatccaaccagagcgcaagggctctcttgaaagaaaagtagtttctgtaccaattaaaggattgacgtggtctcagatattgatgcaaaaaatttttccaacgaactccgcattgtccattagtgaatgaattcctgtgacatcctccagagatggcccctcctcacctgggacggaagctgccagctcgcttcccccaagctgcctcatggcccgcacgccgcctcacggcccccatgcttcccgccagtcaagatggtctgtggacttagggccagcccttgaggtccttatcctctgaggattcagaggttgcctgcggagtaccttgtcccagggccagacacacccacaccacccactgtcctgcagtggggccgggggctcaggaggggctctcagggactcctggtgactccaggaaaatgctgccatcgttaaacattactttctctttcctccttttcaaatctttttgatactttttagagcaggatttttctgtatgtgaacttgggtgggggggttcttcccgtttccttccgtgcgtcgcccctctcacctgcagtcagctcccagcccagtgtaggccatctcctctgtgccctctggtggctcattgtcctcagagcccagacagttccagccactaggaggccgtcttggaaccagcaagtcgcatttgccacttgacactgtccatggggttttattagtagctaagcagcagctctcgcatccacttcagggtggcgtgtggcatgtaggagtcctgcttctttgtacatgggaattgtggactcatgcgtgtgtgtgtgtgcatgtgctgtgtgtgtgcatgtgtgcatgacggtgggggtgctggggggacggggtgagtggaaacttagtttgagtaatgaaggaatcttcacagaagcaaatcagaatatgggatttgtttgccttttacattttgtttaattcctgattttaaagcctgctctatctggtacaggcccttattttttcagctttttatgggaaaagcaggttatttgagaatctgtccagaagttgcataggggatggcctccacgataaggacatgcaacacgtgtttctgtgtgcagcagaggccgtgtttttcatgccaaaccccacgcggctgtcaactgtgtgcgtggtaggcatggagatcctggttgtgccgtctcagctccgctctgaaggcactgtgtgggtgctgcgtgactggagagctgtgtggaggccatgtgtgccccgtgcagggatcaggagggcgggggagggaccgagcagccctcttgcccggtcgggtcagccctagtggctgcctgcacactgtagacgtcccagggcctgtgctgtgatcacctgcctttggaccacatttgtgtttgctcttagagatcgagctcctcagtggtacctgaagcctttgcttccggaaagcgcggtagggttcgtaggtagggctagtaggtagggttagtaggtagggctagtaggtagggctagtaggtagggttagtaggtagggttcgtaggtagggctggtaggtagggttagtaggtagggctagtaggtagggttcgtaggtagggctagtaggtagggttagtaggtagggctagtaggtagggctagtaggtagggttagtaggtagggttcgtaggtagggctggtaggtagggttagtaggtagggctagtaggtagggttcgtaggtagggctagtaggtagggttagtaggtagggctagtaggtagggctagtaggtagggttagtaggtagggctagtaggtagggttcgtaggtagggttagtaggtagggctagtaggtagggctagtaggtagggctagtaggtagggttagtaggtagggttcgtaggtagggttagtaggtagggttcgtaggtagggttagtaggtagggttagtaggtagggctagtaggtagggctagtaggtagggctagtaggtagggttagtaggtagggctagtaggtagggctagtaggtagggctagtaggtagggctagtaggtagggttcgtaggtagggttcgtaggtagggttcgtaggtagggttagtagcgcgtctgtgctgcttccacctggtgcttcctgttcccaaatcacaagggcctgaaggtggtccctgctttctctttctctttctctgtgtctcagatggcgattttgctgacagctgccaagaaaatgcttcactcaacagtcctcatgtgcccagagatgtttatagaactgtttgaattgcagccatcccctgccccctcccaggctgaagatctgttctttttaagttgattcgggagtggcattcttttatacccaaagactgtagtgcatcttgaagagctcaaagcacatgaccgcacaaatgcttacagggtttcctcccgagtaatccaatctcactccccttgtaagggaattctggggcagctatggtttgagtatgcagtttgcatcgtgtttctacctttagtaccttgccactcttttaaaacgctgctgtcatttcccatttcttagtactaatgattctttgattctccctctattatgtcttaattcactttccttcctaaatttgttatttgcatatcaaattctgtaaatgttttgtaaacatattacctcacttggtaatacaatactgatagtctttaaaagatttttttattgttatcaataataaatgtgaactatttaaggacgacaaaaaaacagggaaaagttacgcccctttgaaaggcccaggggataaaannnnnnnnnnnnn

SEQ ID NO: 13222 - DNA, 1681 bp, Homo sapiens
  misc_feature 1, 2, 1675, 1676, 1677, 1678, 1679, 1680, 1681: n = A,T,C or G
nngattgttatcttggtgctgcagaggacagcagaagaggagattgggtcagaaaactgccctgccgcaccagagcacagcgcactagtgggacaggggtcctgactcagacttaactggctgtgttcgtggtttttcaactttacctgatttctgtatgttgtcatcttgcgtacgcccagtccccacgacagtccggtttgtagattccctgatctgcaattcttcccgttccttcatggatttgaaggctctcctttcttccttgaatgactttgcatccctctcgtttgctgagagttgggacaatgttggattactggtggaaccaagcccaccacatactgtaaatacactcttcctgaccaatgacctgactgaggaagtgatggaggaggtgctgcaaaagaaggcagacctcattctctcctaccatccgcctatcttccgacccatgaagcgcataacctggaacacatggaaggagcgcctggtgatccgggctctggagaacagagtcggtatctactctcctcatacagcctatgatgctgcgccccagggcgtcaacaactggttggctaaagggcttggagcttgtacctccaggcccatacatccttccaaagctcccaactaccctacagagggaaaccaccgagtagaattcaacgttaactacacccaagacctggacaaagtcatgtctgcagtgaaaggaattgacggtgtttctgtcacttctttttctgctaggactggtaatgaggaacaaacacggattaatctgaattgtactcagaaggctttgatgcaggtggtagattttctttcccggaacaaacaactttatcagaagacggaaattctgtcactggagaagcctttgcttctacatactggaatgggacggttatgcacactggatgaatctgtctccctggcaaccatgattgatcgaataaaaagacacctaaaactatctcatattcgcttagcccttggggtggggagaaccttagagtctcaagtcaaagtcgtggccctgtgtgctggttctgggagcagcgttctgcagggtgttgaggctgacctttacctcacaggtgagatgtcccatcatgatactttggatgctgcttcccaaggaataaatgtcatcctctgtgaacacagcaacactgaacgaggctttctttctgaccttcgagatatgctggattctcacttggagaataagataaatattatcctatcagagactgacagggaccctcttcaggtggtataattgcagaaacatcaggataacacattctacaaatcagctggatgccaacttaaatttgtaacatgagtcagtgggactggtgtgcttccagagagtgtcttcgagggtatcatcatttccggtttgttaatcttattcaccaaatgttctatcgctcgtaaggtaaaactgtaatataactaccatattaaataacaaatgttcattataaactctaggaaagattgaataaaatctgtttacttaacaaactttggaaggagctcaagtgattctgtccttagtttaattgtagatgggatggatccatttgggtatctctgcccttggttagttaacattatgcttgaaaaacttggcttgaacacttctaggtagtagccnnnnnnn

SEQ ID NO: 13223 - DNA, 433 bp, Homo sapiens
  misc_feature 1, 2, 432, 433: n = A,T,C or G
nnattgcaagtgcttgtcacctacacagtatttagtaaatacattgtgatgtgagaatcgcagaagggagaagatacgaaggaaagaagggaataacctgactgtgggtattttaagtctagcagtaatacccactctactgaatcatactctgatttctaaagttttattagttcaacgaactttgtaaatattatatttatgtgggactgtatactctccaccccgaccaccaagaaattaggttggctacgtgttttctatcttagacttctggaggagaaggagcacggataataaagaggaagcagaatggctatagggatataatgtcaagaggagagtattggttctagactgattatgatatacctcctggagagccctagtgtgccttattctgactgtctgtaatcctagctctgcctccann

SEQ ID NO: 13224 - DNA, 619 bp, Homo sapiens
ggtgatgagcctacattactcttaaaataaaaaaagtagccaatatctttattaaaaggcagagcattataaccactatctagaaatgttaaaccttttgatcttgactattatatttgtatttgataatatgatgtaccgtgttatgcaaattaagcacttttcttctaaattcacatgaacttttagagacgtagactatgttattgaagtaactcatcctaagtgtctgtagtgattggagatattcttgcttatcaaattgaagtatttataagtgagtgacgtgatgtctgagatctatcttaaagtaatccagtagggcaaagataacttgagattggccagttcttgataatttttgaagtaggctgatgagtacgcgggtagccacctcattttacagagttgaaactgaggctcagagactgaaagttaagcctgaggttgcagtcaataagaggcagagctggaactgaaacctacctgtgtctgaccaccagttcgtgttctgacggcaggctagtctgcatcacagagtgtggagtagatggtgcatgcctgctaggatgggctaggtatcactgtaggtaagaaacagccccaaactatggaaatg

SEQ ID NO: 13225 - DNA, 591 bp, Homo sapiens
  misc_feature 1, 587, 588, 589, 590, 591: n = A,T,C or G
nctccaccgcggtggcggccgacgtacgcggggaaaagagttggttacagattcattctgtgtctcatggcgctgtgctctcttccctagagaggatctttctgggtatgcttttagccagagaagaagtagttcagtttatggtctcatttctcatataaattgtgaaaattctccacggcttcacatgctagttcagaagatattgatgccttgagaataaagcatctggttgtaactccagcagttttatatttaaagtatacctaatataattgtcaaccacattactttagaaaacataaacaaaagatagttacacatatttattttaaaaatggtgactgggtgcggtggctcacgcctgtaatcccagcacgttgggaggccgtgactggcagatcacgaggttaggagatcgagaccatcctgactaacaaggcgaaaccctgtctctactaagaatgcgaaaaaattagccggacgtggtggcacgcatttctaataatttctcaggcgatgctgctgctggtggtccttggagcttgctctgagttgcaaaaggagaggcctttgatgggaaaaannnnn

SEQ ID NO: 13226 - DNA, 1455 bp, Homo sapiens
  misc_feature 1455: n = A,T,C or G
ggtggtcccatgcaattaaaatggagataaattcctatcaactagtgacattatagccatcataacacagtgcattgcttttttatgtttagatatgtttagatacacaaatacttactattgtgttacaactgcctacagtattcagcatagtaacacattgtagaggtttgtagccgaggagcaataggctataccacatagcctcagtctgtacggtgtgtagcagcctgtaccatctcagtgtttgtaagtacactctgcgttgtttcacacaagatcacctaacaaggcaattcttagaacatgtagttaagggacacgtgactatatgtgaaaacaaattgtcaaacttcactttagtatggcaaatgttaaagaacttttctattatcagctgtttgtctgactgaaaaatacatatttttctaattcatggtgatgtaacattagtcctaattgaaaaactagtatttaaacataattatttataaagatgacacatcaaagggcttatttatttttaaattttttatttaaaaggatattcagttttagctatttttacccctcagattgtagataaagaaggcattaaatttatgtttgtctcctttttctgtttaattttaaagatatttaaaatgatataactaaaaatgtttagctggtgtatatgttttgaatacctttttcccctcagtttagtatattgactttgtactgtaaatttttctgcttttcttggataatctcaggattttcatgaggatagggggaactcaactttatttatgagacaaaatttccatacaaagctcaatctcctttatatacccacagacataatattagtttttaaaaagccaatttcttcatagttttttcccattaaattctcaaggaacacttggatctttaagcacggaacataatcatgatgttaaaaacagagaaaataaggctttataaagttaatgattatcatcagtatgaatttaaggtttgttttaatttcaagatttgattttttatacgtgtaattctattatctacccaagcagatctgtagtggttccaattagacttctcaaacagcaaatttatcctgattttatttgaaaagcctcttggattgatagtatagtagctcaggcattggaaactttctgcaaactgttttgggtttgcaggccagatggtctctgtggcagcgtactacagccccggcaattcacggtgtgaaggagggcctagcaaggactcgcagtgaaggatgctggcgaatggacctctagttggaccccctaatatagcgcccaatatattaaccagaaagggcgaatcggatgggacgagaatagggaccaaagtacgaggggcaaacacaacacgcaggagatatcggggaacgacaaggagagaattacagcaaaaaacatgccgctgccacan

SEQ ID NO: 13227 - DNA, 4908 bp, Homo sapiens
  misc_feature 4420: n = A,T,C or G
gggggaaatataaaatgagtaataattattattttttgtggagacacatggaaacacagaggtgtgaagacagacgtggttagcacaaaccacttgggccagtgaaaccagggcaaactcataaggtctacggaaagtgcaggcttccaggagtgatgaggtggagcattttctcaggttaccaacagccttgacatattcttctcctaagtatttttcatatgtgtttctgtcatgaagtttggccaaacatactgtgtcatctctgaacagaaggtccttggtttccgaccggaacaaacaaaagttgcccgagcagtcagttacgttgcttccaaataggtgctgctgttgacgtaatatcttgtggacgcaagcttccttatctttccgtgtgaccacagcgtgattcggggctctggccaggtggcagttcgcatactcctccacagatttcctggtaccatcaaggcacagcaactcatagtctttttcattcagattcttagcccatggatcagggttttttcccccagtgttctgtgggacagtctggtgtttcacaaaggccacatctcccttctcaaccagacacctgaaagcgcctgtgtagccgtagtatccctctttgttgttgggttcacagaggttgatcttattgtagagcaggcccatggggatgttccagccagcggttctgccaactgccgtatggcaggacttcttgcctttcagattgtcccaggtgaggtcagaagctgatttcttcaccactgctacagcaaaataccctgcctctggtgtatcctcacaattatcgctcttattgtagttttctgccaagacaggcaccagaccacacttgcccgctatgtagacaaaccctccatccaagctcatggcatcagcttctccattccctacactggttaacactccactcatcacacttgagcctctcgtggtggctcagcgcacaccacttcacaggcttgcattcatctgttggggcttctgggccatgtgcccttcccgtagattccggatggcagtgacatactcatagcccaggtacatcttggcatccatcctgggggggacttttaaaaacccgtgggcagagtccttaaacagcaggtccttcccatgaggagagctgaatagttggaattcttttgatttgtctttgccaaaatgttcctgggcctggttgagaagctcccagatcaagtcctccttgccgcccatacttcgggccacgacggtatgagaagggacctgggccaagtggcagtccttgtattcatctaccggcttccgggtgttgtccaagcaaagcagctcatactggtccctgtcagccttgtttgccaagttctcaaatatagtcgagtgcttgacaaaggccacatccccagcaccatccttcagacacttgaaggctcccgagtagccgaagtattggttaagggtggagcagccacaccctggacacagttgacacagctgggggaagtccgtcccatccgcacaaggggcacagctgcccgagaagaaattggccactgctttctcaagaggtttacgtggctcaggtaagtcacagtaaagtaagcctatggggatgttccacccagcggacctgcctagacccgtgtggcaggacttcttgcctcgaagctggttcatctggaagccagacccatagaactctgccaccacaggcttcaggttattgggagccaggtaagcatcatacaccaaacctgcatccagtgtcacagcatccgcttcgtttgccgcaatggccctgatgcaatcaaggtaggaggctttcttcacacaagcaacactgggaccatcggatggaatgacgcttttcatatggtcgcggaaactctggcacttagtggcctcatgctccgacactgcacaccatctcacagttttatcagggacagccagacacagccccaggacggcgcagaccagcagggctcccacggcgagcctcatcttccgggtgcggcgctgagaagcgagtccggactgtgctcgctgctcagcgccgcacccggaagatgaggctcgccgtgggagccctgctggtctgcgccgtcctggggctgtgtctggctgtccctgataaaactgtgagatggtgtgcagtgtcggagcatgaggccactaagtgccagagtttccgcgaccatatgaaaagcgtcattccatccgatggtcccagtgttgcttgtgtgaagaaagcctcctaccttgattgcatcagggccattgcggcaaacgaagcggatgctgtgacactggatgcaggtttggtgtatgatgcttacctggctcccaataacctgaagcctgtggtggcagagttctatgggtcaaaagaggatccacagactttctattatgctgttgctgtggtgaagaaggatagtggcttccagatgaaccagcttcgaggcaagaagtcctgccacacgggtctaggcaggtccgctgggtggaacatccccataggcttactttactgtgacttacctgagccacgtaaacctcttgagaaagcagtggccaatttcttctcgggcagctgtgccccttgtgcggatgggacggacttcccccagctgtgtcaactgtgtccagggtgtggctgctccacccttaaccaatacttcggctactcgggagccttcaagtgtctgaaggatggtgctggggatgtggcctttgtcaagcactcgactatatttgagaacttggcaaacaaggctgacagggaccagtatgagctgctttgcttggacaacacccggaagccggtagatgaatacaaggactgccacttggcccaggtcccttctcataccgtcgtggcccgaagtatgggcggcaaggaggacttgatctgggagcttctcaaccaggcccaggaacattttggcaaagacaaatcaaaagaattccaactattcagctctcctcatgggaaggacctgctgtttaaggactctgcccacgggtttttaaaagtcccccccaggatggatgccaagatgtacctgggctatgagtatgtcactgccatccggaatctacgggaaggcacatgcccagaagccccaacagatgaatgcaagcctgtgaagtggtgtgcgctgagccaccacgagaggctcaagtgtgatgagtggagtgttaacagtgtagggaaaatagagtgtgtatcagcagagaccaccgaagactgcatcgccaagatcatgaatggagaagctgatgccatgagcttggatggagggtttgtctacatagcgggcaagtgtggtctggtgcctgtcttggcagaaaactacaataagagcgataattgtgaggatacaccagaggcagggtattttgctgtagcagtggtgaagaaatcagcttctgacctcacctgggacaatctgaaaggcaagaagtcctgccatacggcagttggcagaaccgctggctggaacatccccatgggcctgctctacaataagatcaaccactgcagatttgatgaatttttcagtgaaggttgtgcccctgggtctaagaaagactccagtctctgtaagctgtgtatgggctcaggcctaaacctgtgtgaacccaacaacaaagagggatactacggctacacaggcgctttcaggtgtctggttgagaagggagatgtggcctttgtgaaacaccagactgtcccacagaacactgggggaaaaaaccctgatccatgggctaagaatctgaatgaaaaagactatgagttgctgtgccttgatggtaccaggaaatctgtggaggagtatgcgaactgccacctggccagagccccgaatcacgctgtggtcacacggaaagataaggaagcttgcgtccacaagatattacgtcaacagcagcacctatttggaagcaacgtaactgactgctcgggcaacttttgtttgttccggtcggaaaccaaggaccttctgttcagagatgacacagtatgtttggccaaacttcatgacagaaacacatatgaaaaatacttaggagaagaatatgtcaaggctgttggtaacctgagaaaatgctccacctcatcactcctggaagcctgcactttccgtagaccttaaaatctcagaggtagggctgccaccaaggtgaagatgggaacgcagatgatccatgagtttgccctggtttcactggcccaagtggtttgtgctaaccacgtctgtcttcacagctctgtgttgccatgtgtgctgaacaaaaaataaaaattattattgattttattaaaaaaaaaaaaaaaaaaaaaaaaaaaaaaaaaaaaaaaaaaaaaaaaaaaaaaaaaaaaaaaaaaaaaaaaaanacctttgggggccgcttgggcccagtcgattttagattcgggcaagtttatgcttgcggccgaaattggggctaatttggccaattcgccctataggggggcggataaaaattaacgggccggggttttacaacgtcgggactggaaaaaccctggggttcccaaattaaatggcttggaagaaaatcccctttttgccagttggggaaaagcaaaaaggcccgaaccgatcgcctttccaaaaagttgcgaaacctgaatgggaaatggaaattgtaagcgttaatattttggttaaaattccggtaaaatttttggtaaacaagcctattttttaaccaaaaggcccgaatcggaaaatccctttaaataaaaaaaaaacccggaagggtgtggggggttttccatttgggaaaaaggcccttttaagaagggggccccaccgaaaaggggaaaccggctttaggggggggcccctcctgacccaa

SEQ ID NO: 13228 - DNA, 322 bp, Homo sapiens
ccgggcaggtactacgcttccccttccgtgataaccaaacccccacaaaccactccaaatactaaaaataaaataaaataaagtatggggttcctagggaactgactttgccaggacatacttttcgttggggcggaatgcaccgaaaatcattggtaggaaaaataattttttttttgaggaaaaatttggaaacctttttcccaaagggcccgcaagatcctaaaaaaagcaagagaccgcgcagaaaccgaggatccccctcacaggcgacacccagcgcgacctccgctagggtcctgacaaagaatgtccacttccc

SEQ ID NO: 13229 - DNA, 2468 bp, Homo sapiens
  misc_feature 1, 2, 3, 4, 5, 2461, 2462, 2463, 2464, 2465, 2466, 2467,2468: n = A,T,C or G
nnnnnaatgtattagagaggagagtgtgggtgatgcgttttcctagtctcttccgttcgctcgttgtattcacattcgcgctctctttatttatcatgcggactagatctacgagtattgatttcaatatattgctccgcattgtgttcacgtgttctcgagctgtgatctgtgaaccacaaaccatttgtttatttaatagaaaaaagaatgtgtagattattagcaaagtaatgccttaaaatgtatcttcacacagttgaaattttagtataaacttgtatatcaagttgctttccattatttattctactttaaaaatatatacaactatgatgttcaaatatgtattctgagccattatgttcaaacataaatatctgggaaattcaaactgctgcaacaagttaggaaaggattaaggaaaaatgatgagctacaaattatgtagttggaggaagaaaaaaatgttacttagcatttatgtctggataggtatgtattttctaatttacatacacatatccagttgagtatagacaaccatcaaaatgtaaccagttacacagagactagactaagccaacactattttctataacaggtaacagtagtgatttcaaaaattttaatatctcaatagtttcaccaaaaattatttgtggtaatatgctaatattctgaagttttgagaggcacagattaaatgagtgcactatctatgccaaactcagcaagtctataacttactgtttaattatggtgtaagtatctgaacacaatagcatagagaggcaaccagaaaaggacattttacatatgcccatgctgatcaatcacattaacatcagtgcttacaactttcaaatttaaatataaagggacacttgcaaagccgcaagacaacttcagtacaaaaacccaaattgataaatctgcaaaatcttaaacttcttaatccattgataaatattaaggagtagctggtcttcaaacaccgtaaaaagttaaagggttgaaaacatgttcaccctttgctatacggtggcatctgaaattatcaggcatgacaacttgaatttgttttgctcttccatgcaagaagtatatatatgcattttaagatagcttagaattaagagttaacttctagtcagtattggtaagtgactaggatggctatccaatcagtattctatggtatcacataccaaagtctctacaatatgacagtcttgtcttgttcagaactcatcacttttgggtagggaagagaggcacggcagaaaagcagttgcaattaaaaaaaaaaaaaacagcagaaaagctttaaatatctatataattttgaatcatcttgtattctatcagataatacttggaacaaaatcttatttcaatcagctcaatctatacaagttataagatgcaacacaatgtaaaccctatagtctacagaatatgcactatttaatactcattaactaaagaaaagtcaatgaagattaccaaataggaaacacaaagcattctaaatttttaaatcactttagggtagctaaccagaaactacagaaataaaatatgcacgacaaaaaaaagaaaaaaggagagcaactaacttttcagtgcatcacatccatgaggataaaatgtatggcacttatgtgtgagactaatactaacaattgttaatttaagctgggaatgactcacagacattaaagtcatataagggcaagagctagccaattaaaatgttaaaattaaacatatcaccttttttccttgtaaaagcactgaaaatgtaatgagtacgggtaactcactaaaaattttcctatttcatttgcccccattgtagtgtcttaaattattctgtaatatttctacctgttacaaagtctgatatttaaggcctgtataaactcttttacactactgaaactactgttttctgtgtactacaaatgcctttatgaaaaaatagcatagctggtttaaattataaaccccaaaaacaaaagtctgacattttctaagctagtgagaaatcaattttaccatgatatatcaatattaactaacattcctatggtagatttatttttcctccataaaactgaacagtgcagaatagggcttgggctacagttcatcacatttggttttcttattaacaattaaaaggcaattttcttcctccctaacacatgtagacattaaatctaaggtttttaaaatatcaactacctataagaaaagtagtcttaaatggttaaaaggaatcaaaataccaaagtttagtgtgcgaagagtagatataaacaactgcgaacacgggtagatcattggtgttgaatatttaacatgaatagccccaaatgagttcccaagtttttccacctttaccaataaaaaaaggtgtcctttccacagtttgggaatatgcattgtacannnnnnnn

SEQ ID NO: 13230 - DNA, 423 bp, Homo sapiens
acgtcagcttgaaattatgtgctgctttggctgcatgtcagttcttgccaactacttcgtgttcatgactttcttcccagcttgtgtgtccttggtattagagctttctcgggaaagccgcgagggtcgtccaatttggcagctcagccattttgcccgagttttagaagaagaagaaaataagccgaatcctgtaactcagagggtcaagatgattatgtctctaggcttggctcttgttcatgctcacagtcgctggatagctgatccttctcctcaaaacagtacctgcccgggcggccgaggtactcaggccgggtaagaaacatggcgagggtaggaggaggcagcggctacgcggggattctgaggaccaacacgactccaccggcacccaactcaccggcagccaactcacccaca

SEQ ID NO: 13231 - DNA, 564 bp, Homo sapiens
  misc_feature 313, 562, 563, 564: n = A,T,C or G
accaggctgtagatttgataagctagatgcagtagaccgaaaccatccaaaacctgtttagcttcttcctccattggagtttattgggacaaacaggagagccagccattgtctccagtacgcggtattcaatttaaatgttgctaaccttcctttcccactggctctgtataaaaaacttctggaccaaaagccatcattggaagatttaaaagaactcagtcctcggttggggaagagtttgcaagaagttctagatgatgctgctgatgacattggagatgcgctctgcatacgcttttctatacactgngaccaaaatgatgttgacttaattccaaatgggatctccatacctgtggaccaaaccaacaagagagactatgtttctaagtatattgattacattttcaacgtctctgtaaaagcagtttatgaggaatttcagagaggattttatagagtctgtgagaaggagatacttagacatttctaccctgaagaactaatgacagcaatcattggaaatactgattatgactggaaacagtttgaacagaannn

SEQ ID NO: 13232 - DNA, 436 bp, Homo sapiens
  misc_feature 350, 436: n = A,T,C or G
acgcggggtcccaagatggcgtcgaagataggttcgagacggtggatgttgcagctgatcatgcagaagcccgacatcccagtgccttacctgtatttcgacatgggggcagccgtgctgtgcgctagtttcatgtcctttggcgtgaagcggcgctggttcgcgctgggggccgcactccaattggccattagcacctacgccgcctacatcgggggctacgtccactacggggactggctgaaggtccgtatgtacctgcccgggcggccgttaaacatgtgtcactgggcaggcggtgcctctaatactggtgatgctagaggtgatgtttttggtaaacaggcggngtaagatttggcgagttccttttactttttttaacctttccttatgagcatgcctgtgttgggttgacagtgagggtaataatgan

SEQ ID NO: 13233 - DNA, 387 bp, Homo sapiens
  misc_feature 387: n = A,T,C or G
acgcggggggagcaagcaggaagtgaactgagggccaccctgggaggaagccgactaggcgaattcacttactgaccggcctgggctgctctgagacatggaggaagccagaaggtggctcgaaaattctggtggaagaacgtgaagatgattgtccttatctgcgtgattgtttttatcatcatcctcttcattgtgctctttaccactggtgccttctcttaagtaacagggaacctctcccacctgcccttctcttcagggacaaccctccataaatgtgtgccaagagggtctcctttcctgtcttcctctacagagaatgctgctcggtcctcctacccctcttcccgaggccctgctgccatgttgtatgccccagaaggn

SEQ ID NO: 13234 - DNA, 328 bp, Homo sapiens
cgggcaggtacgcggggcctgactcggggtcgcctttggagcagagaggaggcaatggccaccatggagaacaaggtgatctgcgccctggtcctggtgtccatgctggccctcggcaccctggccgaggcccagacagagacgtgtacctcggccgttaaacatgtgtcactgggcaggcggtgcctctaatactggtgatgctagaggtgatgtttttggtaaacaggcggggtaagatttgccgagttccttttacttttttttaacctttccttatgagcatgcctgtgttgggttgacagtgagggtaataatgaccccgcgt

SEQ ID NO: 13235 - DNA, 2716 bp, Homo sapiens
gcgacgcgtgggcgcgctcggcgaatcgcagcctgtcttgctcgcggagagaggagctaggagcctcggccaatgggagccggcgttgttggaggccacggcggcgcagccccaaagcgagcgaagctagggtcgccgccactgccgcaggaggcgtgaggggataaaaacattcagatggcagatcacagtttttcagatggggttccttcagattccgtggaagctgctaaaaatgcaagtaacacagaaaagctcacagatcaggtgatgcagaatcctcgagttctggcagctttacaggagcgacttgacaatgtccctcacaccccttccagctacatcgaaactttacctaaagcagtaaaaagaagaattaatgcattgaaacaacttcaggtgagatgtgctcacatagaagccaagttctatgaagaggtacatgacttggaaagaaagtatgcagcgctataccagcctctctttgacaagagaagagaatttatcaccggcgatgttgaaccaacagatgcggaatcggaatggcacagtgaaaatgaagaggaagagaaattggctggagacatgaaaagtaaagtagtcgtcacagaaaaagcagcggcaacggctgaagagccagatcccaaaggaattccagagttctggtttaccatcttcagaaatgtggacatgctgagtgaattagtccaggaatatgatgaaccaatcttgaaacacctgcaggatattaaagtgaaattttctgaccctggacagcctatgtcttttgtgttagagttccactttgaacccaacgactactttaccaactcagtcctgacaaaaacctacaagatgaaatcagaaccagataaggctgatcccttttcctttgaaggtcctgagattgtggactgtgacgggtgtactattgactggaagaaaggaaagaatgttactgtcaaaaccatcaagaaaaagcagaagcataagggtcgaggcactgttagaacaattacgaaacaagtacccaatgagtcctttttcaacttcttcaatccattgaaagcatccggggatggagaatcactggatgaagattctgaattcacattagcctctgattttgaaattggacactttttccgtgagcggatagtcccgcgggctgtgctgtacttcactggggaggccatagaagatgatgacaattttgaagaaggtgaagaaggagaagaggaggaattagaaggtgacgaggagggagaagacgaggatgatgcggaaattaaccccaaggtgtaatttttgtctgttaatcattcatacgtttctagaaggaacccagccagccggcggaatgcaagcagcagtaggaagcggaggcgggtgcctggcagaccggctgtcgggactccaggcctgtgggcggggcctcggtccttgccgcagcacaatcccgtggacagagcttactccatctaactcgttttcaagtgcatgattttcactttcacttttcctttttccttattattttgcttaacttgtacagtggcaactgaaatgcatttcagaaataggaggtttcgtccagcaccctctgcagccttggtgcctgtagctctggacttccctgggcctttccctgtgggagggccctgtagaccacatcagggtggggtgggggtcacttggcaaaaagggccgaggtctggtgatgtggttcccaggatctggaacctctcccacccctcctgcagttggactgaattcttccctttcatccggaagaaacccacttgctgtttccagccgctgaatctgctgagtgtgcagcctgcatcacctgctgtatgccgatcatctcagaaagggctgtgtagagtagggccctgttctccttaggatgttgcttcttgattttttttttttttttaggggtgggtcagggttgtgacacaccagcccaggtgagagctgctgcgggtcacctcatatttatttatcccttcttgcctgtgaggactgcggcttttcgctgtggctcgtccttaacgtttctgaaccaccttggtgccctgagcaggaagatgtgccacttcctagcaggcgcaaggcctgtgcggaagaaacgccgctccctgccaccagggctgaagatgcgagcccgtcctcatgacgcaggcgccaccctgctgccggagccgggcttcggcagtcttctccactgagggactgggctgggaagtcctgcgtttcagtggagcgtatgagcgtcaagtcctgctttctcagtagccccattgcggggccccaccattcatcctgtctgaaggtcctgggtttggtgtgaccgcttggcggctggtgggtggggttttcaagtgggtgacggcgctctccggcagccggggatggccgtgtccgcactgaccaggcctgtggagagtgctcggcctaaccttagaacacatttgtaactgaatacagtgttttcaatttgtacagaatagttagaatattctattaaagtggtgaaacattgagtcaaaaaaaaaaaaaaaaaaaaaactcgagggggggcccggtacccaattcgccctatagtgagtcgtattacaattcactggccgtcgttttacaacgtcgtgactgggaaaaccctggcgttacccaacttaatcgccttgcagcacatccccctttcgccagc

SEQ ID NO: 13236 - DNA, 1452 bp, Homo sapiens
acgcgtgtcgacaagggactgtcggtcttgggaccgcagctggggttgggggagatgaaatggaggccgccctaaagcggccgggtcccggggtttggggtaggccggagcactttcgtcccgggcctccggagtgagggggggcggggagcgtcgcagcaactgagaccaggaaaagtctgccccggctggtgccgcaccgcacacgtgtccggtcgacccacgcgagcagagcaaacggagcgaacaagaccaagccgtgggccctttcttgcttggcacacccggagcggagccgatctctgctttcacgtgatgtagggcaagcctagtgtaggccccaggcctccgactgccgagagagtatgctcaggcttcagaagaggctcgcctctagtgtcctccgctgtggcaagaagaaggtctggttagaccccaatgagaccaatgaaatcgccaatgccaactcccgtcagcagatccggaagctcatcaaagatgggctgatcatccgcaagcctgtgacggtccattcccgggctcgatgccggaaaaacaccttgggcccgccggaaggggcaggcacatgggcataggtaagcggaagggtacagccaatgcccgaatgccagagaaggtcacatggatgaggagaatgaggattttgcgccggctgctcagaagataccgtgaatctaagaagatcgatcgccacatgtatcacagcctgtacctgaaaggtgaagggggaatgtgtttcaaaaaacaagcggattctcatgggaacacatccacaaggctgaaggcagataaggccccgccaagaaagcctccgtggctgaccagcgcctgatggcccggcagggtctaaagaccaaaggaagccacgcaaggcgcccgtgaagagcgcctccaggcccaagaagggaggagatcatcaaagacttttatcccaagggaggaagagaccaagaaataaaacctccccactttggtctgtacatactgggcctcggtgattacattagatcagcattaaaataaaaaagcctttaaaaaacaagacaaaaaagatcacaggggatacaaagacaggtcgcgaacaacagggttcggactgggccttggacaaaagtgagtactagaccaaattatttgggcagatgtggatactctgccgacacccataagggggcgcataaattccacaacacggtgcactgtatgtactctgcacactataaccttattcctactatatcttaaccttaactattatagtctcctactcacatcaccaacagacacaaaacacacaaccacaccacaacacagaaaaacatcaaacaaaaaaaagagctagtaccaaacacaaacacacacgcaataccactatacgacaactaacatcaacccaatacaacactacaacaaggaaacaaactcaagatc

SEQ ID NO: 13237 - DNA, 1115 bp, Homo sapiens
  misc_feature 1, 2, 3, 1115: n = A,T,C or G
nnngaccattgctgaatcgatgccagatatgggtgtccatgaatctggtcattctaattctaccataaccacatcttccaccagagttaccaagcatagcactgtacagcattcttactcctaaacagcagtcagccacaaactgacccagagtttaattagcagtgactaatttcatgtttccaatgtacctgatttttcatgagccttacagacacacagagacacatacacattgatcttaaaatttttctcagtcactgatatgcaaaggaccacactgtctctgcttccaggagtattttagaaatgttccacaatttactgaagacatagagatgatgctgctgcttaggtgccttttagcaagctatgcaaacaatcctgataaaacaagatacatagagagtcaatctggcttctgagaatttaccaagtgaacagagtacctagttcatcagccgtccagtaaagcaacccaggaaactgactgggtctctttgcctaccgtattaacattaaacattgatgttctgtattctgtactttactgcacccagcagactttcaacaactcattgatccaaagatacatgcacagtctgagcaccagctatggtgctcataacttctttaagacttgaaccctttcaatctgtgtgattcattaaattggaccattgatgataagaatacacattgtatgtttctgtgcacatgacagtgtgtgtgtgtgcacgtacatactgtatagtcttaaaaatagcattatactggccaggggtggtggctaacgcctgtaatcccagcactttgggaggccgaggcgggtggatcaactgtggtcaggagttgagatcagccaggccaactggtgaaacccgtctctctaaaaatcaaaatagctggcaagggagcgcggggcctgtaatccatactggagcttagcagaaatacctgacccgagcgcgggtttagaaccgtaaatgcctggccccgttggacggttgttccccaaaaaaaggggggcaacatctagcataaaacctttaaagccaaggataaacgcgcggcaacgaaacggtttcgaaccgctgacccaacattgtcccgan

SEQ ID NO: 13238 - DNA, 219 bp, Homo sapiens
ccgggcaggtacgcggggggaactgctcagttaggacccagacggaaccatggaagccccagcgcagcttctcttcctcctgctactctggctcccagacaccactggagaaatggtgatgacgcagtctccagccaccctgtctgtttctccaggggaaaaagccaccctctcctgcggagccagtcacgatattactacccacttagcctggtacct

SEQ ID NO: 13239 - DNA, 301 bp, Homo sapiens
acgcgggggggcacacagtggccacctcccctatgggtgttcattctgactctgatgggtagagatgggtgctagagtggaggatggggtataggctgagtatgagagatctgaaactggacaatgtcctgttggaccacgagggtcactgtaaactggcagacttcggaatgtgcaaggaggggatttgcaatggtgtcaccacggccacattctgtggcacgccagactatatcgctccagagatcctccaggaaatgctgtacctcggccgccaccgcggggagctccaattcgccct

SEQ ID NO: 13240 - DNA, 1253 bp, Homo sapiens
acgcgggggctgagctcttggaagacttgggtccttgggtcgcaggtgggagccgacggggtctcactccattgcccaggccagagtgcggggatatttgataagaaacttcagtgaaggccgggcgcggtggctcatgcccgtaatcccagcattttcggaggccgaggctggagtgcaatggtgtgatctcagctcactgcaacctctgcttcctgggtttaagtgattctcctgcctcagcctcccgagtagctgggattacaggcatcatggaccgatctaaagaaaactgcatttcaggacctgttaaggctacagctccagttggaggtccaaaacgtgttctcgtgactcagcaatttccttgtcagaatccattacctgtaaatagtggccaggctcagcgggtcttgtgtccttcaaattcttcccagcgcgttcctttgcaagcacaaaagcttgtctccagtcacaagccggttcagaatcagaagcagaagcaattgcaggcaaccagtgtacctcatcctgtctccaggccactgaataacacccaaaagagcaagcagcccctgccatcggcacctgaaaataatcctgaggaggaactggcatcaaaacagaaaaatgaagaatcaaaaaagaggcagtgggctttggaagactttgaaattggtcaccctcttggtaaaggaaagtttggtaatgtttatttggcaagagaaaagcaaagcaagtttattctggctcttaaagtgttatttaaagctcagctggagaaagccggagtggagcatcagctcagaagagaagtagaaatacagtcccaccttcggcatcctaatattcttagactgtatggttatttccatgatgctaccagagtctacctaattctggaatatgcaccacttggaacagtttatagagaacttcagaaactttcaaagtttgatgagcagagaactgctacttatataacagaattggcaaatgccctgtcttactgtcattcgaagagagttattcatagagacattaagccagagaacttacttcttggatcagctggagagcttaaaattgcagattttgggtggtcagtacacttttttttttttttaaggatacgggacaattttaagatgtaataccaatactttagaagtttggtcgtgtcgtttgtatgaaaatctgaggctttggtttaaatctttccttgtattgtgatttccatttagatgtattgt

SEQ ID NO: 13241 - DNA, 1782 bp, Homo sapiens
  misc_feature 1750: n = A,T,C or G
acccacgcgtccgcggacgcgtgggtttttctccaaggagtgcttgtggagatcggatcttttctccagcaattgggggaaagaaggctttttctctgaattcgcttagtgtaaccagcggcgtatattttttaggcgccttttcgaaaacctagtagttaatattcatttgtttaaatcttattttatttttaagctcaaactgcttaagaataccttaattccttaaagtgaaataattttttgcaaaggggtttcctcgatttggagctttttttttcttccaccgtcatttctaactcttaaaaccaactcagttccatcatggtgatgttcaagaagatcaagtcttttgaggtggtctttaacgaccctgaaaaggtgtacggcagtggcgagaaggtggctggccgggtgatagtggaggtgtgtgaagttactcgtgtcaaagccgttaggatcctggcttgcggagtggctaaagtgctttggatgcagggatcccagcagtgcaaacagactttggagtacctgcgctatgaagacacgcttcttctggaagaccagccaacaggtgagaatgagatggtgatcatgagacctggaaacaaatatgagtacaagttcggctttgagcttcctcaggggcctctgggaacatccttcaaaggaaaatatgggtgtgtagactactgggtgaaggcttttcttgaccgcccgagccagccaactcaagagacaaagaaaaactttgaagtagtggatctggtggatgtcaatacccctgatttaatggcacctgtgtctgctaaaaaagaaaagaaagtttcctgcatgttcattcctgatgggcgggtgtctgtctctgctcgaattgacagaaaaggattctgtgaaggtgatgagatttccatccatgctgactttgagaatacatgttcccgaattgtggtccccaaagctgccattgtggcccgccacacttaccttgccaatggccagaccaaggtgctgactcagaagttgtcatcagtcagaggcaatcatattatctcagggacatgcgcatcatggcgtggcaagagccttcgggttcagaagatcaggccttctatcctgggctgcaacatccttcgagttgaatattccttactgatctatgttagcgttcctggatccaagaaggtcatccttgacctgcccctggtaattggcagcagatcaggtctaagcagcagaacatccagcatggccagccgaaccagctctgagatgagttgggtagatctgaacatcctgatacccagaagctcctccctgctatatggatgtcattcctgaagatcaccgatgtggagagcccaaccactcctctgctagatgacattggatggctctcaagacagccctatctttatgtatgcccctgagttcaagttcatgccaccaccgacttatactgaggtggatccctgcatcctcaacaacaatgtgcagtgagcatgtgggaagaaaagaagcagctttacctacttgtttctttttgtctctcttcctgggacactcactttttcagagactcaacagtctctgcaatgggagtgtggggtccaccttaggcctctgacttcctaatgtagggaggtgggtcagcagggcaatctcctgggggccttaaagggatgcgggactcatccttcaggccaggcgcccattgtttgttgattacagggggtgttttgtttggganggggttttaaaaattaaactaggaaaaactca

SEQ ID NO: 13242 - DNA, 633 bp, Homo sapiens
gtcgacccacgcgtccgcggacgcgtgggcgggtttgccgccagaacacaggtgtcgtgaaaactacccctaaaagccaaaatgggaaaggaaaagactcatatcaacattgtcgtcattggacacgtagattcgggcaagtccaccactactggccatctgatctataaatgcggtggcatcgacaaaagaaccattgaaaaatttgagaaggaggctgctgagatgggaaagggctccttcaagtatgcctgggtcttggataaactgaaagctgagcgtgaacgtggtatcaccattgatatctccttgtggaaatttgagaccagcaagtactatgtgactatcattgatgccccaggacacagagactttatcaaaaacatgattacagggacatctcaggctgactgtgctgtcctgattgttgctgctggtgttggtgaatttgaagctggtatctccaagaatgggcagacccgagagcatgcccttctggcttacacactgggtgtgaaacaactaattgtcggtgttaacaaaatggatttcactgagccaccctacagccagaagagatatgaggaaattgttaaggaagtcagcccttacattaagaaaaatggcttacaa

SEQ ID NO: 13243 - DNA, 1251 bp, Homo sapiens
  misc_feature 1, 2, 3, 4, 5, 1251: n = A,T,C or G
nnnnnactctatgaggatcccctgccatttactccatggccccatctgggatgtgaggagcgcctctgcccggccgccccgtctgcaagccgcgcagcctctctgccctaacatccccctcggagccctctccctactgctgctacacaagaccctgagactgacctgcaggacgaaaccatgaagagcctgatccttcttgccatcctggccgccttagcggtagtaactttgtgttatgaatcacatgaaagcatggaatcttatgaacttaatcccttcattaacaggagaaatgcaaataccttcatatcccctcagcagagatggagagctaaagtccaagagaggatccgagaacgctctaagcctgtccacgagctcaatagggaagcctgtgatgactacagactttgcgaacgctacgccatggtttatggatacaatgctgcctataatcgctacttcaggaagcgccgagggaccaaatgagactgagggaagaaaaaaaatctctttttttctggaggctggcacctgattttgtatccccctgtagcagcattactgaaatacataggcttatatacaatgcttctttcctgtatattctcttgtctggctgcacccctttttcccgcccccagattgataagtaatgaaagtgcactgcagtgagggtcaaaggagagtcaacatatgtgattgttccataataaacttctggtgtgatactttatctgtgagagtcccatactagaaagcactgggatataatcatggccgcaacatccaccagacaaggtcaggcacttctcaggcccactttagcaacttgggaacactacttaagaggaggaaacggcacccgactaagtaacccctcaggaccggaggggggttgcggaccagggccgggacgccccccacggacccccacccacacgggaccccccccccccccctcccacaaaacaaaacctccgagggccaacaagacgtagaaaaacccacaaaacgctccccagcgaaaacaggagaaaaaagaaaagacaaagaaagttggaaacacgaccccagggggagaaaacgcgcagccacgaacaacagcacagaaaaggccaaacagagcacaagaagaccagcacaaaatgaacgatcacagacagcacaacaaaaacaagcggaaggcagaagcagaagcccagccaacaacaggacacacagcaatcacaacaaatcgagtagaan

SEQ ID NO: 13244 - DNA, 939 bp, Homo sapiens
  misc_feature 938, 939: n = A,T,C or G
cgaatggagctccaccgcgtgcggccgaggtacgcgggggcggcgcacttccgtagaggtggacatggcgtgcggtttcgccgcgctatgcttgccagctttccagagtgttgaatcttccaccagaaaacttgatcacatcaatatctgcagttccaatttcccaaaaagaagaagtagctgattttcagctttctgtggattctttactggaaaaagacaatgaccattcaagaccagatattcaagttcaagccaagagactagcagagaagctaagatgtgatacagtggtgagtgaaatcagtactggtcaaaggactgtaaatttcaaaataaacagagagctcttaacaaagacagtgctacaacaagtaattgaagatggctcaaaatatggattcaaaaagtgaacttttctctggacttccccagaagaagatgtgtggttgaattcagttcacctaatgttgccaaaaaatttcatgttggacatttgcgttctaccatcataggtaagtgtttagtttcacataaaatgctaaacgttcctttgaggaagtattttgatagttcaatttaatgtttgaatgcttaaataacaaattagcaaaaaacaaacaagtttagatttatttgagcctcctgcattcaggaatgtgacattggttccactgttttgtgggaacccaaactgatttcaaaaccaaagatcactgcgaactatttactgctattattgtatgattcaactgctagaatagttattgggggaactgagatgcacgtaacatgttgtgggtgtacatccatttgggcatttggggttgcatagggggggggggccgcacacgggcagccgttggacaaaaaaaaaattgggccaatacatggggagaagacggaagtaccagcgcatgttacaccccagaaatcann

SEQ ID NO: 13245 - DNA, 791 bp, Homo sapiens
  misc_feature 1, 2, 3, 4, 5, 6, 589, 787, 788, 789, 790, 791: n = A,T,C or G
nnnnnnggctgcaggaattcggcacgaggacctcaccgctgcgcggcggcggcgcggcgatggagcgaaaagtgaggaaactgaagtcccgggagagacagtggcaaggtcaagtagcaaagtgcactcagccctcccagcaaggagtctgccactcgcgcttgaaggacgtgtttgaagagctgctttcccagtgggatgctgccttaaagtcttgattccctggcactctttcctattactacattttatcggtgctgtttgtgttatgcaacggtagcatcgtgtctccggaagataaaaaaggtctcgatacaaacatccataaccttccacccactccgtcaggaacaacccaatcaaaataaagtcatgagaatttaaaaaaaaaaaaaaaaatctcgagggggggcccggtacccaattcgccctatagtgagtcgtattacaattcactggccgtcgttttacaacgtcgtgactgggaaaaccctggcgttacccaacttaatcgccttgcagcacatccccctttcgccagctggcgtaatagcgaagaggcccgcaccgatcgcccttcccaacagtngcgcagcctgaatggcgaatggcaaatgtaagcgtaatattttgttaaaatcgcgttaaatttttgtaaatcagctcattttttacccataggccgaaaatcgcaaaatcccttataatcaaaagaattaccgagatagggtgagtgttgtccagtttgaacagagccactattaaagacgtggcttcaacgttaaannnnn

SEQ ID NO: 13246 - DNA, 958 bp, Homo sapiens
  misc_feature 1, 2, 3, 4, 5: n = A,T,C or G
nnnnncactgaagtttcttctaacatgattagggctggagagagagagatgttttatttttgccaaagcatgtgagagtaagtagcaaacatcatgacacttcacccctcaaatattttcccacgtatcacttaagaacaagggcattcattctgttacatgaccacaatacaatcagcacagatagatattaacattgagacaatgctctgatgtattggtatctactatgcagttcataatcaaataagggttttggtaacttgggatccataaatggtctgcaaggtcagcccctgtagacctgcacttagtgggtgccatttccctgtctcaggtgcctgctctactggtgatatttttcactggctctgttgctcacttagaattttttctcccagctgttgacattttattttctgcatagttctgaagctgcagcagttgttcttatgccttcttgattgtaaatttcatagaagctgtcaatttctaagggatttcatctcctttgatgcagccaggtcaatagctacaaacctatctgagaatgtctgccatcggcctcctctctgtctagaaaggtgtcttagtctctcagcactttgggaggttgaggtgggcggatcacaaggtgagaagatcaagaacatcttggccaacatggtgaaaccccgtctctactaaaaatacaaaaattagccaggagtggtggcgtgcgcctgcagtccagctactctggaggctgaggcaggggaatcgcttgaacccgggaggcggaggttgcagtgagccgagattgtgccacttcactccagtctgggtgacaagagcagaaccccatagttctggaggctgagaagtccaagatcaaagtgtctggtgagcacagcacagcttcctggttcagagtcagccccttcttgctgtgtcctcacatggtggaaggaccccgcgt

SEQ ID NO: 13247 - DNA, 971 bp, Homo sapiens
  misc_feature 1, 2, 3, 850, 971: n = A,T,C or G
nnnatcggggagctatgagaaacaacctgggagaggagcaaaaggctagagcaggaaagagaagagaggatgagactaacggtggttggataaataattgtgacccaagtccaaggccgggagatctagagcccagcccaccaaagaacttgctccctattaaaacccgaatggggcccccccccgtcacctcgacgtatgaggtcccttcctcccaggatgggttttttttttttttttttgatgcccaagtctgatgagacacacatctcataaattctcagacactctcagcttttcctcccgtagcacttattacacaacccagcctgtcagtaagtctgtgtctccctctagactcaaaggctctgtgcaggcggagactgagtcattaaacgttgtctctccccagccacttgcctagcacctgatgctcagtaagtacctaaccagaatagatgaggcagcaagagaatggcgctcggtgtgtggggtaaggggagtcaggaggaggacgggctgctcgtgagacagggtaggatgggctgtgcctggtttcctctcaagcccccaggctgctacccttggttctagccacctttcctcccaccctccttctcatgcaggctgccaaaaattgcactttgggtctgagattaggagcgcctggccatgtctgaaccccgctcctatcttagtggccgcaggtggctcccaggaaagcatgaatcctgaggttttactggtaagctgggagggattaactgggatccagtcatgtgctccacccagtactcagtgactaaaccctgcactttggagggagatggtaatgtttcagcatgagtanctctggccttgggcatgagcaaaggactttgagtatgaggacgagaccctcttcacttattccagctgctaacagttaacacacagccatccagtaacacaaggatgcccacagctgagan

SEQ ID NO: 13248 - DNA, 2679 bp, Homo sapiens
  misc_feature 1, 2, 3, 4, 5: n = A,T,C or G
nnnnnatcctcttagttgctcagactgaaaagctagcagccatcctggatttctctcacactgcctattcaacgtgtgaatgcatgagtggaaagctgagttcgcactcgtgactggccggggtcgactctgacattcactcccactttggcgcgctgatttgcctctgagcggatgaaggttgagccatggcgggcggggccggggaggcgggcttggagcgagggggcggggcaggcgccacaaaaacgcgctcgcacagcctaggctaggtacgaggctgggtgccccgcgctcccgggtggcaagatggtggcgcgcaggaggaagtgcgccgcgcgggacccggaggaccgtatccccagcccactgggctacgcagctattccaatcaagttctctgaaaagcaacaggcttctcactacctctatgtgagagcacacggcgttcgacaaggcaccaagtccacctggcctcagaagaggactctttttgtcctcaatgtgcccccatactgcacagaggagagcctgtcccgcctcctgtccacctgtggcctcgtccagtctgtagagttgcaggagaagccggacctggctgagagcccaaaggagtcaaggtcgaagttttttcatcccaagccagttccgggtttccaggtagcctatgtggtgttccagaagccaagtggggtgtcagcggccttggccctgaagggccccctgctggtgtccacagagagccaccctgtgaagagtggcattcacaagtggatcagtgactacgcagactctgtgcccgaccctgaggccctgagggtggaagtggacacgttcatggaggcatatgaccagaagatcgctgaggaagaagctaaggccaaggaggaggagggggtccctgacgaggagggctgggtgaaggtgacccgccggggccggcggcctgtgctcccccggactgaggcagccagcttgcgggtgctggagagggagagacggaagcgcagccgaaaagagctgctcaacttctacgcctggcagcatcgagagagcaagatggagcatctagcgcagctgcgcaagaagttcgaggaggacaagcagaggatcgagctgctgcgggcccagcgcaaattccgaccgtactgagctgtgagagccgcagtgaatggctggaggtgcagggccaggaggaggcgaggcagggcctgcagcggtctctgagaggccgagctctggccaacgggccccaggttgaaggccaccgcgtccaacagccccatcagagtccacacaggccaggagggaaggaccaggccacccctcgggtcttgtgcttcagcagtcctggggacccaggcgtgccgagaggaggacttgtccttcctgcttcttgcctccacaccctcctctccaggaccctggatgaatccgttctgtgcttccttttccctcaatgcaaaagcccttgctggcaacgaaaaagcctcaaaagcagtgagaatacaagaaccttttattttccatccagttgggcagcagggaaaggctaggtgggcccagcctgcccttccttcctccagctggctggatatttattattagccaggagaaagcagccctggaacccagactctgtctcccccttgaggtcacagatgttgaagttggaatctcgctccttcccctgactaccatcctaggctgggcctcaagactagtgaggcctgtccccaccatccctggccttgttgtggggctcaggaactcagagtcccagtgttgagtctgggagcactaggtcttcatagttccaggcccagagctacagctgggctgggagcatgtgtgtgcactgtaagaaggagctgatgatactggccacgtgctggggttcgctcatgtggacacagtgattgcctgggacttccacaaactggaactgctctttgagggtggatttcatcgtgtctatcatgaacgacagggactccttctcagagtaattctgtcttgaatcaaaatatccgtggactgctttgatcaacaggacatgggcctgcagcttcctgatggaatgcgcacacagctccctgctgatgaagtcaatgctgttctctgcccaggcgagcctctggtctctgttcagaaccagacctgtggccaccttcgtggttcctctttgcaggagaagctccccgcactcctcactcaagtggctattgctcttcagtaacctctgcagcagctgcttcaggctgaacacgtgcgagggctcctgggaggcctctacctgcagcacgtgctctatggctctccgcttgtaggtcagcaagttctccatttcatctgattccaggagaaagagcggcgtgtccagcaagataagtttatccaccatctcggggaaggtacagaaaaacattccgcccacccctagacggccccacccctaggccgccccgccccacccctaggccgccccgccccaccccaggcaagccccgcaactccagcagtccccgcaactccagccgtcgccgcccccattcagaaggccccgccctcccaccgccctgccagagccccggcgggccctgtgcccagggccgctggctccaccccaggaaggccccggctccacccccggaaggccggacgcgtgggtcgactccc

SEQ ID NO: 13249 - DNA, 577 bp, Homo sapiens
ggaaatgaaccattggaaggtttctagtggttacatgaggtacagaagagtagcaaatgtggccacagttacaagtgccagcctggagccagccctagattttagtcctgactgtatcaactactggctatgcgatcccaggcaagccacttaccttcttgccttctccataataaaatggaaacagcatagcaccaacctcccaggttggtaagttagctgatttacccagcaacacggggaagccctcaggctttgatggtgcccagacctggattcaaattccttttctttcacaaataagcaaagtacctgcccgggcggccgaggtacgcgggtggagctggtgggccggaagtcctggggaggatttacacacagaccggagctggcttccgcaggcctgggcagagcatctgcacctgccggaaaggaacgtatctgttttgtttgcttttgcccaggcggggcctctgggctgtttgctgtggagcaagactaattcctgagcccttggggacgacagctccaggagtaggaagaagggtgggcttccaagttacaataaatgtgaacc

SEQ ID NO: 13250 - DNA, 2023 bp, Homo sapiens
  misc_feature 1, 2, 3, 4, 5, 6, 7, 8, 9, 10, 11, 12, 13, 2015, 2016, 2017,2018, 2019, 2020, 2021, 2022, 2023: n = A,T,C or G
nnnnnnnnnnnnnccgctccgggagcaagtgaaaaaggtcaaaaggtccttgcggcaggcccgtaaaaagggccgccacctggagctggcgaaccagaaactcagtgagaagctggcggcgggcgcgctgccgcacatcaacgcccgggggcccgtgcgccccccctacctgcgggggtaacgggcctgggggctgccaggtgtgcagggccaatcctggcggtaattgagaatgagtgaggtttcgtacatgcagctatttcaagggttgtaagagtttttgtttttaatcacgcatttggtagagtctaaatggataaaatgcaaggcttgctttccccttgggtgctggcctcaatgtcagaccccacgcgctgccccttcctggcctgaccccagacgcagtgcctggcagtccagaggcagtgggatccctgagtgctgaatgctcgcctgcagagcagcccagaaagagccctgactggggagagaacattttagaatctctagtgtaaaagacatcaacgtgcttagcctttatttcagaaaaaaatcagggtggttcccagctccccagtccaggacaaccattagtcctgatgagtgagctgacgctggtgctggaacctgctggcacctcactggccacatctttggaaggggatggtggccttgcatccaagatgcctgaaaatcagcacgtgcagggcctccctatccagccagcattttccttccagctgaggcaggtgaagacttcataagctcatcacaggggagggaattaggagcagggcagcaggtaattaaacaagataaattatacctgatttccaacaccagctacaaagagttgaagatgatacctatgggtcgcgttaacacagggggcaactgccttgatcggcctgccatgggtcatcagactgcttcctaaattgagagaaactgagcaatctctcagccactgctatagtctaacttcttgtttgctgagtaattgtttctaatgtctctgaactcaaagtgaggtgctccaagacgctgtgaacttctgcaaagacacctccttacctactgggatcacgtgacctgacctcactcccagccaggctcccaaagggctcattccagccattccaatctcttcttctttatgcaaacacttttcccccacaacaagccttgtttgttccgataggaatacgtgtacgtcagtgcacttgtccttacgtcagttccttacaccaccaaagcacttcacctttctggaaataaaacttttaagacactactataagtaaaaatgagagtattcactagacttattgctcaggcacatttgagtgggtcccagctgtgtgattaagaagtcaactgggtggccttttctgggttatcttctgatcatggcctttcaacccaacaagggcccttccctgctcttccaccagtaaaggctcctggcctctcatcaggatctgccccccagagacccccccagacactgcagggcctggtgatgctgtcctctgtaccggaaatggcaggcactgtcagatttccactcttctgcctttaggaaggctgggtgcttcttgctctgacagccagtctggggagatgactcttacgttgcttgagtcttggtggcaggctgctgtccacgggggagaagtctctgctctggactggacagaagagagacttttaccctggggcactcacacggccaagcttctgccaccacttcattagctgtattctccatagtatggtgaaatagcaggtgcgtcttctagtttattcctcctggggacatttcctcaaagcagttttgcgcccccgcaagggaatggtcagcctaagggtaatgtacagcccgtgcttggagaaccatggaagctacacccctacaggtgcatactgttctgcttttccaataaatacgagcggcgatttcaaccacaaaaaaaaaaaaaaaaaaaaaaaaaaaaaaaaaaaaaaaaaggtannnnnnnnn

SEQ ID NO: 13251 - DNA, 371 bp, Homo sapiens
aggtacgcgggtgttcctttttgttcaaagtctatttttattccttgatatttttctttttttttttttttgtggatggggacttgtgaatttttctaaaggtgttatttagcatgggaggagagcgtgtgcggctccagcccagcccgctgctcactttccaccctctctccacctgcctctggcttctcaggcctctgctctccgacctctctcctctgaaaccctcctccacagctgcagcccatcctcccggctccctcctagtctgtcctgcatcctctgtccccgggtttcagagacaacttcccaaagcacaaagcagtttttccccctaggggtgggaggaagcaaaagactctgtacctgcc

SEQ ID NO: 13252 - DNA, 6753 bp, Homo sapiens
cgggtcgagccccccccccccccctgagacgggagtttctcctcggggtcggagcaggaggcacgcggagtgtgaggccacgcatgagcggacgctaaccccctccccagccacaaagagtctacatgtctagggtctagacatgttcagctttgtggacctccggctcctgctcctcttagcggccaccgccctcctgacgcacggccaagaggaaggccaagtcgagggccaagacgaagacatcccaccaatcacctgcgtacagaacggcctcaggtaccatgaccgagacgtgtggaaacccgagccctgccggatctgcgtctgcgacaacggcaaggtgttgtgcgatgacgtgatctgtgacgagaccaagaactgccccggcgccgaagtccccgagggcgagtgctgtcccgtctgccccgacggctcagagtcacccaccgaccaagaaaccaccggcgtcgagggacccaagggagacactggcccccgaggcccaaggggacccgcaggcccccctggccgagatggcatccctggacagcctggacttcccggaccccccggaccccccggacctcccggaccccctggcctcggaggaaactttgctccccagctgtcttatggctatgatgagaaatcaaccggaggaatttccgtgcctggccccatgggtccctctggtcctcgtggtctccctggcccccctggtgcacctggtccccaaggcttccaaggtccccctggtgagcctggcgagcctggagcttcaggtcccatgggtccccgaggtcccccaggtccccctggaaagaatggagatgatggggaagctggaaaacctggtcgtcctggtgagcgtgggcctcctgggcctcagggtgctcgaggattgcccggaacagctggcctccctggaatgaagggacacagaggtttcagtggtttggatggtgccaagggagatgctggtcctgctggtcctaagggtgagcctggcagccctggtgaaaatggagctcctggtcagatgggcccccgtggcctgcctggtgagagaggtcgccctggagcccctggccctgctggtgctcgtggaaatgatggtgctactggtgctgccgggccccctggtcccaccggccccgctggtcctcctggcttccctggtgctgttggtgctaagggtgaagctggtccccaagggccccgaggctctgaaggtccccagggtgtgcgtggtgagcctggcccccctggccctgctggtgctgctggccctgctggaaaccctggtgctgatggacagcctggtgctaaaggtgccattggtcctcctggtattgctggtgcccctggcttccctggtgcccgaggcccctctggaccccagggccccagcggccctcctggtcccaagggtaacagcggtgaacctggtgctcctggcagcaaaggagacactggtgctaagggagagcctggccctgttggtgttcaaggaccccctggccctgctggagaggaaggaaagcgaggagctcgaggtgaacccggaccccctggccctgcccggaccccctggcgagcgtggtggacctggtagccgtggtttccctggcgcagatggtgttgctggtcccaagggtccccctggtgaacgtggttctcctggccctgctggccccaaaggatctcctggtgaagctggtcgtcccggtgaagctggtctgcctggtgccaagggtctgactggaagccctggcagccctggtcctgatggcaaaactggcccccctggtcccgccggtcaagatggtcgccccggacccccaggcccacctggtgcccgtggtcctgctggtgctcctgggattcccgggcctcaaggtattgctggagagcccggcaaggctggacagcgtggtgttcctggaccccctggcgctgtcggtcctgctggcaaagatggagaggctggagctcagggaccccctggccctgctggcccctctggcgagagaggtgaacaaggccctgctggctcccccggattccagggtccccctggtcctgctggtcctccaggtgaagcaggcaaacctggtgaacagggtgttcctggagaccttggcccccctggaccccctggagcaagaggcgagagaggtttccctggcgagcgtggtgtgcaaggtccccctggtgctcctggaccccgaggggccaacggtgctcccggcaacgatggtgctaagggtgatgctggtgcccctggagctcccggtagccagggcgcccctggccttcagggaatgcctggggaacgtggtgcagctggtcttccagggcctaagggtgacagaggtgatgctggtcccaaaggtgctgatggctctcctggcaaagatggcgtccgtggtctgaccggccccattggtcctcctggccctgctggtgcccctggtgacaagggtgaaagtggtcccagcggccctgctggtcccactggagctcgtggtgcccccggagaccgtggtgagcctggtccccccggccctgctggctttgctggcccccctggtgctgacggccaacctggtgctaaaggcgaacctggtgatgctggtgctaaaggcgatgctggtccccctggccctgccggacccgctggaccccctggccccattggtaatgttggtgctcctggagccaaaggtgctcgcggcagcgctggtccccctggtgctactggtttccctggtgctgctggccgagtcggtcctcctggcccctctggaaatgctggaccccctggccctcctggtcctgctggcaaagaaggcggcaaaggtccccgtggtgagactggccctgctggacgtcctggtgaagttggtccccctggtccccctggccctgctggcgagaaaggatcccctggtgctgatggtcctgctggtgctcctggtactcccgggcctcaaggtattgctggacagcgtggtgtggtcggcctgcctggtcagagaggagagagaggcttccctggtcttcctggcccctctggtgaacctggcaaacaaggtccctctggagcaagtggtgaacgtggtccccctggtcccatgggcccccctggattggctggaccccctggtgaatctggacgtgagggggctcctggtgccgaaggttcccctggacgagacggttctcctggcgccaagggtgaccgtggtgagaccggccccgctggaccccctggtgctcctggtgctcctggtgcccctggccccgttggccctgctggcaagagtggtgatcgtggtgagactggtcctgctggtcccgccggtcctgtcggccctgttggcgcccgtggccccgccggaccccaaggcccccgtggtgacaagggtgagacaggcgaacagggcgacagaggcataaagggtcaccgtggcttctctggcctccagggtccccctggccctcctggctctcctggtgaacaaggtccctctggagcctctggtcctgctggtccccgaggtccccctggctctgctggtgctcctggcaaagatggactcaacggtctccctggccccattgggccccctggtcctcgcggtcgcactggtgatgctggtcctgttggtccccccggccctcctggacctcctggtccccctggtcctcccagcgctggtttcgacttcagcttcctgccccagccacctcaagagaaggctcacgatggtggccgctactaccgggctgatgatgccaatgtggttcgtgaccgtgacctcgaggtggacaccaccctcaagagcctgagccagcagatcgagaacatccggagcccagagggcagccgcaagaaccccgcccgcacctgccgtgacctcaagatgtgccactctgactggaagagtggagagtactggattgaccccaaccaaggctgcaacctggatgccatcaaagtcttctgcaacatggagactggtgagacctgcgtgtaccccactcagcccagtgtggcccagaagaactggtacatcagcaagaaccccaaggacaagaggcatgtctggttcggcgagagcatgaccgatggattccagttcgagtatggcggccagggctccgaccctgccgatgtggccatccagctgaccttcctgcgcctgatgtccaccgaggcctcccagaacatcacctaccactgcaagaacagcgtggcctacatggaccagcagactggcaacctcaagaaggccctgctcctccagggctccaacgagatcgagatccgcgccgagggcaacagccgcttcacctacagcgtcactgtcgatggctgcacgagtcacaccggagcctggggcaagacagtgattgaatacaaaaccaccaagacctcccgcctgcccatcatcgatgtggcccccttggacgttggtgccccagaccaggaattcggcttcgacgttggccctgtctgcttcctgtaaactccctccatcccaacctggctccctcccacccaaccaactttccccccaacccggaaacagacaagcaacccaaactgaacccccccaaaagccaaaaaatgggagacaatttcacatggactttggaaaatatttttttcctttgcattcatctctcaaacttagtttttatctttgaccaaccgaacatgaccaaaaaccaaaagtgcattcaaccttaccaaaaaaaaaaaaaaaaaaaaaggaataaataaataactttttaaaaaaggaagcttggtccacttgcttgaagacccatgcgggggtaagtccctttctgcccgttgggcttatgaaaccccaatgctgccctttctgctcctttctccacaccccccttggggcctcccctccactccttcccaaatctgtctccccagaagacacaggaaacaatgtattgtctgcccagcaatcaaaggcaatgctcaaacacccaagtggcccccaccctcagcccgctcctgcccgcccagcacccccaggccctgggggacctggggttctcagactgccaaagaagccttgccatctggcgctcccatggctcttgcaacatctccccttcgtttttgagggggtcatgccgggggagccaccagcccctcactgggttcggaggagagtcaggaagggccacgacaaagcagaaacatcggatttggggaacgcgtgtcaatcccttgtgccgcagggctgggcgggagagactgttctgttctgttccttgtgtaactgtgttgctgaaagactacctcgttcttgtcttgatgtgtcaccggggcaactgcctgggggcggggatgggggcagggtggaagcggctccccattttataccaaaggtgctacatctatgtgatgggtggggtggggagggaatcactggtgctatagaaattgagatgcccccccaggccagcaaatgttcctttttgttcaaagtctatttttattccttgatatttttctttttttttttttttgtggatggggacttgtgaatttttctaaaggtgctatttaacatgggaggagagcgtgtgcggctccagcccagcccgctgctcactttccaccctctctccacctgcctctggcttctcaggcctctgctctccgacctctctcctctgaaaccctcctccacagctgcagcccatcctcccggctccctcctagtctgtcctgcgtcctctgtccccgggtttcagagacaacttcccaaagcacaaagcagtttttccccctaggggtgggaggaagcaaaagactctgtacctattttgtatgtgtataataatttgagatgtttttaattattttgattgctggaataaagcatgtggaaatgacccaaacataatccgcagtggcctcctaatttccttctttggagttgggggaggggtagacatggggaaggggccttggggtgatgggcttgccttccattcctgccctttccctccccactattctcttctagatccctccataaccccactcccctttctctcacccttcttataccgcaaacctttctacttcctctttcattttctattcttgcaatttccttgcaccttttccaaatcctcttctcccctgcaataccatacaggcaatccacgtgcacaacacacacacacactcttcacatctggggttgtccaaacctcatacccactccccttcaagcccatccactctccaccccctggatgccctgcacttggtggcggtgggatgctcatggatactgggagggtgaggggagtggaacccgtgaggaggacctgggggcctctccttgaactgacatgaagggtcatctggcctctgctcccttctcacccacgctgacctcctgccgaaggagcaacgcaacaggagaggggtctgctgagcctggcgagggtctgggagggaccaggaggaaggcgtgctccctgctcgctgtcctggccctgggggagtgagggagacagacacctgggagagctgtggggaaggcactcgcaccgtgctcttgggaaggaaggagacctggccctgctcaccacggactgggtgcctcgacctcctgaatccccagaacacaacccccctgggctggggtggtctggggaaccatcgtgcccccgcctcccgcctactcctttttaagc

SEQ ID NO: 13253 - DNA, 696 bp, Homo sapiens
attaattaagggggggcggccggggaaggtcagcgccgtaatggcgttcttggcgtcgggaccctacctgacccatcagcaaaaggtgttgcggctttataagcgggcgctacgccacctcgagtcgtggtgcgtccagagagacaaataccgatactttgcttgtttgatgagagcccggtttgaagaacataagaatgaaaaggatatggcgaaggccacccagctgctgaaggaggccgaggaagaattctggtaccgtcagcatccacagccatacatcttccctgactctcctgggggcacctcctatgagagatacgattgctacaaggtcccagaatggtgcttagatgactggcatccttctgagaaggcaatgtatcctgattactttgccaagagagaacagtggaagaaactgcggagggaaagctgggaacgagaggttaagcagctgcaggaggaaacgccacctggtggtcctttaactgaagctttgccccctgcccgaaaggaaggtgatttgcccccactgtggtggtatattgtgaccagaccccgggagcggcccatgtagaaagagagagacctcatctttcatgcttgcaagtgaaatatgttacagaacatgcacttgccctaataaaaaatcagtgaaatggtgaaaaaaaaaaaaattacaaaaaaaaaaaa

SEQ ID NO: 13254 - DNA, 3966 bp, Homo sapiens
  misc_feature 1, 3959, 3960, 3961, 3962, 3963, 3964, 3965, 3966: n = A,T,C or G
ncgttcggtgcgaggaggggaaagcggtgatttggcctagaggtggggcgcgcactccaggcgagcgtgcgtgggccgggacctgcagggtacgggggtgggcccaggctggccgtcccactccgctccagcgctccgccaggcctccgccgctccggggccgctcgggccgccagtcagctgacgcggggggcgggggagctgtcaggcgcgccccgccctgcgccgctgggccgcggaggccgtgcagctattggcccgcgcaccgggccgcccgggcccccgcaccccagtgacatcaggaggcgataaaaggctgcggcgccgccggatccagcacagctgcaccgccgagctgcgagcggctgcgagcgagagagcgtaagagcaagagagctagagagcgagcaacgggcactcgccccacgcctcccctcagccccaccgcgcgctccgcttgcctctccaccccgcccgactctacccggcccggtccctgcgcgggcacagcccagagctctggggcggtgcaggcagcctcgggactctccggcgcgccgccgcgtccccagacaaaggcttggccggcggccccggcccgctgcgccctcgctccccgcctccccagctcttctccgctcttcccccccgcgcttggctcggcgcgctccggccggccgcaaagtttcccgggcggcagcggcggctgcgcctcgcttcagcgatggccgcggagctgagcatggggccagagctgcccaccagcccgctggccatggagtatgtcaacgacttcgacctgctcaagttcgacgtgaagaaggagccactggggcgcgcggagcgtccgggcaggccctgcacacgcctgcagccagccggctcggtgtcctccacaccgctcagcactccgtgtagctccgtgccctcgtcgcccagcttcagcccgaccgaacagaagacacacctcgaggatctgtactggatggcgagcaactaccagcagatgaaccccgaggcgctcaacctgacgcccgaggacgcggtggaagcgctcatcggctcgcacccagtgccacagccgctgcaaagcttcgacagctttcgcggcgctcaccaccaccaccatcaccaccaccctcacccgcaccacgcgtacccgggcgccggcgtggcccacgacgagctgggcccgcacgctcacccgcaccatcaccatcatcaccaagcgtcgccgccgccgtccagcgccgctagcccggcgcaacagctgcccactagccaccccgggcccgggccgcacgcgacggcctcggcgacggcggcgggcggcaacggcagcgtggaggaccgcttctccgacgaccagctcgtgtccatgtccgtgcgcgagctgaaccgccacctgcggggcttcaccaaggacgaggtgatccgcctgaagcagaagcggcggaccctgaagaaccggggctacgcccagtcttgcaggtataaacgcgtccagcagaagcaccacctggagaatgagaagacgcagctcattcagcaggtggagcagcttaagcaggaggtgtcccggctggcccgcgagagagacgcctacaaggtcaagtgcgagaaactcgccaactccggcttcagggaggcgggctccaccagcgacagcccctcctctcccgagttctttctgtgagtcgtggccggtcctggcccccgcccttgccccggcccggactccctgtcccacgtccctagtcccagactaccccggaccctgtccctgccgcggccccagccttgacctgtttgacttgagcgagagggaggaagggcgcgcgggccgcgggcgacgggcgggtgcgcgggcgggcaggggaccttggctaaggcgagagtagcgcacgccagcgccgcctcctagactcgagcagagccggagagagagacgagagggtgggaggtcccggagtaacttctctccaggctgaagggcggcgaggcatagtcccgagaagtcaccaaggccatctggagactcctggctttctgaactttgcgcgttaagccgggacagctgctttgctgcccggagagtagtccgcgccaggaagagagcaacgaggaaaggagagggactctggcgtcccggcaggcgagaggcgaggctgagcgaaagaaggaaggacagacggacctgtctgtcagagttcggagaacactggctctcagccctgagacacaggcctcagttaggacgctcggcgcccaaatctcatcagttttattgcctgctcgattatatagaaaaatacaaaaaatctgcattaaaaatattaatcctgcatgctggacatgtatggtaataatttctattttgtaccattttcttgtttaactttagcatgttgttgatcatggatcatactccccttgtttctttgggtgagaagggatcgcagtttggaaactccggcggctgcgtgcggggtttcagtcccagctgtaggcttgtaaatacccgccccgccaaaccgcatagagaacgtggcagcaagctgagggtctttgtttgggtttattattacggtatttttgtttgtaagttaaaaagaaaaaaaaaaagaaaaagttccgggcattttgcatcagaaaacaactttgtcttggggcacacttggaagttgcatgttttctttccttcccttatccccattcggtcctctttttcctctctcgctttagttttcaaccttgttggtgctgagagagagaaccgagaggtcccagtacaagggcagggcagggcagggaagctgccaagctccgcaccccagaggagtgttctggactacagccttgtcttatggtcaaattgatacccttaataagaaaggaaaggaaaggaaaacagatcctcccctctgctttttattgtaaccagaatcaccctgaggtcccttctgaaccctctgggcctgcgctaattgtaggagccacagcgctcctagggtgagaggcttagccatccctgaccctggcagtgcactggtaagcagacactgcactgaaccaactgctatgctcagaatgtaccagaaacccaaacattggcaagtaattttgcaactttcaagtgcgttctttagaccaatgcattgcgtttctttccctgcttttgagatagtaggaagagttcttggtggtgtccccccccttcaattcttcagttgtatagtagttatagggaagatatgggtgtttttctttattattacttttttttttctgcaggtcagtaaaaggatttaagttgcactgacaaaaataccaaaataaaagtgtatttttaagttcccatttgaaattgctggcgctgctggccggatgcatttttgagtttgtattagttgataaattaacagtaataacaagattgtatgaaccgcatggtgcttgcagttttaaatattgtggatatttgtcctgcatcagaaacgagctttggtttttacagattcaactgtgttgaaatcaaacctgccgcaacagaaattgtttttatttcatgtaaaataagggatcaatttcaaaccctgcttatgatatgaaaatattaaaacctagtctattgtagttttattcagactggtttctgttttttggttattaaaatggtttcctattttgcttattaacagaaacataaaatcataaaaaataaaagttactctgctccgtggcggcccgcttctaagaacttagttggatctctcccgggcttgcaaggaaatttcgatattcaacgctttatccgattacccgttcgcacctttcgaggggggggcccctggttaccccagcctttttgttttcccttttagttgaaggggtttaaaattgcggccgctttgggccgtaaaatcattgggtcattaggcttggttttccctgttgannnnnnnn

SEQ ID NO: 13255 - DNA, 3687 bp, Homo sapiens
  misc_feature 1, 2, 3669, 3670, 3671, 3672, 3673, 3674, 3675, 3676, 3677,3678, 3679, 3680, 3681, 3682, 3683, 3684, 3685, 3686, 3687: n = A,T,C or G
nngatatcgaatttccttgcagccccgggggaatccactaagtttctagagcgggccgaagggtacaggccaacatatttctctttttggccaaaccctgaccacatgccacacgcagattcactgtgccatcagcaagattgacattgaaaaagatatccaggctgtaatggaagaaactacaattttatctacagaaaacaaatctgagttcctgttaacggattactttgaagaagatcctaacagtgcaatggataaagagagacgaaagtctttactaaaaccaaaattattgggactgcagagagacattgaaaaagcctcaaaagacaaggaaggcctggaacgaatgcttaaaacgtacctcggccgaggtacgcggggagaacgcgtccgtgcttttccacagaaggttagaccctgaaagagatggctcagcaccacctatggatcttgctcctttgcctgcaaacctggccggaagcagctggaaaagactcagaaatcttcacagtgaatgggattctgggagagtcagtcactttccctgtaaatatccaagaaccacggcaagttaaaatcattgcttggacttctaaaacatctgttgcttatgtaacaccaggagactcagaaacagcacccgtagttactgtgacccacagaaattattatgaacggatacatgccttaggtccgaactacaatctggtcattagcgatctgaggatggaagacgcaggagactacaaagcagacataaatacacaggctgatccctacaccaccaccaagcgctacaacctgcaaatctatcgtcggcttgggaaaccaaaaattacacagagtttaatggcatctgtgaacagcacctgtaatgtcacactgacatgctctgtagagaaagaagaaaagaatgtgacatacaattggagtcccctgggagaagagggtaatgtccttcaaatcttccagactcctgaggaccaagagctgacttacacgtgtacagcccagaaccctgtcagcaacaattctgactccatctctgcccggcagctctgtgcagacatcgcaatgggcttccgtactcaccacaccgggttgctgagcgtgctggctatgttctttctgcttgttctcattctgtcttcagtgtttttgttccgtttgttcaagagaagacaagatgctgcctcaaagaaaaccatatacacatatatcatggcttcaaggaacacccagccagcagagtccagaatctatgatgaaatcctgcagtccaaggtgcttccctccaaggaagagccagtgaacacagtttattccgaagtgcagtttgctgataagatggggaaagccagcacacaggacagtaaacctcctgggacttcaagctatgaaattgtgatctaggctgctgggctgaattctccctctggaaactgagttacaaccaccaatactggcaggttccctggatccagatcttctctgcccaactcttactgggagattgcaaactgccacatctcagcctgtaagcaaagcaggaaaccttctgctgggcatagcttgtgcctaaatggacaaatggatgcatacccttcctgaaatgactcccttctgaatgaatgacaaagcaggttacctagtatagttttcccaaacttcttcccatcatagcacatgtagaaaataatatttttatggcacactgggataaacaagcaagattgctcacttctggaagctgcatatgactagaggcctcttgtgactggaggtaacaaccctgcccagtaactgtgggagaaggggatcaatattttgcacacctgtaataggccatggcacaccagccaagatgctctgctcacagtcagtatgtgtgaagatccctggtgcgtggccttcaccacgcatcttgagcaaattaggaaaatgtacccttcgcttgaggcagatgcagcccttcccccgagtgcatggcttggagagcagaatgtgggctgcatataagcacactcatccctttgtctgggaatctttgtgcagggcataacaggcttagtaagtccaaacacagatgacagtgctgtgtgggtctctgtcagagttgtggctctcagccatgtagacacactctccaaatggagtgttggaaaatgttctttctgcagggtctagagactgctgggacacttttcttggagtgctacttcagaagccttataggattttctttctggccaagatttccttctgtatcactccaagcagcctcagcagaagaagcagccatgcccagtattcccactctccaaaaggaactgaccagcttatatttctcacacttctggggaactgggtataatccaaccatcaaaatagaagaccttgcaagaagcagagtcattctccagaaggaacttgggagatgatggtgcagatgatgaaactgggttcatcccagttccaaagactcagagaactagagtttaagctgaggcagagtgccgccaccctggcatgccccacaaacagatcaccagccagcttacacaggcattaactctcctcaatgaggaagaatcattcacaactgagcaagacattcatatgatcatttaaggaagtgtttcccttatgtgttagcaagtataatcggctaactcctaaatcccaatgaatagtcctaggctggacagcaatgggctgcaattaggcagataaagacatcagtcccagtaaatgaatccatagactcatctagcaccaactaccattagcactatgttaggagctgcaaggccccaaagtagaagatgtgcataatgtctgctcttgtgtagctcaggagacaattccagcacagacactacagttaacgctgaactgcagctgcaagtaatagcatgaacagtcagaaaaataccttatgagggggcagggctgaagctgggccttgaaggatggatgaaatttggatagagaatgaggaagacagagggcctccaagtgagagaagcatgaaaaatgagcaggggcctggatcagtggggtgtattcagagcacctctccagatgcaccatgcatgctcacagtcccttgcctatgtgtggcagagtgtcccagccagatgtgtgcccccaccccatgtccatttacatgtccttcaatgcccacctcaaaaggtacctcttctgtaaagctttccctggtatcaggaatcaaaattaatcagggatcttttcacactgctgttttttcctctttggtccttctatcactaaaactcatctcattcagccttacagcataactaattatttgttttcctcactacattgtacatgtgggaattacagataaacggaagccggctggggtggtggctcacgcctgtaaccccaacactttgggaggccaaggcaggcggatcacctgaggtcaggagttcgagattagtctggccaacatggtgaaaccccatctctactaaaaatacgaaattagccaggtgtggtggcacacatctgtagtcccagctactctggaggctgagacaggagaatcgcttgaacccaggaagtggaggttgcagtgagctgagatcacaccactgcactccagcctgggagagagagagtgagtctccatcnnnnnnnnnnnnnnnnnnn

SEQ ID NO: 13256 - DNA, 3977 bp, Homo sapiens
  misc_feature 1, 3976, 3977: n = A,T,C or G
nctcgacgctctccctcgctcactcctcagtgtaggagtgatctgaagcaggacaagctcagcctgcagctgccgtgggctttgtgtggactggacgcagagcttgggagacgggggagggctattactccaattcactgtcaatggaattacagctatagcggcagtgtatataggattgctttttctcgtcttcctgggttctgaagtaacggaagctaccttgtataaagacctcaacactgctgaccatgatcagcgcagcctggagcatcttcctcatcgggactaaaattgggctgttccttcaagtagcacctctatcagttatggctaaatcctgtccatctgtgtgtcgctgcgatgcgggtttcatttactgtaatgatcgctttctgacatccattccaacaggaataccagaggatgctacaactctctaccttcagaacaaccaaataaataatgctgggattccttcagatttgaaaaacttgctgaaagtagaaagaatatacctataccacaacagtttagatgaatttcctaccaacctcccaaagtatgtaaaagagttacatttgcaagaaaataacataaggactatcacttatgattcactttcaaaaattccctatctggaagaattacatttagatgacaactctgtctctgcagttagcatagaagagggagcattccgagacagcaactatctccgactgcttttcctgtcccgtaatcaccttagcacaattccctggggtttgcccaggactatagaagaactacgcttggatgataatcgcatatccactatttcatcaccatctcttcaaggtctcactagtctaaaacgcctggttctagatggaaacctgttgaacaatcatggtttaggtgacaaagttttcttcaacctagttaatttgacagagctgtccctggtgcggaattccctgactgctgcaccagtaaaccttccaggcacaaacctgaggaagctttatcttcaagataaccacatcaatcgggtgcccccaaatgctttttcttatctaaggcagctctatcgactggatatgtccaataataacctaagtaatttacctcagggtatctttgatgatttggacaatataacacaactgattcttcgcaacaatccctggtattgcgggtgcaagatgaaatgggtacgtgactggttacaatcactacctgtgaaggtcaacgtgcgtgggctcatgtgccaagccccagaaaaggttcgtgggatggctattaaggatctcaatgcagaactgtttgattgtaaggacagtgggattgtaagcaccattcagataaccactgcaatacccaacacagtgtatcctgcccaaggacagtggccagctccagtgaccaaacagccagatattaagaaccccaagctcactaaggatcaccaaaccacagggagtccctcaagaaaaacaattacaattactgtgaagtctgtcacctctgataccattcatatctcttggaaacttgctctacctatgactgctttgagactcagctggcttaaactgggccatagcccggcatttggatctataacagaaacaattgtaacaggggaacgcagtgagtacttggtcacagccctggagcctgattcaccctataaagtatgcatggttcccatggaaaccagcaacctctacctatttgatgaaactcctgtttgtattgagactgaaactgcaccccttcgaatgtacaaccctacaaccaccctcaatcgagagcaagagaaagaaccttacaaaaaccccaatttacctttggctgccatcattggtggggctgtggccctggttaccattgcccttcttgctttagtgtgttggtatgttcataggaatggatcgctcttctcaaggaactgtgcatatagcaaagggaggagaagaaaggatgactatgcagaagctggcactaagaaggacaactctatcctggaaatcagggaaacttcttttcagatgttaccaataagcaatgaacccatctcgaaggaggagtttgtaatacacaccatatttcctcctaatggaatgaatctgtacaaaaacaatcacagtgaaagcagtagtaaccgaagctacagagacagtggtattccagactcagatcactcacactcatgatgctgaaggactcacagcagacttgtgttttgggttttttaaacctaagggaggtgatggtaggaaccctgttctactgcaaaacactggaaaaagagactgaaaaaaagcaatgtactgtacatttgccatataatttatatttaagaactttttattaaaagtttcaaatttcaggttactgctgcgattgatgtagtggagatgcctgaacacaattctatattttagtattttttagtaatttgtactgtattttccttgcaaatattggagttataaaccatttactttgtgttctactgagtaagatgacttgttgactgtgaaagtgaattttcttgctgtgtcgaacaatcaggactgcattcatatgagatccttgtagtataagcacaggccatttttcactttggtattaataaaatgtaaaaaaaaaaaactggctgaatggctgaatgagataaaatttaattttaaaaaaatggttatgaaataatgttccaattattaaatttgtattatcccagtggtattcaataaatcaaaatgtgtgaagtaatgggcaatatcaaacttcctgcatatctccatttttgctctaggcaaattaattatccttaaaaaagttaagcatatcttctgaactgaatacatcagctggcataaaaggagcatgaagtctgttaaagccattgtcagcaaagctttgaaaataaaggacttcacaaaaacggtaatgtaaatgtgcttccaagttggggggaaaatgtgtacttaggaaaacatggaaacttagacttgtatagtgtaatgaacacaaataccaaaactgcattttggttttgcctataccatcctgatttttgaaaagtgaattataaacacaaaattgttagtgtttatgatgtttttatcataaaggatgtcagagaaactttatgcatattaaaaatgtaatgtaattataagcgattcccctcaacaatccagagaaagtagttctttaaataagagataatttaaagaaaaataaatactagacatcaaatttagatctggtttatgtcaaaggttttaacactgtacataaatgttcaatttacttttacaaagatcaagaatactgcccattactgtcacaattttccagatattatataatgaactcgtaatgtaacatttccttctagcttcctactgaattgtgagctgttacttgttgaaaaaccatatcacttttctgttgccatgatttttttttttcaacaaaaaaccaaagtgcattgtacgccctttggccagtcttgtatgtgccttgatccaacgctacatgtattcagcttttaaaactccacaaatttttcatactccttaaatatgaaaaattatggtcttattgctgaataaaacttttaaaaagtacagaataattgtgcttgctttttcaggattgtgttactatcactaagtagcaaattgcccagcacattagtcctaaacgtcccatgtatttttctaggcataaaaataaaagttggctaaaaaaaatctttaaaaaactctaaagaagaaaaataaaaaaaaaaaactttttgcgggcggctcaggcctcagaaaagtttttacgacaccatttgttggggcgggggccgagtgttaattaaatgggtaaaggggccaaagaacctggggcgagaagtgggtggttccacaataaaagggcgcgggccgggttcgacaatccagcggtggggctcggttcaagggcaggnn

SEQ ID NO: 13257 - DNA, 1489 bp, Homo sapiens
  misc_feature 1, 2, 3, 4, 1463, 1489: n = A,T,C or G
nnnnccgtgggaggctggagaagagagatgggaggggccggccggcgggggtgagggggtctaaagattgtgggggtgaggaactgagggtggggggcgcggagaggcgggactcggggcggggcaggcgaggcggagggcgagggctgcgggagcaagtacggagccgggggtgtgggggacgattgccgctgcagccgccgccccactcacctccggtgtgtctgcagcccggacactaagggagatggatgaatgggtggggaggatgcggcgcacatggccccgggcggctcggcggtcagctgccgcccccacagcggaccggtcggggcgggggtcgggcggtagaaaaaagggccgcgaggcgagcggagcactgggcggaccgcggcggcagcatgagcggcgcagaccgtagccccaatgcgggcgcagcccctgactcggccccgggccaggcggcggtggcttcggcctaccagcgcttcgagccgcgcgcctacctccgcaacaactacgcgccccctcgcggggacctgtgcaacccgaacggcgtcgggccgtggaagctgcgctgcttggcgcagaccttcgccaccggtgaagtgtccggacgcaccctcatcgacattggttcaggccccaccgtgtaccagctgctcagtgcctgcagccactttgaggacatcaccatgacagatttcctggaggtcaaccgccaggagctggggcgctggctgcaggaggagccgggggccttcaactggagcatgtacagccaacatgcctgcctcattgagggcaagggggaatgctggcaggataaggagcgccagctgcgagccagggtgaaacgggtcctgcccatcgacgtgcaccagccccagcccctgggtgctgggagcccagctcccctgcctgctgacgccctggtctctgccttctgcttggaggctgtgagcccagatcttgccagctttcagcgggccctggaccacatcaccacgctgctgaggcctggggggcacctcctcctcatcggggccctggaggagtcgtggtacctggctggggaggccaggctgacggtggtgccagtgtctgaggaggaggtgagggaggccctggtgcgtagtggctacaaggtccgggacctccgcacctatatcatgcctgcccaccttcagacaggcgtagatgatgtcaagggcgtcttcttcgcctgggctcagaaggttgggctgtgagggctgtacctggtgccctgtggcccccacccacctggattccctgttctttgaagtggcacctaataaagaaataataccctgaaaaaaaaaaaaaaaaaactcgagggggggcccggtacccaattcgccctatagtgagtcgtattacaattcactggccgtcgttttacaacgtcgtgactgggctggcgtaatagcgaagaggcccgnaccgatcgcccttcccaacagttgcn

SEQ ID NO: 13258 - DNA, 490 bp, Homo sapiens
acaagcgattctgctgtcccagcctcacaagtagctaggattacaggcatgtgccaccacatctctactaaaaatacaaaaaattagccaggcatggtggcaggtgcctgtagtcctagctactcgggaggctgaggtgggagaatggcgtgaacccaggaggcggagctttcagtgagccgagatcacgccactgcactccagcctgggccacagagccagactccgtctcaaaaaaaaaaaaaaaaatattttctcctctttaaagatttcatcttcagataaccccatacttatccacattaccctactggcctttctctgaccggattgaagataagaattaaaatcatttaaggagattttagatctatgtaagacagagtaatctgttcctagtttgtctgaatttgtgtttgttttcataaaacattggtttattaggagagaaacattttaaatatttgaaaatacatcttcatttaaagct

SEQ ID NO: 13259 - DNA, 2680 bp, Homo sapiens
  misc_feature 1, 2, 2679, 2680: n = A,T,C or G
nncccgttgaggagatcaagcccagcaatggtggcagaatcttactccacagacttcagcagactagtcatttcaatacccaaagaaagacaagtgacaggggcaatggatctcaggctctgagataagtatatcagatgacactggtggctctaaggatattgcaattaagcagctacctgtagccaggtattctgctgctcttggccttttcccacgcatcgtctcgtgtcttctccgaaagaccttggaagataggcctggaagagactgttgatgccactttgaagaaaagaacactgagaactagaggagggaacactttgcccaagattactcacaaagccaagacccagagtccagcttagagaatagagttgttcaggctgccaattgcaagctcattcctctacctcatacttcctctgaggattttgacaaaatggattaattgggtgagccttggagacatgtgggaaacacctgcagacacaaaatgagtagtcatcctgtctccctttcaatagggatctgaacaggtgttttgatacttgaaagatgtgcatgtcaagtgagggtttctttctgcgatgttcaactggaactctcccatcagtagttacaattagaaatacctactgatggttagtctgaaggccattctcatggtcacctatacagtgtgtttccctgtgagctagcagacacaatgaccaggaaaaaacctatgaattccattcttaggtttcccagccaattgctcccttctgctttagaagtgactaggtactgagagtacaaacactcccactttataatgaaggcgtcatgtcaccccttcctttacaggtcctggggtccaggagacccagaatgaaggtgtcagttgggcatgaagtgttatttagtgtccattcttgatccttctgagcacctacagctggaaactaagcagatactggtcctgcattctgactgagattgtgtcttctttatgaggatagatcaaattggcagtcaggcccatgatagtcagtgcagttggggcagttgtagactttgctacaggatttcagggtttccaatcaccccacaggtaagtgaatgccaaagtcttcttttttcagaccatacaagaagtcattttgattttcaaagaagccgttttgattttcaaagaagcaggttctggtgacattattttcttccttggacaaagtggggggaaatttctaagtattttaactgagttcagggtccttagtgagcctggacagagcaaggagagggctccccactccctaagccccacagccagctctgcatcaccacacacagccagagcctgtgaggagctgccttcttccccatgtgacttgcaaagagtctcaggcaagaaaccagggcttcaaactgctagttcccatggagggtagttccctcgtgtggagcacttgtgttaggatcactgattatctgacaaaggctggtgcagaaaaaaaattgtaggcccaagtgtcaagaaccacaccagattggagatagaaaagaatagctgaaattatgtcagtggtgaaatgtcactccattgacccaccgaaaaaagaaaagaaatctgtttctaccaaacatttccagaaacgtatttatagcatgaagaaacacacatgggtagtgtgacctgtttggatgtgattacttaaaaatggaatgctctgaataggcactctctacattaaaggtatggaaggcgataggggtcagaattttaaaaatttaattttgaaaaaggtgactcacccctcatttccagagtgtaggcaattatgtcctgctttgataaaactgctagaggatggctatgcaaaagcataacgattcaaggaaacaaagtacaggtagtttttgagctgacagcagcaaaggcaccataagtcaaaatattggttttggtggagatgatcgatgtgtgtgtgtgagagagagctatgtttctaaccaagggcctaatgtttgttacagaaatgatcccagagacctacaagatgtgggaatcagcataacagggcaatgcagcaattaaccccacatcgttttctgtagttcctttttgtttcattttcttctgtctcacctcgttagaaaattcctcccagtcaggggtcgtccagtgcaggacgggggacccaagggtctcaagcctgcaagtccagaaggtgacaaacccaggagcactgggagttaagctttccttggggagggaagagccttgatgtccagcacacagcctggctataaagacacgaagcgacctacccactgtacagtccacttcacaggatcagctgaatcatgacctttaaaagttccgagttgaaactgaaggctctcctcagacctggctttttcctcagtccctgttcataccatctctgcacccacaatcacactgatttttcaaattcattttgtttttgctgtttcatttctggcattaataaaagtcttataaggagaaatcgtgacttaagttcttttttatttaactgatgacatccaatataaataaggaacatgttttgaaagcggaatatatgaaaatggacttcataaccactttgactttgaagtacaacaaacttaacctgactcacgtgcatgttatttcactgcaaacann

SEQ ID NO: 13260 - DNA, 528 bp, Homo sapiens
  misc_feature 528: n = A,T,C or G
acaaaaccagcttcattattttaccctcacagaacagctgactctagaattctgctaatgatacactgaaaataaatatacgccagactccgtggctcacgcctgtaatcccagcactttgggaggccgaggtgggtggatcacctgaggtcaggagttcgagaccagcctaaccaacaatggagaaaccccgtctctactaaaaatacaaaattagccaggcgtggtggcgcatcccagctactcgggaggctgaggcaggagagtcgcttgaacccaggaggtggaggttgtggtaagctgagatcatgccattgtgctccagcctgggcaacaagagcgaaactccatctcaaaagaaaaaaaaagaataaatatagtaaagcgtgtgaactttgaagccaggctacttggacatgatccagtttgatccagccattcactagctgggtgacttttgacaagtgacataacatctctgaggctctacttcctctctgtaaaatggagaaaatacagcatctatan

SEQ ID NO: 13261 - DNA, 409 bp, Homo sapiens
acacggtattccttaggtcccttccattggtagtgatgctgcgagttattactggagaaaaggaattctagagcttaacttggcagattaaaagtactttttttttttttttttttttttttttggggggttgtttgtttttggtgtagaaggggaatgttgtgaaagagaacagttggaaaacccaataatatacaaatccccaaatacttagtttatgtctataaacaaagaaaaagccttttacttatcttcagaaatgaaaagtataagcacaaagacaattgatcaaattattaattggggtcttctactggagactatgacccatgtcattttagttatacataaagaaaaataatggtgtaggtgatacctaatgttatccatgtatccgtgaagaaaaagt

SEQ ID NO: 13262 - DNA, 1176 bp, Homo sapiens
  misc_feature 1171, 1172, 1173, 1174, 1175, 1176: n = A,T,C or G
tccaccgcggtggcggccgaggtacaaacccagtttgttttcaaaaaatcacagtagcaatgcaactcatcactctagaaaagcaagcttaggctacctgaaagattttcccttggaagtttagcgtatgtttgactaacaagaattccctacatcagagactctaggtgctatataatccaaaaacttttcagcctgttgctcattctgtcccatgctggcaataataccttgtcagcccattacccttattttgaattgctccatctcctggtgggacttgtatcttgtctgccatatcagaacacaaacccctgaagaggttctgatttgatttttttttttcttcatgcctaccctttttttggaagtttccagccgcaatttgaaatgaaatgacaaggtgtatatttgatcaattttcattcccaccattgcattacaacctctaacttaaatgggtaaccctaaggcatatcaaagaagcagactgcatgataaacggaaatagaaaaaaagaacctacatttattttgctttagcatccttactctcaccttttatgagattgagagtggacttacatttccttttttacattttcgtatacttattttttttagccatcattatatgtttaagtctattatgggcaaccaatctttggaagctgaatactgaatttaaagaatgctatcttggaaaattgcatacgtctgtgcaattttttattctgcctagtgctattctgcttgtttaactagattgtacaaaataacttcattgcttaatatcaaattacaaagtttagacttggagggaaatgggctttttagaagcaaacaattttaaatatattttgttcttcaaataaatagtgtttaaacattgaatgtgttttgtgaacaatatcccactttgcaaactttaactacacatgcttggaattaagttttagctgttttcattgctcaataataaagcctgaattctgaccaatgcataaaaaaaaaaaaaaaaaaaaaaccccccgggccgtttaaaaaaaagggaccccccggggggggagaattttttttaaaatttttttaaccccccccccctggggggggggcccggcccccaattttggccccctttggggggggtaattgcccccctggggaaaaannnnnn

SEQ ID NO: 13263 - DNA, 384 bp, Homo sapiens
accttgcagggctggggtaatgttcttcaggagattatacatgccccatgtcagcatccaatatatgatgctgtttctaccatagccaagattcaagaatcaaggggtggaaatgggagcggcaccagttgccattacccctagtcatccattagcataatttttgcttcctgttcctgttcctgtggccttatgctctgctggtctaggggtcttagtggctctcttcattaatgttgtctgacacttaggcctttctgtctgcaaacttgagtcttccttgatggacaacagagcatggaattatttttggaccagagtctagatttacctagtctgtggagtctagaagattgctgcgtaatatggaacaagttactttgt

SEQ ID NO: 13264 - DNA, 912 bp, Homo sapiens
gtcaatgcaaagcttcaatgtagatacagtttttagtccttctccttgcttgctaccctcttgtttacctcagcattcctcagtcttttccctaaaactccaccctgactcctttcttcgttgtctgtctcccactggtatcacttcgggccccttggacctgcttcctagtggtcgtaagattctgtggttcaacccaggcctatcccttcctatcctatgaggcatctctgtgctcacctcagccagctcatgttccttaagccttataggagtctgtgtagactacataacatctttattttcaggtggcttgcacttgggcaggtcttgacaagcatcatgttcttgatgactgacctgaaccatttctggaggggagctgccgtacagctggaaatctgagtagtttcaggaaacacagcatcatcatcttcattgtctttcagattttctagaaatgtctgaaactcttgcacaagattattcagtttgctgacagatagttttgtcctctcttttgggaacttgtttatccacaggttggctccatttagaagcctattagctattgagtctgtgttgtcagagccaacgtccatgtcccaggccaggaagatgttcagtttgcaaaactgtctggttcgtcctgaatttggtattgtctcttcatgtgtttccttatcctttcagtcccccatgccccttggatgggagggagaaagtggatggaaggacccttggaaggtgcgtcttcccaggaggttgtgtcctcacagggggtgtcctcacaggggaaatagcccacagagaggatcaggttggaattggatttggagctgtcgtcctctatgtcgctgttagaggatgaatatgccatggagttcaaaggcacaaatctctctcaacttg

SEQ ID NO: 13265 - DNA, 634 bp, Homo sapiens
  misc_feature 1, 2, 3: n = A,T,C or G
nnngctagtctatgagtccctccagagagagtttctttcccttgtatcttgcatatgataagtacttgataaacattcagtcagttgaaatgagggttgtacttttctttgaaagcataattttccttattttaaaagatgtggctgtcttctctggttgtgagagcaatacactgggtcaggcatatagtaggcactcagtaaatgtttactgaattgaactgattgtttgccatggaattttatcattggatcaatacacacttacttgttaaaccagcttttatgaaaaacatatatgtaatactatgaaagtcaattgcaggagactaatcttatctggaatgtcaagggagattgctatgaagaagtgatttttgagctatgtaaaaatgatagctaagggtggtggcaatggagctatgtgtgtgtgagtaggggtgcccttgaagtagaggcaaaaatatgtgcaaaggctctgaggcagatataggtttggcacattaaacagctgattaaaggccaatgtagctggagaacgaagtggggcagaatggttttaagaaataaacaggttagtaataatatcagcttttcaaaactctctctggctgttatatatgtataaaaaaag

SEQ ID NO: 13266 - DNA, 519 bp, Homo sapiens
accaggtaagcgggggaagctacatacaataataatgcattctcttatttaacattcgcagttaacttttttttgagacggagtctctgtcgcccaggctggagtgcagtggcgcgatctctgctcactgcaagctccgccttctgggttcacgccattctcctgcctcagtttcccgggtggctgggactacaggcgcctgccaccaagtctagctaaatttttgtatttttagtagagacggggtttcaccatgttagccaggatggtctcgatctcctgacctcgtgatccgcccgcctcagcctcccaaagtgctgggattacaggtgtgagccaccgctcccggcccaacttctttttttaactcctgcaaaaccacaacacaaagtcaggtttgttgtgcttagaccatttgctatttcttagcaatcctactctttatccacaaaaccacatcctcattacaatcaattatttatcaagtgggatctcaaaaaatcacattccagattacta

SEQ ID NO: 13267 - DNA, 515 bp, Homo sapiens
  misc_feature 515: n = A,T,C or G
acgcggggacagtctgctggtgggcagagaagacagaaacgacatgagcacagcaggaaaagaaagttgtctgacagaagtttgatgagaggaatttgactcagaagactgaaatatcctttaaccttactataaaatatcttacaaaatactcattgatttcacagcattagaatcatcaaggtaatcaaatgcaaagcagctgtgctatgggaggtaaagaaacccttttccattgaggatgtggaggttgcacctcctaaggcttatgaagttcgcattaagatggtggctgtaggaatctgtcgcacagatgaccacgtggttagtggcaacctggtgaccccccttcctgtgattttaggccatgaggcagccggcatcgtggagagtgttggagaaggggtgactacagtcaaaccaggtgataaagtcatcccgctctttactcctcagtgtggaaaatgcagagtttgtaaaaacccggagagcaactactgcttgaaaaatgatcn

SEQ ID NO: 13268 - DNA, 1202 bp, Homo sapiens
  misc_feature 1, 2, 3, 4, 5, 6, 7, 8, 1200, 1201, 1202: n = A,T,C or G
nnnnnnnngagatagggtctcactctgtcacccaggctgaaatgcagtagtgtgattttggctcattgcagccttgacttcccgggctgaagtgatcctcccgcctcagcctcctgagtggctggggctacaggcatgcgccaccatgctgcgctaatttttgtattttttgtagtggtgggattttgccatatcaccctggctggtctggaacccctgggctcaagcgatccactcgcttcagcttctcaaagtgctgggattacaggcatgagccacagcgcccaggctgtagctctcttaaggaggaacatatctcatctgagacaaacctgaaatgccaaaccaaactgagttagcccctctctgtctgttgtatatattggagtaataacctatttgtcttgataaagggattgcatgcttgaattgcaaaaacctttatttcttttgggttgcccaatgtgcaagactaagagttattttgataaatttctcaccaggctgactgtctctctgtggggtcgggggagttttcagggtctcacgtattgcagggaaggtttggttgtgagatcgagaataacagaagcagcggagcattctggaaatattactatgatggaaaggactacattgaattcaacaaagaaatcccagcctgggtccccttcgacccagcagcccagataaccaagcagaagtgggaggcagaaccagtctacgtgcagcgggccaaggcttacctggaggaggagtgccctgcgactctgcggaaatacctgaaatacagcaaaaatatcctggaccggcaagatcctccctctgtggtggtcaccagccaccaggccccaggaggaagaaactggtgcctggcctacgacttctacccagggggagatgttcttcacaatggtggcacttaccagtcctgggtggtggtggcagtgcccccgcaggacacagccccctactcctgccacgtgcagcacagcagcctggcccagcccctcgtggtgccctgggaggccagctaggaagcaagggttggaggcaatgtgggatctcagacccagtagctgcccttcctgcctgatgtgggagctgaaccacagaaatcacagtcaatggatccacaaggcctgaggagcactgtggggggacagacaggatgtggatttggagaccgaagactgggannn

SEQ ID NO: 13269 - DNA, 678 bp, Homo sapiens
  misc_feature 652, 653, 654, 655, 656, 657, 658, 659, 660, 661, 662, 663,664, 665, 666, 667, 668, 669, 670, 671, 672, 673, 674, 675,676, 677, 678: n = A,T,C or G
actttttgttgtattttgttttttatctaaatcaattatttgtataaaaattccagacttttatgaattatatgttctctttaataaaattcacgtgattcaatttaaggtttgtaagaataatataaaacattcttattcctggctgggcacggtggcttgagccggtaatcccagcactttgggaggccgaggtgggcggatcatgaggtcaggagatcgagaccatcctggctaacatggtgaaaccccacctctactaaaaatacaaaaaattagctgggcgtggtggcaggcacctgtagtcccacctacttgggaggctgaggcaggagaatggcgtgaacctgggaggcagagcttgcagtgagccgagatcacgccactgcactccagcctgggcgacagagcaagattccatctcaaaacaaaacaaaaaacaacaacaaaaaattcttattccttacctgaaagcaagttttggcttttctacgaatttcacttattttaaaatcacatttatctttcctaagttgttttaaaacgacatgggactaaatcccaaaactaaaaatgaaaggtgagttataacatgagttactattaacaggtataaaagaaccaaacgcaagctatacagtcaacagaagannnnnnnnnnnnnnnnnnnnnnnnnnn

SEQ ID NO: 13270 - DNA, 877 bp, Homo sapiens
acgcgggattgcaagcctgtccccagtctccccactgctgctatgcctgaaaagagccccagccccgtctccaaagcccagggttcgcctcttgctgaaagagcaacgttcccaggctgaggacaaacccaggactgctcaggcggagagatccctgcccccacgttcaccactgacaacccaactccatcctcagtctccgtggcttcagatctggactccgcaccctcctccacctccacctctcttcccagagaccctccccacatcatgctcagtgctgtttctgaagaccatctagacttttgtgttctctggaacattctactcaccttcagctgcagcacatttcttcagcctctccaccaagctctttaaaatgaaaggcagttactgtcttcccttggacaataatgaatgtatctactgtatgtgcagaccatgtcgagaagtggctgggttaagaaaaaagagggtttttgtaaagcctgtttatttttttaagtcagttttgagcatttctattttaccacccttcacatggttttggggaacccaaattgtatcaaggtctcatgccaaaacaagccaaagttgttttctttacctttttcctccatgcaccatgatttcaatgattgtttcagtgtcattttaaatgttttcttgtgacatgtactgatgataaaagtcatcttgacaacaaccccaccacaaagatttatacatgaatcagaaagtatttatttcaattttgtacctttccattttaatacattataatgtattgactcaacggagataatataaacagttcattttaataaaaaaaaaaaaaaaaaaaaaaaaaaaaaaaaaaaaaaaaaaaaaaaaaaaa

SEQ ID NO: 13271 - DNA, 1602 bp, Homo sapiens
  misc_feature 1587: n = A,T,C or G
acccacgcgtccgccaagaaggaggagggggtcgggcctccgaggaaggcctagctgctgctgctgccagaagagacagagcttgaggagagccttgaggagagcaggaaagggcggcagtaagtcttcagcatcaggcattttggggtgactcagtaaatggtagatcttgctaccagtggaacagccactaaggattctgcagtgagagcagagggccagctaagtggtactctcccagagactgtctgactcacgccaccccctccaccttggacacaggacgctgtggtttctgagccaggtacaatgactcctttcgcagcctcccccgttgcccctctggatccactgcttaaatacggacgagggcagggccctgtctcctcagcttcaggcaccaccactgacctgggacagtgaatcgacaatgccgtcttctgtctcgtggggcatcctcctgctggcaggcctgtgctgcctggtccctgtctccctggctgaggatccccagggagatgctgcccagaagacagatacatcccaccatgatcaggatcacccaaccttcaacaagatcacccccaacctggctgagttcgccttcagcctataccgccagctggcacaccagtccaacagcaccaatatcttcttctccccagtgagcatcgctacagcctttgcaatgctctccctggggaccaaggctgacactcacgatgaaatcctggagggcctgaatttcaacctcacggagattccggaggctcagatccatgaaggcttccaggaactcctccataccctcaaccagccagacagccagctccagctgaccaccggcaatggcctgttcctcagcgagggcctgaagctagtggataagtttttggaggatgttaaaaagttgtaccactcagaagccttcactgtcaacttcggggacaccgaagaggccaagaaacagatcaacgattacgtggagaagggtactcaagggaattacatcttctttaaaggcaaatgggagagaccctttgaagtcaaggacaccgaggaagaggacttccacgtggaccaggtgaccaccgtgaaggtgcctatgatgaagcgtttaggcatgtttaacatccagcactgtaagaagctgtccagctgggtgctgctgatgaaatacctgggcaatgccaccgccatcttcttcctgcctgatgaggggaaactacagcacctggaaaatgaactcacccacgatatcatcaccaagttcctgggaacctatgatctgaagagcgtcctgggtcaactgggcatcactaaggtcttcagcaatggggctgacctctccggggtcacagaggaggcacccctgaagctctccaaggccgtgcataaggctgtgctgaccatcgacgagaaagggactgaagctgctggggccatgtttttagaggcataccatgtctatcccccgaggtaagtcacaaccctttgtcttcttaatgttgacaaatacagtctcctcttcatgggaaagtggtgaatccaccaaatactgcttcgtctaccctcctcatcctggcntcctggtgcataaga

SEQ ID NO: 13272 - DNA, 494 bp, Homo sapiens
  misc_feature 487, 488, 489, 490, 491, 492, 493, 494: n = A,T,C or G
actgaggctgcaggttctggatgatggtgaactcgtctagggtcttgggctgggggcacttgatgatctcggtggtgtagcgcagcttccagccccggctgtcccccgactcatctgtcccgcgtacgcggggtgggaagaaagaaggggccaaactggaatgtggaggaggcccgtgggggaataaaggctactttgtccagcccacagtgttctctaatgttacagatgagatgcgcattgccaaagaggagatttttggaccagtgcagcaaatcatgaagtttaaatctttagatgacgtgatcaaaagagcaaacaatactttctatggcttatcagcaggagtgtttaccaaagacattgataaagccataacaatctcctctgctctgcaggcaggaacagtgtgggtgaattgctatggcgtggtaagtgcccagtgcccctttggtggattcaagatgtctggaaatggaagagaacnnnnnnnn

SEQ ID NO: 13273 - DNA, 1281 bp, Homo sapiens
  misc_feature 1, 2, 1280, 1281: n = A,T,C or G
nnatcgaccgcgcgtctgcccacgcgggcggagcggaagcgcacgcctgctaggatcagcggtggtggttccgcgatggtaggcggcggcggggtcggcggcggcctcctggagaatgccaaccccctcatctaccagcgctctggggagcggcctgtgacggcaggcgaggaggacgagcaggttcccgacagcatcgacgcacgcgagatcttcgatctgattcgctccatcaatgacccggagcatccactgacgctagaggagttgaacgtagtagagcaggtgcgggttcaggttagcgaccccgagagtacagtggctgtggctttcacaccaaccattccgcactgcagcatggccacccttattggtctgtccatcaaggtcaagcttctgcgctcccttcctcagcgtttcaagatggacgtgcacattactccggggacccatgcctcagagcatgcagtgaacaagcaacttgcagataaggagcgggtggcagctgccctggagaacacccacctcttggaggttgtgaatcagtgcctgtcagcccgctcctgagcctggcctttgacccctcagcctgcatactggtatcctggtcccagctcctgccagggctgttaccgttgttttcttgaatcactcacaatgagaaactaacattttgctttttgtaataaagttaatttatattcagttaccaaaaaaaaaaaaaaacaacacatgttgtgtcgcgccagcattgaagcccccgcagaaaacaagcttaccagaccaaccccaatcagcgatgggacacgcaccgggcgccccaacaggaagcggtacaaagtgacaccactgtgcgcacacagccgacgtacaccaaagacgcgaccccgggccacagaaagacaacagaccgctgggggtcccaccaaagataaaacacagccccccggggcgacaacccggagggggttcggggagaacaaaactccaagaaagtggagacctcgggagagccccaagagcggggcacaaccacaaacaggcgaggcccacacgcgaggctcgcatattaaaaaaagacccccgcccacggggccgccaaaagcaaagagacaagagcagccaaacaccaacaagtgaggagatacacgagcgacaacgcgagtagaagacaccccacgaaccaccaccacgagagcagacaaagaagacgctagcagaagcacaaacgactgacaacagacacaacgacaagagagagaaagcgaacaccaacacann

SEQ ID NO: 13274 - DNA, 2162 bp, Homo sapiens
  misc_feature 1, 2, 3, 4, 5, 6, 7, 8, 9, 10, 2134, 2135, 2136, 2137, 2138,2139, 2140, 2141, 2142, 2143, 2144, 2145, 2146, 2147, 2148,2149, 2150, 2151, 2152, 2153, 2154, 2155, 2156, 2157, 2158,2159, 2160, 2161, 2162: n = A,T,C or G
nnnnnnnnnnaaaaaaaaaaaaaagaaaaatattaataattgaccttggctgtatattaaaatagttacttttatagtagagcacatttctcaaacatgccctgaaaggcttttatcaagctcatataaagttaaagctttgagctaccttttcttggccaataaagtcactgacagtttatgtaaacattaatttcaacatggctgttgcattttaattatcaaaaatgtttaaaatgctttaagatgacacatagagaacatacacatacatacaaattagtgcatttgtaatttgttaaatttgaaatgaactattaccttgaaatatagtctttaaaaatttttaatggttaaagattaaattgaatgaaactgtagtctaatggtaactgatgatctgaatccgtctctctgataacctcctttccattttgaaaatgtgtcttattatacatggaagctagtaactacgtgaatgctgttggcaggatgagggtctgggtacctcagtctcttgtcctgtttccttcccccaaatccaccattgtgaagttgccaaccccctgccgccttcccctgccaagtacatgttgtcagagtcagccctataatgttcatttcccctcttgtttgtgggattatggatctctgcagaaatctgcatgccaattaacccatttctaaagcagaatccattttgcatgtcacaatcaagatgtacttggcaatctaagacacactgggagactgtaagaggaattaatatagaaaagctcttaattataataacatttggaagaaatttttcctttgttttgtaaagtggctaaggttgtaggagtgtgtggtatttattaccttttaaatgaactgtaaatttgccttagaaatttgtttaaaaggctagcaagtgagacccttgaggatgatcatatactaataaagattaccaaaagaaacttcttgtcctgttaggtcagtgttatgatttaatggttttaattacttaaccaattttaagaattgacaatttttaaaaatattttttttctaccattctaaagtaatgtcttttgttgtgggtttatgtgtaactacaggattttggaacataaacattttgaaggatagtcaatggtatttagtcttggatataaaaatagagaaaatttatagctttatgttattaaaataatttatcacacagagtgatttgaggttttcgcagagtagatttgtttgactcatggtttattagtctggattacttaagaacaatatgttgattttaatgttaattcccactaaatatataatattgataaatacatgtgaaattaatattgtttggaaaatgtagaggacacagctgggaattatgaatgcttttttcttaataggtttggtgtgtgtggctttgaatggttctgctgatgcatcatggaaagacagcagggaactgtagcctgccatcaaaactgtatcaactcttttaatgagcatgtgactgtattaggtacattttgaagaatataagtactgatgataaagtctagtatgcataataggattttggaggcatttcaggaattttccttttatagtatgctttttaggcatctgtatgtgtaatatcatagtatcatttattgctgggatggatcgaaaagcactgcttttacttttctgataagtatcaaaatgattttccagtaccaacttgactggcttttaattattgtcacacacacacaaaattcaactcctcaaggtttgggaaaattgtgtatttttttgtatacaagataaaagtgtcataaaaaggaatggatgaattgttgataggaacattagcagttaatttttacctgatactgagtttactgtaaaataggaaatgcataggaaggaatacctcctaaataatatgccttatagaatgatgaaatcttaccatagttcatactgaaaatgttgtttatttaaaagtattgtggagtgttgaaaataaagatacacaataagtattttctgaagagaaaattaatgaaggtatttaatgatataggaaataagtgacaagttaaagtccattttgtttcaataaaggagttgtgcaaactcaaaaaannnnnnnnnnnnnnnnnnnnnnnnnnnnn

SEQ ID NO: 13275 - DNA, 2531 bp, Homo sapiens
  misc_feature 1, 2, 3, 4, 5, 31, 2530, 2531: n = A,T,C or G
nnnnngcctgtgcttcgcttctctcgcgcgntgtgctatcgcgtgtgtgtgcgtatagttgggacgcccctatttgggcctgtgtgtggtcttgcttaaggtgcgtccctccctgctcggttcgtctcgtttttcactcccttgtgggtgtttccctggtatgtgggaccgcgggttgcctacgctgtaaccgcgctttttttaaatcgttataacagttttattcaagtctctgtgtgctctggcattgagaccaggctgagatcagcattacactgtaatacaataagaggtttagccattgaaccaagcctgcttggcatccctagttaacaatttacagtacctcgaaagaaaaaaaaaaaaaagccaaaggaaagaacctggtaagtttccttcaggactttttcatctttaaatattgttgacaacatacaataacttaaatcccaaagcaaagtgggaattcaaggacacggggtcaggacacatgaacaagacactggagcagagaaggtctagggataaaaactagtagctaattacagagcaaccaaacaaacacatgtgtgaactttcacttcacctagacttaaaagccctaagggggaggaaaaatcccaaagaaagcttttctgtgaactaagtaaaacccatctccaattcctttccttaatcctctacaagccttagactataagatatctgggtttcggtggggagtgcaggatgagtagggagggaaatcagaaaagaaagtgagcaagttcatcacctcccttctttgctacaactgtgtatcaaaggcatgtggctcaatgtgacaaaaaggcaaaagcctgacctcaagtgcccagggaggagacacaagctacagtaaggcttccaagctcaagagactgagagaaaagtgaggagaagctggaatgaagagcagcaacagggcacctgcaggctggaaacaggagagaggctcacgggctccagtggttttggaggaagagtacagattggaatttccagtcctgtttcttcaaccccggggggtcccgggttcccaacagggcgaggaaggcagccagcagcatcaaggatgtcagctgagacgtgcgagggttcaagtccagtcacaggcagatgacaggtgagccaaggacacaactcctccttgggcaaagggcaatctcaaaacctcggtggacctgagctaggccaactttatctcaagagcttctaagtagtggcttagaaatgtgctcagaggaaaaagagaggtgactttggaaccaagcagatcagcaacttgcttcctagctgtgtgaccctgggcaaattacagagccatcagagccttggtttccacattcttaaatgggggtaatacccacatcccagaattattgtaaggagtcaaaaattatatatatatgaatcactaggacagcaccgccccccacgtggaaaaaaattaatgatttcttatcatgtattattcgtctttataactaggccaggatacatctttgcctcactctgatggtgatgaagaaaagagccacagccagcatggcatctgaactggaggtagagataaacgatgagaatgaaataaagatgacagaggatgaggagggtggtggaaacgatactagcagagggtgtgatgggccaaattctgaagactcactgtgcaggcacagagctagggaatgtggctcttagcatgccagggagtgaaaaagcctccgttcactttagtcccttctgaaatctggacgagagaatgaatgaagttcattcacttctggaattcaaacatgttccaaagaggtttaagaggagaatctaaaggagcctctctgccataatcacttcccttctccagagaacacacacacacacaagtgccctcagggctgcagagccagaaaggcagccagagaacaccaaggaaatgtcacacccaggtatagatccaaagttaaaagctcctagatgtttcattgctgtaagcctacacactcctatttaaatgcgagcaccgccagagagccactgcctcactcaggacctgaggggaagggcaagtaaaaatttaaaacgtatttcacagtggtacctaagcccctctcacaggtccaggtgaggggcaggcagggctgggtatagagtggagtgaggccctctccttgggttaaaatttaaaggggtgccaaaaaaaaaaagagcctcagtaatcaaggtaaatcatattgcaatgcagtattttttaaaaatcagagttattgaaaaattccacgatgaatacagtatcaaaattttaagtcaggctttgtctgggttggtgtccaggtgtgaaggatctcaggaacaggcagcacactatttctgaaacctggccttggacttcagtgagcgcagggcaaggaacaccacggccctggggccctcgcttcccagggctccgcttgtgactactctgacctctgggttcagaatgcccagacgtctatccctcatgttccggtann

SEQ ID NO: 13276 - DNA, 1565 bp, Homo sapiens
ccgggggtcaaaaaccggggggatctgatttgcatggatggactctccccctctcagagtatgaagagagggagagatctgggggaagctcagcttcagctgtggtagagaagacaggaatcaggacaatctccagcatggccggcttccctctcctcctcaccctgctcactcactgtgcagggtcctgggcccagtctgtgctgagtcagccaccctcagcgtctgggacccccgggcagagggtcaccatctcttgttctggaagcaactccaacatcggtcgtgattatgtatactggtaccagcaactcccaggaacggcccccagactcctcatctatagtaataatcagcggccctcaggggtccctgaccgattctctggctccaagtctgacacgtcagcctccctggccatcagtgggctccggtccgaggatgaggctgattattactgtgcagcatgggataacagcctgagtggttgggtgttcggcggagggaccaaggtgaccgtcctaggtcagcccaaggctgccccctcggtcactctgttcccgccctcctctgaggagcttcaagccaacaaggccacactggtgtgtctcataagtgacttctacccgggagccgtgacagtggcctggaaggcagatagcagccccgtcaaggcggggagtggagaccaccacaccctccaaacaaagcaacaacaagtacgcggccagcagctatctgagcctgacgcctgagcagtggaagtcccacagaacctatgaacattctgtaggggccactgtcttctccacgggtgctcccttcatgcgtgacctggcagctgtagcttctgtggacttccattgctcaggcgtcaggctcagatagctgctgaccgcgtacttgctgtagctctgtttgcagagtgtggtggtctccactaccgccttgacggggctgctatctgccttccaggccactgtcacggctcccgggtagaagtcacttatgagacacaccagtgtggccttgttggcttgaagctcctcagaggagggcgggaacagagtgaccgagggggcagccttgggctgacgtaggacggtcaactgggtccctccgccgaacacccaagcgccgctgtgccaaatcatacagtaatagtcaccctcatcctcagactggagcccagagatgagtaaaatccctgcattggccgaaacatctttggatccagagaagcggctggggactccagagccctgctgtttatctgagtctgacttgaacctcaggagatactggggaggactccctggcttctgctggtaccagtatatcctgtagggaccagcattgatgccactggggaaggtgcaggtgagactgactgatgctccaggagatgcagagagggaagccggctgagtcagcacagcctgcgagagggaacctgtgcagtgagagaggaacaggaggaggagaggagtccaggccatggtggacacaacctcttacccccgcagtccccgcgtacctgcccgggcggccgccaccgcggtgga

SEQ ID NO: 13277 - DNA, 540 bp, Homo sapiens
  misc_feature 539, 540: n = A,T,C or G
accccctacccaaaggtgggtagtcccaaagtgtggctgagtccagggtttttatgggctcggaatgggggagtgcatgctgattggtcaaaaagcaccattcaattggctgaaaggcatggaggaagttctcactgcagttggggactttatctagaactggcagcttggttttcaggctttaatttgtctttggtttgaaggttgggtttcaccagggacccacccctatctgcctaggaatttgtctcccttctgctgctatcactgatacagataggcatagggctatggttttatctgtggtatttggctgttacagagaggttatgacctacaattttctgtctttttagcctgcgcctttcctgactttcaggctagacagatcaggggtttgttgatgctttttttttttcttttgcttctgtaggtgtttctgggctacgtgaggcaaaaataaaaacagagaaactcaccacagtgtttttccttggatcccatgatgcccagatgctctactttttccttttaccttnn

SEQ ID NO: 13278 - DNA, 555 bp, Homo sapiens
  misc_feature 553, 554, 555: n = A,T,C or G
acatatcctgcttctccagtcatgtagtcctgttttctgcagtgcttaaatcttttcccaaagtaagtggattcatcagggttatagtttgtgagaagccatttcaagttgtccaatgtgatatatatacatatatcatcatctgctttcatgaaccaatccatgtattccagataatggtcatgagcatatagaaaagctttaactattttccaggacagttggtttctgtcttctttggtgtgtaatcccacagtatagaagtctttattttcttttgagctcataaacaacgctttattgcaaccctgggcccatgtatctctgatgcgtctgatcttttttttctagattttgaggtcctgccataatccagcaaagaattttcatcttttgatagagtttgtcagtgacacctgtgttctggtatttatgaagactagcatttgcaatcaacttcatcagtctttttagatgattctgcccagtatcaatctgaaggcctcacgtaagaataattattaatgggcagggagtggtgactcacacctgnnn

SEQ ID NO: 13279 - DNA, 469 bp, Homo sapiens
  misc_feature 466, 467, 468, 469: n = A,T,C or G
acgcgggggccgcccgcttgctgcacggcagccgtgggactggcacaggctcctcggcagcattatgggcagctggtagagcggccacttctgagagccggatgggccttccgagttcccaccgctccgggtgtcctccccagtgcgccgcgatttttgtgtccaagccccagagtccctctgagaccaacccccagccagcacagacttcctgccttcccagctcggaagcgccctcgagaagtgtctaaaggagacagttgatagccaaacaacagttttggattcactgactgattatgaaagaagcagtagactggtatcaagaatcagtcagcaaggaggccctcaccagacgccagtgccatgttcttggacttctcagcctccatattcatgaactaagtttttggaatccttaggcttccacgtgtggaaagcctgagctaacctactggaggatgannnn

SEQ ID NO: 13280 - DNA, 315 bp, Homo sapiens
  misc_feature 313, 314, 315: n = A,T,C or G
actttttttttttttttttttttttttttttttttttttttttttttttttttttttttttttccaggaaaaaaagtttatttaataacccacagcaaaatttccacccaagtttttttaaaggaaatcaccgggggggggcaaacaaacagggcttcctttattctgcctttaggatttaaaaagtaaaaaaccggttgtttttgagggggataccagcagcttcatcagggcaaatcccaaatccccgaataacataaacaacggttgcaatttgcacagttctgtggggcgaaaacccccaaaaaaaggnnn

SEQ ID NO: 13281 - DNA, 660 bp, Homo sapiens
  misc_feature 1, 2, 3, 659, 660: n = A,T,C or G
nnngagacagaatcttgctctgtccccaggttttagtgcagtggcgagatcttggctcagtgcaagctccccctcctgggttcacgtcattctcctgcctcagcctccagagtaactgggactacaggcacccgacaccatgcccggctaattttttgtatttttagtagagacagggtttcactctgttagccaggatggtctcgatctcctgacctcgtgatcttcccacctcggcctcccaaagtgttgggattacaggcgtgggccactgcgcccggccgaagctgtgtgtttttaagatgaaaaaaccagacacacagttgacgtcaactctttctgggaattactctcttgaagcccagaatgtgttttcatattagatctaaacaaattataggttcaaaatatcaaatgtttccttccccaagagaacagaagccctcacccaactctcactagggattggccggagcacaggccgctctctgttcccgcagtaaaacacactgctgccgcccacagccagggggctctctggcagtcctgtaactcttctactcccactggattaattgaattcctgtgtataaccaacctgtttgtgttagttgtatttgctattataacagttggattcggacgcgtgggtcgactcnn

SEQ ID NO: 13282 - DNA, 518 bp, Homo sapiens
  misc_feature 518: n = A,T,C or G
tccggccgaaataccagttgagaggccaaggcaccggtgagaggtggccttgagaatggaaaggcaatgaagctgcgaaaccaactgcgggaagaatccacagtgcagatttggtatttggttggagactgtcacaggggcagagttagagagaaagtgatcagaatgactgcgttttccatctaggagcatggagaattttactcgttgggggtgcggaagaggctgagttttggttgaggcattgacaggacaccctgtcccgggcaggtacgcggggtttggagggctttgggccaaggcgcagctgggtggtcattcgcgcaccaggggttcaccacaggcctgggtggtgagcagcggctatatagtgagaagcaggccaaagacagctcgggacagccctcacatttgaggaatgccaggaagactaaggacagtgaaagagggcttgggagttatagccaaccataagctaacacttttctgggatgaaaaaaaaaaagaagtagaaagan

SEQ ID NO: 13283 - DNA, 690 bp, Homo sapiens
cgtccgggggccttgcttgcaaggccccacactctggctcttgttatctctttggcctcaaatcccactactcctttccttcctcgcgcagctccgctagcctcaaacttgctgtaagtatgtatctttcagggactatatattgacagttccctttgtgtgggcaactcagcttctagatttaagtgttgctgcctcacttctttcaaataacaccctctgtgtgaggctggttgtgaccccactggcattacaatcctgctcccttcctcacggccttcccactatatttttccctgctcctaaggatcctgcagtctatttggagagtgaaaacatatccttatgaaaaggaaagcaggaatggaatattatatggaatgtcagatgagtgtaattcaagtcagtatcagaagtgatagttcctggcttggtgccagatgttggaggcctgttgggccaatgacaggaatgtagactttattctggacagcagagaaccatacaaaatctcccctccctgctttggttctgattatgtcacaattctagcatctttcatgaaactagtttttgcactgagcatattagactcaaattatgtgtttatcttaataagtgcctagatgaatataaataaaatgaatataaatctaaatttacaattgacaaaatgatatactttagtgt

SEQ ID NO: 13284 - DNA, 259 bp, Homo sapiens
  misc_feature 1: n = A,T,C or G
nctccaccgcggtggcggccgaccgggcaggtaccacgatgtatagagcaacactggggtaaggtcactgtgggatggttgcctgctgagacctgtgcaaacgtaacacatgccaccatgccaaggatgtggcggaacaagcagccctaccaaggctgggcccccatggactttgtgcctgctgggagtttataggtctgtggggacataggatggccatatctgccagccaactagactggacattgtacctgcccgg

SEQ ID NO: 13285 - DNA, 583 bp, Homo sapiens
  misc_feature 1, 582, 583: n = A,T,C or G
nttctagaattaattaacgcgggaggaattttaagtttaggctgcatttaatccagattagcagttaacctacactatttggcatatgttctagattttttcagatacaaagctaattgttagggaagcccacaccccccccacccccttatttttttagaattgccattaattattgtaccacatctggtccatgcctacgggaaaaaaatggaatctggctttcatgtgaatacaaaggttacaaagtctatattttaccatcattaatactgaatattatatttcaataagaatctttagaattttaagagaaatttgagtattaaaaaaattatctaatatacccaattagaatcttttcacatgagactacagagaaagatttgtatttgtaacaaaaaattagctgggcatggtggcaggtgcctgtaatcccagctacttgggaggctgaggcaggagaatcgcttgaacccgggaggcggaggttgcagtgagccgagatcatgccattgcatttcagcctgggcaacaagagcgaaactctgtctcaaaaaaaaaaaaaataaaaaaaaaggnn

SEQ ID NO: 13286 - DNA, 698 bp, Homo sapiens
accagttgaccaaattttaccaaaaagcatttgacacaagaaataatagctcaggatgagggaaaagaaaaagattgagagatttgtgcccccaaccattttctcaaactctaagaaagaacacgctctctccaggcaggtctgaagctcaactctcttattgcctcacttcaggtatacctcactttacacaatagaattataactggaaagaagttggggacacatgtatttggtgattacattttaaacacattaggaaaagttgctatttgaactttttattgatttttggggggagtaaagaattattttgtgatgcaaataaatatcctttaattgatcgacttgccaaatttagatttgtgtgcatcaggctttcttttttttctttttttagagaagttcaatataagcttttcttttctttgtttctttctttctttattttgagatggagtcttgctctgtcgcccatgctggagtgcagtggcgcgatctcggctcactgcaacctccacctcctgggttcaagcgattctcttgcctcaacctcccaagcagttgggactacaggcgtgagccaccatgcccggctaatttttgtatttttagtagagacaaggtttcaccatgttagccaggctggtctcaaactcctgacctcaggcaatctgcccgcctgggtctcctaaagt

SEQ ID NO: 13287 - DNA, 234 bp, Homo sapiens
ccgggcaggtacgcggggacctagagtcagatgtattatccaaaggcctgcttctgaagcccctcttgcctcctctctctgcagccttcttgaaacacatcctaagcgtctgagtgctgcagatccagtggggtccggacactgggccccgcaggcgaaagcacgttccagccaccaggaggccacctattgtttcaaaataaagactgggttcctcaaaaaaaaaaaaaaagt

SEQ ID NO: 13288 - DNA, 2647 bp, Homo sapiens
  misc_feature 2640, 2641, 2642, 2643, 2644, 2645, 2646, 2647: n = A,T,C or G
cacgcgtccggtcgggccgtgggtatgagcgcttgtgtgcgctggggccaggtcgtgggtgcccccacccttcccccatcctcctcccttccccactccaccctcgtcggtcccccacccgcgctcgtacgtgcgcctccgccggcagctcctgactcatcgggggctccgggtcacatgcgcccgcgcggccctataggcgcctcctccgcccgccgcccgggagccgcagccgccgccgccactgccactcccgctctctcagcgccgccgtcgccaccgccaccgccaccgccactaccaccgtctgagtctgcagtcccgagatcccagccatcatgtccatagagaagatctgggcccgggagatcctggactcccgcgggaaccccacagtggaggtggatctctatactgccaaaggtcttttccgggctgcagtgcccagtggagcctctacgggcatctatgaggccctggagctgagggatggagacaaacagcgttacttaggcaaaggtgtcctgaaggcagtggaccacatcaactccaccatcgcgccagccctcatcagctcaggtctctctgtggtggagcaagagaaactggacaacctgatgctggagttggatgggactgagaacaaatccaagtttggggccaatgccatcctgggtgtgtctctggccgtgtgtaaggcaggggcagctgagcgggaactgcccctgtatcgccacattgctcagctggccgggaactcagacctcatcctgcctgtgccggccttcaacgtgatcaatggtggctctcatgctggcaacaagctggccatgcaggagttcatgatcctcccagtgggagctgagagctttcgggatgccatgcgactaggtgcagaggtctaccatacactcaagggagtcatcaaggacaaatacggcaaggatgccaccaatgtgggggatgaaggtggctttgcccccaatatcctggagaacagtgaagccttggagctggtgaaggaagccatcgacaaggctggctacacggaaaagatcgttattggcatggatgttgctgcctcagagttttatcgtgatggcaaatatgacttggacttcaagtctcccactgatccttcccgatacatcactggggaccagctgggggcactctaccaggactttgtcagggactatcctgtggtctccattgaggacccatttgaccaggatgattgggctgcctggtccaagttcacagccaatgtagggatccagattgtgggtgatgacctgacagtgaccaacccaaaacgtattgagcgggcagtggaagaaaaggcctgcaactgtctgctgctcaaggtcaaccagatcggctcggtcactgaagccatccaagcgtgcaagctggcccaggagaatggctggggggtcatggtgagtcatcgctcaggagagactgaggacacattcattgctgacctggtggtggggctgtgcacaggccagatcaagactggtgccccgtgccgttctgaacgtctggctaaatacaaccagctcatgagaattgaggaagagctgggggatgaagctcgctttgccggacataacttccgtaatcccagtgtgctgtgattcctctgcttgcctggagacgtggaacctctgtctcatcctcctggaaccttgctgtcctgatctgtgatagttcaccccctgagatcccctgagccccagggtgcccagaacttccctgattgacctgctccgctgctccttggcttacctgacctcttgctgtctctgctcgccctcctttctgtgccctactcattggggttccgcactttccacttcttcctttctctttctctcttccctcagaaactagaaatgtgaatgaggattattataaaagggggtccgtggaagaatgatcagcatctgtgatgggagcgtcagggttggtgtgctgaggtgttagagagggaccatgtgtcacttgtgctttgctcttgtcccacgtgtcttccactttgcatatgagccgtgaactgtgcatagtgctgggatggaggggagtgttgggcatgtgatcacgcctggctaataaggctttagtgtatttatttatttatttattttatttgtttttcattcatcccattaatcatttccccataactcaatggcctaaaactggcctgacttgggggaacgatgtgtctgtatttcatgtggctgtagatcccaagatgactggggtgggaggtcttgctagaatgggaagggtcatagaaagggccttgacatcagttcctttgtgtgtactcactgaagcctgcgttggtccagagcggaggctgtgtgcctgggggagttttcctctatacatctctccccaaccctaggttccctgttcttcctccagctgcaccagagcaacctctcactccccatgccacgttccacagttgccaccacctctgtggcattgaaatgagcacctccattaaagtctgaatcagtgcaaaaaaaaaaaaaaaaaaaaaatgaaccgcggggaggcaaaaaattccccgggggggcgccagttacgggccccagtttttgttgaaaagggggcccaaannnnnnnn

SEQ ID NO: 13289 - DNA, 360 bp, Homo sapiens
  misc_feature 1, 2, 3, 284, 360: n = A,T,C or G
nnngccctgcaacacctcctgcagccctggcttcgaaatcatgaagacccccggggagtgctgtaaaaagtgtgaacagacgcactgtatcatcaaacggcccgacaaccagcacgtcatcttgaagcccggggacttcaagagcgacccgaagaacaactgcacattcttcagctgcgtgaagatccacaaccagctcatctcgtccgcctccaacatcacctgccccaactttgatgacagcatttgcatcccgggctccatcacattcatgcccaatgganaaaacaaaaaaaaaatttttcttttatgagcccctcttgccccgctccacagtccccgtcaccacgaaggtttcgn

SEQ ID NO: 13290 - DNA, 4917 bp, Homo sapiens
  misc_feature 1, 2, 3, 4, 4901, 4902, 4903, 4904, 4905, 4906, 4907, 4908,4909, 4910, 4911, 4912, 4913, 4914, 4915, 4916, 4917: n = A,T,C or G
nnnngtagagaagcagccgataaaatagcattgcctgaagaagtttggaggctgagagcagcagtagactggccaactgcagagcaagttgtttctccagccgtgcggtgcagcctcatgcccccaacccagcttagccactgtaagaagacgttcactgtacagacgaccaaacttgccgtggaagagacagttgtgagattcccttgcaaatttacatacgagaatggcttgtgaaatcatgcctctgcaaagttcacaggaagatgaaagacctctgtcacctttctatttgagtgctcatgtaccccaagtcagcaatgtgtctgcaaccggagaactcttagaaagaaccatccgatcagctgtagaacaacatctttttgatgttaataactctggaggtcaaagttcagaggactcagaatctggaacactatcagcatcttctgccacatctgccagacagcgccgccgccagtccaaggagcaggatgaagttcgacatgggagagacaagggacttatcaacaaagaaaatactccttctgggttcaaccaccttgatgattgtattttgaatactcaggaagtcgaaaaggtacacaaaaatacttttggttgtgctggagaaaggagcaagcctaaacgtcagaaatccagtactaaactttctgagcttcatgacaatcaggacggtcttgtgaatatggaaagtctcaattccacacgatctcatgagagaactggacctgatgattttgaatggatgtctgatgaaaggaaaggaaatgaaaaagatggtggacacactcagcattttgagagccccacaatgaagatccaggagcatcccagcctatctgacaccaaacagcagagaaatcaagatgccggtgaccaggaggagagctttgtctccgaagtgccccagtcggacctgactgcattgtgtgatgaaaagaactgggaagagcctatccctgctttctcctcctggcagcgggagaacagtgactctgatgaagcccacctctcgccgcaggctgggcgcctgatccgtcagctgctggacgaagacagcgaccccatgctctctcctcggttctacgcttatgggcagagcaggcaatacctggatgacacagaagtgcctccttccccaccaaactcccattctttcatgaggcggcgaagctcctctctggggtcctatgatgatgagcaagaggacctgacacctgcccagctcacacgaaggattcagagccttaaaaagaagatccggaagtttgaagatagattcgaagaagagaagaagtacagaccttcccacagtgacaaagcagccaatccggaggttctgaaatggacaaatgaccttgccaaattccggagacaacttaaagaatcaaaactaaagatatctgaagaggacctaactcccaggatgcggcagcgaagcaacacactccccaagagttttggttcccaacttgagaaagaagatgagaagaagcaagagctggtggataaagcaataaagcccagtgttgaagccacattggaatctattcagaggaagctccaggagaagcgagcggaaagcagccgccctgaggacattaaggatatgaccaaagaccagattgctaatgagaaagtggctctgcagaaagctctgttatattatgaaagcattcatggacggccggtaacaaagaacgaacggcaggtgatgaagccactatacgacaggtaccggctggtcaaacagatcctctcccgagctaacaccatacccatcattggttccccctccagcaagcggagaagccctttgctgcagccaattatcgagggcgaaactgcttccttcttcaaggagataaaggaagaagaggaggggtcagaagacgatagcaatgtgaagccagacttcatggtcactctgaaaaccgatttcagtgcacgatgctttctggaccaattcgaagatgacgctgatggatttatttccccaatggatgataaaataccatcaaaatgcagccaggacacagggctttcaaatctccatgctgcctcaatacctgaactcctggaacacctccaggaaatgagagaagaaaagaaaaggattcgaaagaaacttcgggattttgaagacaactttttcagacagaatggaagaaatgtccagaaggaagaccgcactcctatggctgaagaatacagtgaatataagcacataaaggcgaaactgaggctcctggaggtgctcatcagcaagagagacactgattccaagtccatgtgaggggcatggccaagcacagggggctggcagctgcggtgagagtttactgtccccagagaaagtgcagctctggaaggcagccttggggctggccctgcaaagcatgcagcccttctgcctctagaccatttggcatcggctcctgtttccattgcctgccttagaaactggctggaagaagacaatgtgacctgacttaggcattttgtaattggaaagtcaagactgcagtatgtgcacatgcgcacgcgcatgcacgcacacacacacacagtagtggagctttcctaacactagcagagattaatcactacattagacaacactcatctacagagaatatacactgttcttccctggataactgagaaacaagagaccattctctgtctaactgtgataaaaacaagctcaggactttattctatagagcaaacttgctgtggagggccatgctctccttggacccagttaactgcaaacgtgcattggagccctatttgctgccgctgccattctagtgacctttccacagagctgcgccttcctcacgtgtgtgaaaggttttccccttcagccctcaggtagatggaagctgcatctgcccacgatggcagtgcagtcatcatcttcaggatgtttcttcaggacttcctcagctgacaaggaattttggtccctgcctaggaccgggtcatctgcagaggacagagagatggtaagcagctgtatgaatgctgattttaaaaccaggtcatgggagaagagcctggagattctttcctgaacactgactgcacttaccagtctgattttatcgtcaaacaccaagccaggctagcatgctcatggcaatctgtttggggctgttttgttgtggcactagccaaacataaaggggcttaagtcagcctgcatacagaggatcggggagagaaggggcctgtgttctcagcctcctgagtacttaccagagtttaatttttttaaaaaaaatctgcactaaaatccccaaactgacaggtaaatgtagccctcagagctcagcccaaggcagaatctaaatcacactattttcgagatcatgtataaaaagaaaaaaaagaagtcatgctgtgtggccaattataatttttttcaaagactttgtcacaaaactgtctatattagacattttggagggaccaggaaatgtaagacaccaaatcctccatctcttcagtgtgcctgatgtcacctcatgatttgctgttacttttttaactcctgcgccaaggacagtgggttctgtgtccacctttgtgctttgcgaggccgagcccaggcatctgctcgcctgccacggctgaccagagaaggtgcttcaggagctctgccttagacgacgtgttacagtatgaacacacagcagaggcaccctcgtatgttttgaaagttgccttctgaaagggcacagttttaaggaaaagaaaaagaatgtaaaactatactgacccgttttcagttttaaagggtcgtgagaaactggctggtccaatgggatttacagcaacattttccattgctgaagtgaggtagcagctctcttctgtcagctgaatgttaaggatggggaaaaagaatgcctttaagtttgctcttaatcgtatggaagcttgagctatgtgttggaagtgccctggttttaatccatacacaaagacggtacataatcctacaggtttaaatgtacataaaaatatagtttggaattctttgctctactgtttacattgcagattgctataatttcaaggagtgagattataaataaaatgatgcactttaggatgtttcctatttttgaaatctgaacatgaatcattcacatgaccaaaaattgtgtttttttaaaaatacatgtctagtctgtcctttaatagctctcttaaataagctatgatattaatcagatcattaccagttagcttttaaagcacatttgtttaagactatgtttttggaaaaatacgctacagaatttttttttaagctacaaataaatgagatgctactaattgttttggaatctgttgtttctgccaaaggtaaattaactaaagatttattcaggaatccccatttgaatttgtatgattcaataaaagaaaacaccaagtaagttatatatataaaataaattgtgtatgagatgttgtgttttcctttgtaatttccactaactaactaactaacttcttatattcttcatggaatggagcccagatgaaatgagaggaagcccttttcacactagatcttatttgaagaaatgtttgttagtcagtcagtcagtggtttctggctctgccgagggagatgtgttccccagcaaccatttctgcagcccagaatctcaaggcactagaggcggtgtcttaattaattggcttcacaaagacaaaatgctctggactgggatttttcctttgctgtgttgggaatatgtgtttattaattagcacatgccaacaaaataaatgtcaagagttatttcataagtgtaagtaaacttaagaattaaagagtgcagacttataannnnnnnnnnnnnnnnn

SEQ ID NO: 13291 - DNA, 519 bp, Homo sapiens
  misc_feature 444, 500, 506, 516, 517, 518, 519: n = A,T,C or G
accatcaagatggttttagtttaagtcagtctcctaagtatttatgaaacacccactcggttttcagtaagtgtggtgaactcggtgttttgcctctttccctgaacttagcggtaggttcggtattaagctgcagtgctgcagtgtggatggtgccctgcttagcagatattacagtgcttctgctgcttgttgagccttggcctgggggtgtttgagccaaatgcaaggagacctgtcctgaaggacgcccatgtcaatggagtcaggtggcagcagctggtacccctgcctttgggatactcccgtggtcaccctaacaagcagtgaccacaaacaagcacttcttgtgccaagccgcgcccctccctggccacactgacggaatgtagcttcatgaggtgcgcggttgctgtcacacactaagagagggaagaaactgangatggaggtaaggtcacagctctgggggccacaaaagccaaggttgggggacaagntctttngggcccctcnnnn

SEQ ID NO: 13292 - DNA, 1909 bp, Homo sapiens
gtgtgcacacaggctaaccttccttatctatgctgccgcggtgcgcctgtggaggttggtgggtctcgtgctcagggaggttgcgtgcactggtggcgcgcgccggtgggtggtctgcagagggggggcggtgcctcgttcgggcgcacagtcgacggctggttggacgtgggggcctgccgacagctgtggtggtgggactcccggtggcggtggcgcagtggcgccgtctgtgggtcggtgcgccttgtgggggcggccccgtggagtccgacctggcactggcgcagtgtgtgcggcgggatgggggtgatcgctctgctgggagtgcgtgtgaacagcttctagactccctgagtctgcgtgaggacgttgagtgcagaccgaggctggaggcgcgttcggcgagggttcgtccagacaggtataggttcgccgaaaagtgtgcaacggcgcttgtcctgagaatgggaaatattgagacatgcgatggtttaacgatgccatctgaagtgtgaggtgaggagtgtgcgcgggcgtaggtggggggggagtacgagggcaggcgtgcgtggtgtgtttttttaataaagtctctgccatcctctcccccgactcaggtcaaagttcatagcagcaatgcacaaagtcctctgtgaagccagtgttctctgctccccgggtcagaggtcacaggtcaagttcagtcagtccgaagaatcatgggcgggtgctcgctgtcctcatccaggcgcagggcgctggcctcgtcctccaggcaggcgccacccacagcacccaggtcgtctgtgtaggcaagtctcgttggggatgaaggcacgtaagtaccttttcctgcagctgcgccgtatgtctgagtgactaaggggcagtcgtgagaggcagagtccaagatctcattggtcgtttccagactgccgtccagccggtgctgcttcatcagggcacactcgccgccctcctgggggtccaggttgtacatgtacaggtacccgtcggcggcacccaccaacaaccgcgggatcttctgaattgtggctagcgagcagatgtttttgtggccgcagaatggcaggcggaccgtggcgaaggctctgccctggttgaacatttctgtcacttgggaaggcaggtagctggtggaggccatgagcactttcccgaagtacccggtccaggtggtgggctcctctgggggtttttctttcacagtctcgagtttgaagatgtgcacggtctcagtgttgctggaggcggagaggaacatgccgtccatgctgaaggccagggagcagatgctcacgcacctctttactcctctccgaaactcaaagagtttttgtccttctggaatggaaaataccctaatcacggtccccttctccgaagccgtggcaagtttagttccacttgcgtcaaaggccagtgccgctaaaggactgtcgtgagccggaatcatgtttgcagctctcaaattaatggtatcgaagacctgcacctctccgatggtcgcgctccctgggtacgccaagtagcagttgtcgttgttgattgacagcgcacacaggcctgcagggtttggaggcgtctccctgatcgtatgcagcaccttcatgtcccgaatgttgtggatgtacagggactcctccaggcatactatcagcctctgcctgttgagcttcacagccagaatcgtgttggagtagctgtagttgcagatctcagttcccttcttaaagtggcaaacctttagcttccttggtgctttaaggctcacgatggccactaggctgctggagaacaatctctctacaatgcacacatcttccgtatcggtgcattcatagatctgttccagcttatccacagaagaaagggagaaaaattt

SEQ ID NO: 13293 - DNA, 328 bp, Homo sapiens
  misc_feature 321, 322, 323, 324, 325, 326, 327, 328: n = A,T,C or G
actttgtgtagagatggggtttcaccatgttgcccaggctggtctcgaactcctgggctcaagcaatccgcccaccttggcctcccaaagtgctgagatttgtattgcctcctataacagcctactatggtaagatatctggcagagtcacaagccctcccagggttcacggccacctctctcagctgggggagtgccaaagccacaccgtgagagcaacactggatggcagacatcgctgtggccagctttgggaattacagtccgacatgctgactgccaaggaaatgggcctgctcattacttttcaaaaagaggaannnnnnnn

SEQ ID NO: 13294 - DNA, 1456 bp, Homo sapiens
  misc_feature 1452, 1453, 1454, 1455, 1456: n = A,T,C or G
accatagaccccctcccatactatggggactcccaggcactccacaagagctaggtgaaattgagttaaaatgacagctatagaccataggaaaaattgctcaaacaatttcagcctgggtaaatgagaggtgccccattagcttattctacccagttcaccctttctctccaggtgatcaagtgtggatcaaggattggaatgtagtccccttgtgaccacggtggaaagaccccagaccgtcatcttgaccacccccacagctgtaaaggttgaaggaatccaagcctggatccaccacagccatgtgaaacctgcagcctctgagacctggaaggtgagaccaagcccagacaacccctgcaaagtgactctgagaaggacgacaagccctgctgcagtcacacccagaagctgactcatctatgcacagccaaagcatgaggaaactcatcgtgggacttattctccttaaaatttggacttatgtaataaggacttccactgattttccccacatggaggactgttcccaatgtattcatcaggtcactgagtagggcaacaagttaaaacagtttctgttttatagttattattgttgcgggacaatcaaagatgggagagaccaaacaaagtgagttcaggaaaggtctttattaaaagatgatcacttggctcagtaggattagtgtacaggaaagtctgagccctggacaaagaaagcagccaccttttaagcagtcagtggctgggagctacgtgatgcaggaagcacatttacagaagcaagaacaaaggcagttgatcagtcttttacatttatctatactacatgttccaaatccttgggaaaccatgtttctgtataaaccttgtaactttgcagctgcacgggggaggtgaagcagaaactcgctgagcctcaaggaatgtgaaactagcaagtacagataaggctcaaatgtattacatgaatcattatcaatctgtcttgcaggaagacctaggtagtgaagatgaaagtgagaactcccactaataagtgagattctcaaaggggggaatgaggaaggagaccacctctcttattgtttcatacctcagaaaaagaaggaagaaataaaagttaaagaaggcaaaaatgagataaatagtcaggcagcctggccccgcaccccaggcctggtctgctaattaaatatcaacccctgacctaattgcttgtactatctatagattccagacattgtatgaggaagcattgtgaaacttcctgttctgttctgtcttaactaccaatgcatggggccccagccatgtaccccatgcttgctcaattgatcacaaccctttcacgtggacccccttagaactgtaagcccttaaaaggggcaggaatttccctcttggggagctcagtttttgagatgcaagtctgctgacgttccnnnnn

SEQ ID NO: 13295 - DNA, 3866 bp, Homo sapiens
  misc_feature 3866: n = A,T,C or G
cgcgtcccgagtccgtttgaggaagtccccgaggcgcacagagcaagcccacgcgagggcacctctggaggggagcgcctgcaggaccttgtaaagtcaaaaatgtcagaaacttccaggaccgcctttggaggcagaagagcagttccacccaataactctaatgcagcggaagatgacctgcccacagtggagcttcagggcgtggtgccccggggcgtcaacctgcaagagtttcttaatgtcacgagcgttcacctgttcaaggagagatgggacactaacaaggtggaccaccacactgacaagtatgaaaacaacaagctgattgtccgcagagggcagtctttctatgtgcagattgacttcagtcgtccatatgaccccagaagggatctcttcagggtggaatacgtcattggtcgctacccacaggagaacaagggaacctacatcccagtgcctatagtctcagagttacaaagtggaaagtggggggccaagattgtcatgagagaggacaggtctgtgcggctgtccatccagtcttcccccaaatgtattgtggggaaattccgcatgtatgttgctgtctggactccctatggcgtacttcgaaccagtcgaaacccagaaacagacacgtacattctcttcaatccttggtgtgaagatgatgctgtgtatctggacaatgagaaagaaagagaagagtatgtcctgaatgacatcggggtaattttttatggagaggtcaatgacatcaagaccagaagctggagctatggtcagtttgaagatggcatcctggacacttgcctgtatgtgatggacagagcacaaatggacctctctggaagagggaatcccatcaaagtcagccgtgtggggtctgcaatggtgaatgccaaagatgacgaaggtgtcctcgttggatcctgggacaatatctatgcctatggcgtccccccatcggcctggactggaagcgttgacattctattggaataccggagctctgagaatccagtccggtatggccaatgctgggtttttgctggtgtctttaacacatttttacgatgccttggaataccagcaagaattgttaccaattatttctctgcccatgataatgatgccaatttgcaaatggacatcttcctggaagaagatgggaacgtgaattccaaactcaccaaggattcagtgtggaactaccactgctggaatgaagcatggatgacaaggcctgaccttcctgttggatttggaggctggcaagctgtggacagcaccccccaggaaaatagcgatggcatgtatcggtgtggccccgcctcggttcaagccatcaagcacggccatgtctgcttccaatttgatgcaccttttgtttttgcagaggtcaacagcgacctcatttacattacagctaagaaagatggcactcatgtggtggaaaatgtggatgccacccacattgggaaattaattgtgaccaaacaaattggaggagatggcatgatggatattactgatacttacaaattccaagaaggtcaagaagaagagagattggccctagaaactgccctgatgtacggagctaaaaagcccctcaacacagaaggtgtcatgaaatcaaggtccaacgttgacatggactttgaagtggaaaatgctgtgctgggaaaagacttcaagctctccatcaccttccggaacaacagccacaaccgttacaccatcacagcttatctctcagccaacatcaccttctacaccggggtcccgaaggcagaattcaagaaggagacgttcgacgtgacgctggagcccttgtccttcaagaaagaggcggtgctgatccaagccggcgagtacatgggtcagctgctggaacaagcgtccctgcacttctttgtcacagctcgcatcaatgagaccagggatgttctggccaagcaaaagtccaccgtgctaaccatccctgagatcatcatcaaggtccgtggcactcaggtagttggttctgacatgactgtgacagttgagtttaccaatcctttaaaagaaaccctgcgaaatgtctgggtacacctggatggtcctggagtaacaagaccaatgaagaagatgttccgtgaaatccggcccaactccaccgtgcagtgggaagaagtgtgccggccctgggtctctgggcatcggaagctgatagccagcatgagcagtgactccctgagacatgtgtatggcgagctggacgtgcagattcaaagacgaccttccatgtgaatgcacaggaagctgagatgaaccctggcatttggcctcttgtagtcttggctaaggaaattctaacgcaaaaatagctcttgctttgacttaggtgtgaagacccagacaggactgcagagggccccagagtggagatcccacatatttcaaaaacatgcttttccaaacccaggctattcggcaaggaagttagtttttaatctctccaccttccaaagagtgctaagcattagctttaattaagctctcatagctcataagagtaacagtcatcatttatcatcacaaatggctacatctccaaatatcagtgggctctcttaccagggagatttgctcaatacctggcctcatttaaaacaagacttcagattccccactcagccttttgggaataatagcacatgatttgggctctagaattccagtcccctttctcggggtcaggttctaccctccatgtgagaatatttttcccaggactagagcacaacataatttttatttttggcaaagccagaaaaagatctttcattttgcacctgcagccaagcaaatgcctgccaaattttagatttaccttgttagaagaggtggccccatattaacaaattgcatttgtgggaaacttaaccacctacaaggagataagaaagcaggtgcaacactcaagtctattgaataatgtagttttgtgatgcattttatagaatgtgtcacactgtggcctgatcagcaggagccaatatcccttactttaaccctttctgggatgcaatactaggaagtaaagtgaagaatttatctctttagttagtgattatatttcacccatctctcaggaatcatctcctttgcagaatgatgcaggttcaggtcccctttcagagatataataagcccaacaagttgaagaagctggcggatctagtgaccagatatatagaaggactgcagccactgattctctcttgtccttcacatcacccatgttgagacctcagcttggcactcaggtgctgaagggtaatatggactcagccttgcaaatagccagtgctagttctgacccaaccacagaggatgctgacatcatttgtattatgttccaaggctactacagagaaggctgcctgctatgtatttgcaaggctgatttatggtcagaatttccctctgatatgtctagggtgtgatttaggtcagtagactgtgattcttagcaaaaaatgaacagtgataagtatactgggggcaaaatcagaatggaatgctctggtctatataaccacatttctaagcctttgagactgttcctgagccttcagcactaacctatgagggtgagctggtcccctctatatatacatcatacttaactttactaagtaatctcacagcatttgccaagtctcccaatatccaattttaaaatgaaatgcattttgctagacagttaaactggcttaacttagtatattattattaattacaatgtaatagaagcttaaaataaagttaaactgattataaatgaaaaaaaaaaaaaaagggcggccgcn

SEQ ID NO: 13296 - DNA, 2439 bp, Homo sapiens
  misc_feature 1, 2, 3, 4, 5, 6, 7, 8, 9, 10, 11, 2438, 2439: n = A,T,C or G
nnnnnnnnnnncctagccccgaggctttcaagtccatattcctggagtcccccctcctgagacccttaaccctgcatcctccgcaacagaagacccccagatgcacagccacacttccatctcaccctaataaaacccagacctttggattcctctcccttggaatgcccaaatccacaactttggggttgcattctcactccaagatcccaaatccaaagcccaagtgctcccctatgcaaatattcccaactcctttgttctacagcttatctgttgcccgctcctaaatccacagccctggggcacccctcctgaggtaccacagatttagtcgggaggtaccctctctgttcagcttccctggggtccccctcctcctcctttgctggttgtgtccaaagctaggtggggttcacggagaggatgtagttgggaggtgaaatgaggtgattttataaccagccaaagtccacccctttttttcaggcagtataaaggcaaaccaccccacccatcaccatctgtcatctcactctaccaccatgctggcctcagggatgcttctggtggccttgctggtctgcctgactgtgatggtcttgatgtctgtttggcagcagaggaagagcaaggggaagctgcctccgggacccaccccattgcccttcattggaaactacctgcagctgaacacagagcagatgtacaactccctcatgaagatcagtgagcgctatggccccgtgttcaccattcacttggggccccggcgggtcgtggtgctgtgtggacatgatgccgtcagggaggctctggtggaccaggctgaggagttcagcgggcgaggcgagcaagccaccttcgactgggtcttcaaaggctatggcgtggtattcagcaacggggagcgcgccaagcagctccggcgcttctccatcgccaccctgcgggacttcggggtgggcaagcgaggcatcgaggagcgcatccaggaggaggcgggcttcctcatcgacgccctccggggcactggcggcgccaatatcgatcccaccttcttcctgagccgcacagtctccaatgtcatcagctccattgtctttggggaccgctttgactataaggacaaagagttcctgtcactgttgcgcatgatgctaggaatcttccagttcacgtcaacctccacggggcagctctatgagatgttctcttcggtgatgaaacacctgccaggaccacagcaacaggcctttcagttgctgcaagggctggaggacttcatagccaagaaggtggagcacaaccagcgcacgctggatcccaattccccacgggacttcattgactcctttctcatccgcatgcaggaggaggagaagaaccccaacacggagttctacttgaaaaacctggtgatgaccacgttgaacctcttcattgggggcaccgagaccgtcagcaccaccctgcgctatggcttcttgctgctcatgaagcacccagaggtggaggccaaggtccatgaggagattgacagagtgatcggcaagaaccggcagcccaagtttgaggaccgggccaagatgccctacatggaggcagtgatccacgagatccaaagatttggagacgtgatccccatgagtttggcccgcagagtcaaaaaggacaccaagtttcgggatttcttcctccctaagggcaccgaagtgttccctatgctgggctccgtgctgagagaccccaggttcttctccaacccccaggacttcaatccccagcacttcctgaatgagaaggggcagtttaagaagagtgatgcttttgtgcccttttccatcggaaagcggaactgtttcggagaaggcctggccagaatggagctctttctcttcttcaccaccgtcatgcagaacttccgcctcaagtcctcccagtcacctaaggacattgacgtgtcccccaaacacgtgggctttgccacgatcccacgaaactacaccatgagcttcctgccccgctgagcgagggctgtgccggtgcaggtctggtgggcggggccagggaaaggcggggtcagggcggggttcgcggaagaggcgggtataagaatggggggaagatgcgggaaaggaaggggcgtggtggctagagggaagagaagaaacagaaggggctcagttcaccttgataaggtgcttccgagctgggatgagaggaaggaaacccttacattatgctatgaagagtagtaataatagcagctcttatttcctgaaaaaagtaaacttcttgcccaccattgcctatttgccttttctatgcttgggacttacctgctaaaggattctccctaactgggagagcattatgcctgtatagtcattatgacttcatttctccatggtatcataccttatcttacccgcacnn

SEQ ID NO: 13297 - DNA, 807 bp, Homo sapiens
  misc_feature 1, 2, 3, 4, 5, 6, 7, 8, 9, 10, 11, 12, 13, 14, 15, 16, 17,18, 19, 20, 21, 22, 23, 24, 25, 26, 27, 28, 29, 30, 31,32, 33, 34, 35, 36, 37, 38, 39, 40, 41, 42, 43, 45, 807: n = A,T,C or G
nnnnnnnnnnnnnnnnnnnnnnnnnnnnnnnnnnnnnnnnnnnantcggtaaaaagggtgtcttgctgtgtttcgcaggctggtcttgaactcctgggctcaagcgctcctctctcctgtcttaatgcatgtgtactagataaacatgcatgtaacgcaggacccatgttcactgagaggtgagatttcacatttacatgtaagacaattaggccctatatggccaaaggtgaggcgcggcccgggagtcactccagtcacatcctccatagaccagcagaaccagtccgtggccagtggtgtcttatcaggaggaagttatggaaagtgacgctgtagttatggccgtgaaatggggggtcagttagtgcctggcagcgagccatcactgtttccataccgcttgtctcaggccagtgcctgcttaactgctagaggaaaagaaaacccaagccttattctttaactgtaagggtgtgtgacttaaccccggcctggcacggccttaggtcctgattataactcggcgtcttattgccgcagagtctgtcagtctcgtgatctccactttaacactaatgttggtcagttgtgtttaaactgaaaaagggtggcagtataaccaggtgtgtccaacctcccatccttttatggccggaaactcaatttttaaggtttctctggggtccccttgaccaagagggagctcgttcagtcggcgggggacttaggattttattcttagtttacaacatcagtaataaaattaataggcaaatcaaagaatgggagatagtcacagtacan

SEQ ID NO: 13298 - DNA, 424 bp, Homo sapiens
  misc_feature 421, 422, 423, 424: n = A,T,C or G
cccacgcgtccggtttttcttttacttgattgtacttagaatattttcgttatttatttagcagagagttcacttggaaaaggaagatgatggcatatcgtggatatttctgttctgaaagaaataagttcaaggaaagaaaaagaagagtatgaatggaagattattcatccatcaatccattcttgccttctgtgcacacgcacatatacctatacattcatatataatgtgtactgtaatgtgtcagctactctctcaggaatgtttagaaatgaaacagttaacacaattttaaatgtagaagatcatgctgatgttttggaataacattcaaaaccaagttcttgatttctgtctcttcaccttccccaatatgttcggttctgcaagattacccgcttagtaaaaagcgagctcnnnn

SEQ ID NO: 13299 - DNA, 1478 bp, Homo sapiens
  misc_feature 1, 1472, 1473, 1474, 1475, 1476, 1477, 1478: n = A,T,C or G
ngagacgagtctcatctgtcacccaggctggagtgcaatggcatggtctcggctcactgcaacctccgcctcctgggttcaagctattctgcctcagcctcccaaggagccaggactacaggtgcatgccaccacgcccggctaatttttgtattttttagtagagacagggtttcacccagcacattgagacaagctggtttcaaactcctgaccttgtggtccgcccgccccggcctcccagagtgctgggattacaggcgtgagccaccgcgcccatctcccctgcaatgtctttagttagaccttttccaccatcatgtctaactgggctacggtttggggaaagtgtccaaattagtccgtgttatcctaaaaggggtgtgccccggattagcagggccagggctagggtgagacaaatgaggcacctggggcatacatttaagttggtgcttgcttgcaggtgccaagagagtgcttccttgggtttacccccgtggtgcctcctttacctcattctggccccagccctggggttagagtcgcaccagtgtggtccaagtggcataattatctccctaaatgcttgggcagcatcagctttcagtagctgtgccccatgggaggcacattaagctagtggcaagttgagactgcagacctcagcttaatatcagttgttgcccaagacagatctcaccccacatcttcatgacaggcctaacaacaaggcactttgcccttaatcctctactactgcctgctcttcattttgggccaactgtacagctcattttgagatagtagctgatcatttttctgatcagttaactttgtcttattaagcaaaatggagaatataatgttgggaaataagtgtgttgattaaaagaaagtatccccttctaccatcttccatttgtgtctgggttgtgctgggtaaagttctagacttactaacgcagacttcattttggtccggtttccacagcatgcctcgggcatcagtgtccaggagtagctgtatttgaggtttccttcactctggtaggttcctgattcctgatgaaaataacttgaaaaaaaaataattatactactgatcctcttttgggataatgaaattgcgaaggaatgttgttgattataacttttattttttaatgtacagatgtactgtctctcattgagcactgatagaatttatttttctttcaatagtttaaaatcacttatgtggagacacatacttaagtgtgttcaactcgttttcttcccacatatctagtgtgacctttaaaaaccacaactttattttggacattaaatgtgcaatattcactacttattcattgttccacatttttcatacttgtacaaagggtaagtttttatataatggtgagaaacaggaagaaatgacaactggttaagtaaaattctgcaaataaactagattcgaatttaannnnnnn

SEQ ID NO: 13300 - DNA, 996 bp, Homo sapiens
  misc_feature 1, 2, 989, 990, 991, 992, 993, 994, 995, 996: n = A,T,C or G
nnatcggagtccccgggaatgatgagcatggcggccaccaggtgcctgcgctggggcctgagccgagccggagtctggctgctcccaccgcccgcacggtgcccacgccgggcgctgcacaagcagaaagacggcactgagttcaagagcatctacagcctggacaagctctaccccgaatctcagggctcggacaccgcctggagggtcccgaatggtgcaaagcaagccgacagtgacatccctctagatcgcttgacaatatcttattgtcggagtagtggtcctggggggcagaatgtgaacaaagtgaattccaaggcagaagtcaggttccatttggcaactgccgagtggatcgcggagcccgtgcggcagaagatagccatcacgcataaaaacaagatcaacaggttaggagagttgatccttacctctgagagcagccgctatcagttccggaatctggcagattgcctgcagaaaattcgagacatgatcactgaggccagccagacaccgaaggagccaacaaaagaagatgttaaacttcatagaatcaggatagaaaacatgaatcgggaaaggctgagacaaaagagaattcattctgctgtaaagacaagcaggagggtcgacatggactgaaatcaccctctgcagctgggagggctcttctgggcgtccgggcagctgcagctgagaggactttcacaccataaggagatttctgtttttctttttggctgttaatgcttgtctataacattggagccatcacaagaatgttcatttggaatgaaggctgcaggcactggttgcagacgtctttataggcagtcaccatgttgtcaaaccttaataatgcacctcatgtattagtcacaataaaaatcagaactccaaaaaagaaaaccggctttttcggggcgacaagggtaagggcacgtccttttccgaccctttaaaggatgcgccctggtaatcannnnnnnn

SEQ ID NO: 13301 - DNA, 1028 bp, Homo sapiens
  misc_feature 993, 1006, 1025, 1026, 1027, 1028: n = A,T,C or G
acttttttttttttttttttttttttgagacggagtctctctctgttgcccgggctgtagtgcagtggcacgaccttggctcactgcaacctccgcctcccaggttcacgccattctcctgccttagcctccagagtagctgggactacaggcgcctgccaccacgcctggctaatttttttgtatttttagtagagacagggtttcaccgtgttagccaggatggtctcaatctcctgaccttgtgatctgcccatctcggcctcccaaaatgctggggttacaggcgtgagccaccgtgcccagccccaagatactgggcttttacaggggaatggccacatcgagggtcaagaaaattactgtaagtggtaggatttggcttatgataatgtgtgtgtatgtgcatatacccaagctcacaatacacatgccatttatcttgtagaattagaaaaacgacatgttttcctgaaaatgagggaaataaatgatcaacggggtaggaagagtggtggaaatattgtaacagatttgatcacagtcaagtgtgttttcttttcccagtccagaaaaaaactaagcttgacaaataaggaagttttccctttcctagtccaggataaactaagtcgtagactcaacagaacagtaaagtgtctgggataatgccatggagtctttggcataggttaaatatggttgaacatagctggatctgctccatgtgtctcacagtctgtctcagctatgtggtaataaatatatgaattctcaagtagtttctatcctagcttccttcgtgaaagctgatagtggttaggaaatttttttcccttatgatttacttgggtatatgaaaccagataggtcatgtcctattttctttcccagcaataggaagggtatgacgcacttccatcactaatagtgagtcacactagcaatatctgcacctagactgtgaatattacacccccgcgttaattaatnctagaagtacccncgaggggggggcccggtannnn

SEQ ID NO: 13302 - DNA, 1587 bp, Homo sapiens
  misc_feature 1388: n = A,T,C or G
gagtcgacccacgcgtccggcgaggggcgcgggccggtgtgggccgcagagacgttggagccggcgggggctggggactggcctcggggcgacttgaggtgtccctggccagtgtccttccacctgtccacaagcatggggaacatcttcgccaacctcttcaagggcctttttggcaaaaaagaaatgcgcatcctcatggtgggcctggatgctgcagggaagaccacgatcctctacaagcttaagctgggtgagatcgtgaccaccattcccaccataggcttcaacgtggaaaccgtggagtacaagaacatcagcttcactgtgtgggacgtgggtggccaggacaagatccggcccctgtggcgccactacttccagaacacacaaggcctgatcttcgtggtggacagcaatgacagagagcgtgtgaacgaggcccgtgaggagctcatgaggatgctggccgaggacgagctccgggatgctgtcctcctggtgttcgccaacaagcaggacctccccaacgccatgaatgcggccgagatcacagacaagctggggctgcactcactacgccacaggaactggtacattcaggccacctgcgccaccagcggcgacgggctctatgaaggactggactggctgtccaatcagctccggaaccagaagtgaacgcgacccccctccctctcactcctcttgccctctgctttactctcatgtggcaaacgtgcggctcgtggtgtgagtgccagaagctgcctccgtggtttggtcaccgtgtgcatcgcgccgtggctgtaaatgtgggcagacgcagcctgcggccaggctttttatttaatgtaaatagtttttgtttccaatgaggcagtttctggtactcctatgcaatattactcagctttttttattgtaacacaagaaaaatcaactcactgttcagtgctgagaggggatgtaggcccatggggcaccctgggcctccagggagtcgctggtgttgggagagccggcacgcccttggtttagagctgtgttgacaatccatttggtggtggttttttaacccaaactcagtgcatttttacacatggtcagacatccagttgaagtatcccttgagacccccgaagggcaacccccggcttagatagattgacagtacggcctgatgccattgcagccacatagtccccacgggaattaggaggtgtgtggcgcacacagacgacacacctgtcggtcacataaaagatcccaaaacacgttgtgtgtacccgtgcaatacaaagggtcgctccaggtgcacaggcaacaaggagagggtaaacaaacaacagtatgggggccaccaactggtcggtcagaggcgaggncgttcgagtagagtggagcacatcataatcatgtcgtgctgacagcttgactctgttcgcggtaaaatttattctgcttgttctgtcgaagtcgagcagtacaacgaagagacgtcagatcagacagagcgaatgaacacgcagtagcacgaacaagataacgaaacaaacgagccacacaaccagaacgaagaagaag

SEQ ID NO: 13303 - DNA, 2885 bp, Homo sapiens
  misc_feature 2747, 2756, 2885: n = A,T,C or G
gcgtccgggcgcccgctcctggctgcccgctcctcccggccctgcggcccccgcctgccctttaaaagagcggggcctgcgccggccgcgccacaccgcggggaccaggaggcacgctggttttccggggccgctccatcgcgccttcctcctgcgcctcgcttctccggtccagccgccatcttcctttccgcacaggggccgccgagcggggccatgcagccaacgctgcttctcagcctcctgggagccgtggggctggcggctgtcaattccatgccagtggataacaggaaccacaatgaaggaatggtgactcgctgcatcattgaggtcctctcaaatgccttgtcgaagtccagcgctccacccatcacccctgagtgccgccaagtcctgaagacgagtagaaaagacgtcaaagacaaagagacaactgaaaatgaaaacacaaagtttgaagtaagattgttaagagacccagctgatgcctcggaagcccacgagtcctccagcaggggagaggcaggagccccaggggaggaggacatccaaggcccaacaaaggcagacacagagaaatgggcagagggaggcgggcacagccgagagcgagcggatgagccccagtggagcctctatccctccgacagccaagtctctgaagaagtgaagacacgccattctgagaagagccagagagaggatgaggaggaggaggagggagagaactatcaaaaaggggagcgaggggaagatagcagtgaagagaaacaccttgaagagccaggagagacacaaaacgcttttctcaatgaaagaaagcaggcttcagctataaaaaaagaggagttagtggccagatcggaaacacatgctgccgggcattctcaggagaagacacatagccgagagaagagtagccaggagagtggagaggaggcagggagccaggagaatcacccccaggagtctaaaggccaaccccgaagccaggaagaatctgaggaaggtgaggaagatgccacctctgaggtggacaaacgacgcacgaggcccagacaccaccacgggaggagcaggcccgacaggtcctctcaaggagggagtcttccctctgaggaaaagggacacccccaggaggaatctgaggagtcaaacgtcagcatggccagtttaggggaaaagagggaccaccattcaacccactacagggcttcagaggaagaacctgaatatggagaagaaataaagggttatccaggcgtccaggcccctgaggacctggagtgggagcgctataggggcagaggaagtgaagaatacagggctccaagacctcagagtgaggagagttgggatgaggaggacaagagaaactaccccagcttagagcttgataagatggcacatggatatggtgaagaaagtgaggaagagaggggccttgagccgggaaagggacgccatcacagaggcaggggaggggagccacgtgcctatttcatgtctgacaccagagaagagaaaaggttcttgggtgaaggacaccaccgtgtccaagaaaaccagatggacaaggcaaggaggcatccacaaggtgcgtggaaagagctggacagaaattatctcaactacggtgaggaaggagccccagggaagtggcagcagcagggagacctgcaggacactaaagaaaacagggaggaagctaggtttcaagataaacaatatagctcccatcacacagctgaaaagaggaagagattaggggaactgttcaacccatactacgaccctctccagtggaagagcagccattttgaaagaagagacaacatgaatgacaattttctcgagggtgaggaggaaaatgagctgaccttgaacgagaagaatttcttcccagaatacaactatgactggtgggagaaaaagcccttctctgaggatgtgaactgggggtatgagaagagaaacctcgccagggtccccaagctggacctgaaaaggcaatatgacagggtggcccaactggaccagctccttcactacaggaagaagtcagctgagtttccagacttctatgattctgaggagccggtgagcacccaccaggaggcagaaaatgaaaaggacagggctgaccagacagtcctgacagaggacgagaaaaaagaactcgaaaacttggctgcaatggatttggaactacagaagatagctgagaaattcagccaaaggggctgactgtcattggagcggtgggcactgttaagaagcagccatcacatgatctgtttttcaccacttcactgaaagacaccatttatatacccaagggcagaaagtagaacttactattcattaaatgtttgacacaattggaattgtctttaatttctgtcagaatgctattgaaaatgtgaattgcatgacttgtagcatattcttttctgcaaaatagacatattaacatgcttatgacaatgactgtgctactgtctttggaaaaatgtttgtctcagttggaaataataaaagattcacctgagaaaaaaaaaaaaaaaaaaaaaaaaaactcgagggggggcccggtacccaattcgccctatagtgagtcgtattacaattcactggccgtcgttttacaacgtcgtgactgggaaaaccctggcgttacccaacttaatcgccttgcaggacatccccctttcgccagctggcgtaatagcgaagaggcccgnaccgatcgncctttcaacagttgcgcagcctgaatggcgaatggcaaaatgtaagcgtaaatatttgtaaaattcgcgtaaaattttgtaaatcagctcatttttaaccataggccgaatcgggaaatcccttataan

SEQ ID NO: 13304 - DNA, 1802 bp, Homo sapiens
  misc_feature 1765, 1783, 1798, 1799, 1800, 1801, 1802: n = A,T,C or G
acgcgggggccgggttccgggaaaaaggagctcctgctgccactgctcttccggagcctgcagcatggggcccctgccgcgcaccgtggagctcttctatgacgtgctgtccccctactcctggctgggcttcgagatcctgtgccggtatcagaatatctggaacatcaacctgcagttgcggcccagcctcataacagggatcatgaaagacagtggaaacaagcctccaggtctgcttccccgcaaaggactatacatggcaaatgacttaaagctcctgagacaccatctccagattcccatccacttccccaaggatttcttgtctgtgatgcttgaaaaaggaagtttgtctgccatgcgtttcctcaccgccgtgaacttggagcatccagagatgctggagaaagcgtcccgggagctgtggatgcgcgtctggtcaagggtgagtgtggggctctgggaatcctctgggaggaccttggatgactttctgaccttccccaggcacgttttcagggtcatgatcctgcccccgcccgggggatctactgtcctcccagtcacacccctctccccgcaccgccttcctgctgtcttctcttcttcccagaatgaagacatcaccgagccgcagagcatcctggcggctgcagagaaggctggtatgtctgcagaacaagcccagggacttctggaaaagatcgcaacgccaaaggtgaagaaccagctcaaggagaccactgaggcagcctgcagatacggagcctttgggctgcccatcaccgtggcccatgtggatggccaaacccacatgttatttggctctgaccggatggagctgctggcgcacctgctgggagagaagtggatgggccctatacctccagccgtgaatgccagactttaagattgcccggaggaagcaaactcttcgtataaaaaaagcaggccatctgcttaacccttggctccaccataaggcactgggactcggatttctctatctgatagaggtattttctgtggccctgggagctgtctgtctttcccctaccgatggactttgcaactaatcaagtttgggatttactgtcttctgaccaaccacagtgactgagatggggctgggaccagaagcccagtgggtgtgaacagccgagggaaccagagtctggctgagcttgtggccagatatttaaactgggtccagccacacctgcaaaaccagggcaaggcagtaccgggaaactggctggagttgctgcggtttggggaagttgcacaccctttcatagatacctcccttaaccctcagtgcagattctgagaaaactccaaggcttctctgcctaacctagtataacccctgttccctactacatacatattaacttttccatttcccccagtaattgacccaaagtccctgcctctagctgtgcccattgtgcaatgatcagaatcccttgtttcaatagtattttgacttctttaagaatactctgtatttggaagctgaaacctcacttggatccattgttgggaaccaagtacggagccttacatagcccggagagtttcaggagcaatgccactttcccttccatccctccctctgggtactgggctcttcccatagtccattttccccttttatctcccattaatttctgtcttcctctctcaccttttccatgtctctaggcatcctccaggggttttaaaatcatctttaacccaacttatctgtggaagtaangggcaaaaggaacatctncaaattaagggaacnnnnn

SEQ ID NO: 13305 - DNA, 1625 bp, Homo sapiens
  misc_feature 1, 2, 3, 4, 1625: n = A,T,C or G
nnnngagagattctcctgactcaacctcctgagtagctgggattacaggtgcctgccactatgcctagctaatttttgtatttttagtgtatacgggttcttcgaatgtgtggcagggtggtctcgaactcctgacctcaagtgatccacccgcatcggccccccaaagtgctgggattataggcgtgaaccaccgcgcctgtcccattgttgtgtaattttaataattagttttttaagtacttgattttatgggcacatttttgtgggatgattggagttaatcaaataaagcttgtcatgtgtgtagtttggtaagataacttctttaaattcatgttttctctgccttgaggtagtgagggaaagatcttaatcagtattttggtaattaactgattgaattcaagcaaatgagacatcatgaacttcagtggttattgatatttcagggtatatacctgaaatgcctagaggatacagatttctcatttcattctttggtctttcatttctctatatacagaaatgaaatgacacttctgggaggcagtagaagcaggaagtcaatgaattgagtagagggtcccattccctcaggctgtcattgatcagtgacaatttataaaaacaaactgcaaagtctgtggcaagtggctgcctgcttcctagaaggagcccatgaaggttaaactctgtggtcggtatttgcaagcgccgggcgtggtggctcacgcctgtaatcctagcaccttgggaggccaaggcaggcggatcacccgaggtcaggagtttgaggatttgcaagcaaaaggtcctctcctgagtctttcccagatacccagcagtgcagaggctagctgtggaaggttgcagtgggacaggaatgtattgtatgccttgccttacttgtcaccattgagatttccagagaaatgggcataacgtctcttaacaacaacagcagaaagcaaaatacattaacttaaggttgacaacaaaagattatcaagtaccatgttttccaaccaaccagttattcgtggtaataataaaataaaggtgggaaaatgttataatttttaaggaaactgtgtactttaaaaatcttctttatgaatatccaatgttactgtaatcctgctccattaaatgcagcattgttgtcaggtgctgcctcttgcttgggaacagcattgggcttttaaatgtctgcagaatctctgcgttcgaagggaattgagaatgaacttccctgggtactggtaatgaacaataaccggggtcctgctcaaccccaaaacaacaaagcaaacacacaaaaacaatatagaaaagacagacagacagggaaagcagcagaagcacacgcacgagggaaaaaacagtaccgaaaagggcaatggagaacaagagagaggcataacgacaaagcgatgtacaacatcgaaagaaagggcagacgaaacgacaaccaccaaacgaaaaaagacaatggaaaaacgaaaccacaacacagaggaggcaaacgtagcacgaacacaacagagacacaaaagagcaaacggcaagatagaagccagcaaagaaacgcaggaagacgagagagaggagagctaaaacgn

SEQ ID NO: 13306 - DNA, 4672 bp, Homo sapiens
tccgggctacatggatgtgatggagatggtttactatcgggaccttccgcatcctgctgatgttttgttgcttaggatatgaatggctgagcggaggctgtaaaacctggcactctgcttgggttatcaatactctggctgaccatcgtcatcgtgggactgactttggtggaagtccttggttacttatcattactgtgtttctgagaagttataaatttgccatctccctctgcacaagttacctttgtgtgtctttcctgaagactatcttcccgtctcaaaatggacatgatggatccacggatgtacagcagagagccaggaggtccaactgccgtagacaggaaggaattaaaattgtcctggaagacatctttactttatggagacaggtggaaaccaaagttcgagctaaaatccgtaagatgaaggtgacaacaaaagtcaaccgtcatgacaaaatcaatggaaagaggaagaccgccaaagaacatctgaggaaactaagcatgaaagaacgcgagcacggagaaaaggagaggcaggtgtcagaggcagaggaaaatgggaaattggatatgaaagaaatacacacctacatggaaatgtttcaacgtgcgcaagcgttgcggcggcgggcagaggactactacagatgcaaaatcaccccttctgcaagaaagcctctttgcaaccgggtcagaatggcggcagtggagcatcgtcattcttcaggattgccctactggccctacctcacagctgaaactttaaaaaacaggatgggccaccagccacctcctccaactcaacaacattctataattgataactccctgagcctcaagacaccttccgagtgtgtgctctatccccttccaccctcagcggatgataatctcaagacacctcccgagtgtctgctcactccccttccaccctcagctctaccctcagcggatgataatctcaagacacctgccgagtgcctgctctatccccttccaccctcagcggatgataatctcaagacacctcctgagtgtgtctgctcactccccttccaccctcagcggatgataatctcaagacacctcccgagtgtgtgctcactccccttccaccctcagcggatgataatctcaagacacctcccgagtgtgtgctcactccccttccaccctcagcggatgataatctcaagacacctcctgagtgtctgctcactccccttccaccctcagcggatgataatctcaagacacctcccgagtgtctgctcactccccttccaccctcagctctaccctcagctccaccctcagcggatgataatctcaagacacgtgccgagtgtctgctccatccccttccaccctcagcggatgataatctcaagacaccttccgagcgtcagctcactccccttccaccctcagctccaccctcagcagatgataatatcaagacacctgccgagcgtctgcgggggccgcttccaccctcagcggatgataatctcaagacaccttccgagcgtcagctcactccccttccaccctcagctccaccctcagcagatgataatatcaagacacctgccgagcgtctgcgggggccgcttccaccctcagcggatgataatctcaagacaccttccgagcgtcagctcactccccttccaccctcagctccaccctcagcagatgataatatcaagacacctgccgagcgtctgcgggggccgcttccaccctcagcggatgataatctcaagacaccttccgagcgtcagctcactgcccttccaccctcagcagatgataatatcaagacacctgccgagcgtctgcgggggccgcttccaccctcagcggatgataatctcaagacaccttccgagcgtcagctcactccccttccaccctcagctccaccctcagcagatgataatatcaagacacctgccgagcgtctgcgggggccgcttccaccctcagcggatgataatctcaagacaccttccgagcgtcagctcactccccttccaccctcagctccaccctcagcagatgataatatcaagacacctgccttccaccctcagcggatgatctcaagacaccttccgagcgtcagctcactccccttccaccctcagctccaccctcagcagatgataatatcaagatacctgctgagcgtctgcggattccgcttccaccatcagccgatgataatctcaagacaccttccgagcgtcagctcactccccttccaccctcagctccaccctcagcagatgataatatcaagacacctgctgagcgtctgcgggggccgcttccaccctgagcggatgataatctcaagacaccttccgagcgtcagctcactccccttccaccctcagctccaccctcagcagatgataatatcaagacacctgccgagcgtctgcgggggccgcttccaccctcagcggatgataatctcaagacaccttccgagcgtcagctcactccctttccaccctcagctccaccctcagcagatgataatatcaagacacctgccgagcgtctgcggggagcgtctgcgggggccgcttccaccctcagcggatgataagacaccttccgagcgtcagctcactccccttccaccctcagctccaccctcagcagatgataatatcaagacacctgccgagcgtctgcgggggccgcttccaccctcagcggatgataagacaccttccgagcgtcagctcactccccttccaccctcagctccaccctcagcagatgataatatcaagacacctgccgagcgtctgcgggggccgcttccaccctcagcagatgataatctcaagacaccttccgagcgtcagctcactccccttccaccctcagctccaccctcagcagatgataatatcaagacacctgccgagcgtctgcggggagcgtctgcgggggccgcttccaccctcagcggatgataagacaccttccgagcgtcagctcactccccttccaccctcagctccaccctcagcagatgataatatcaagacacctgccgagcgtctgcgggggccggttccaccctcagcggatgataatctcaagacaccttccgagcgtcagctcactccccttccaccctcagcttcaccctcagcagatgataatatcaagacacctgctgagcgtctgcggattccgcttccaccatcagccgatgataatctcaagacaccttccgagcgtcagctcactccccttccaccctcagctccaccctcagcagatgataatatcaagacacctgccttccaccctcagcggatgataatctcaagacaccttccgagcgtcagctcactccccttccaccctcagctccaccctcagcagatgataatatcaagacacctgccgagcgtctgcgggggccgcttccaccctcagcggatgataatctcaagacaccttccgagcgtcagctcactccccttccaccctcagctccaccctcagcagatgataatatcaagacacctgccttccaccctcagcggatgataatctcaagacaccttccgagcgtcagctcactccccttccaccctcagctccactctcagcagatgataatatcaagatacctgctgagcgtctgcggattccgcttccaccatcagccgatgataatctcaagacaccttccgaggcgtcagctcactccccttccaccctcagctccaccctcagcagatgataatatcaaggacaccggccgagcgtctggggggccgagtgtccacccgtcagcggatgataatctcaagacaccattccagagacggtcgagcgtgcacagcccgcatgccgaccactcaagcatccacccctcaagcagaatgataatatcacgaccacacggcgcgagcgtctgggggggcgccgcgttccacgccgtcagcggactgagcagaccctccaagagaccctctccgagcggtagccccgccgccagccccatggccgaccctccagcatcccaccccgtcaacccacgcacagactacactagtcagagaccgaccgtgcgcggaccagtctgcgcgaggccccggaagtctcccaacgcaccgcaggccggatgagtcacgcatgagagaacccaccccgccccgaggcaacagcgccgcggcatgccccttaggcgacccctcagaccctccgaccgtcaagcacgcaccgacacagaaactcagcggacgcccctgcagcggagcggccgcgggcgcgggcccggacatccaacccagtccgccggactgacccccaccccgccaggagccccacccccgaagccactccccgcaccacccgtgaagccaacactcggccctcgccccatcaacagatggcccagctcaccacgagcaccgccgggagcgtccgccgcgcaaaccgccaccgccggaacgccgcgtacgaccccgcacgcgcaccgcaccacccaaaagacacctgcccaaccgctacacccacaccccacctcccaccgctcagccaccacccccacccacacacaacacgcaaacaccgcgagacgcaacgggaacccaccaccaccgcgcacacccccaaga

SEQ ID NO: 13307 - DNA, 624 bp, Homo sapiens
  misc_feature 616, 617, 618, 619, 620, 621, 622, 623, 624: n = A,T,C or G
acgcggggcccaggtgtgttggcacatatctgtaatcccagttactcggaggctgaggcaggagaatggtgtgaacccaggaggcggagcttgcagtgagctgagattgtgccactgcactccagcctgggagacagagcaagactccgcctcaaaaaaaaaaaatgttcagggaatcacaagaaaatagagatagaaaattaaatgaaatttagaaagcaatccatgcatgtagtgagaaatttgacaaagaaatagaaacaagaaaacaaatagaaatcctatctataaacaatacagtaactgaactggaataactcattggaaagctttagcagcagacttaatcaaataaaagaattggtgagcttcaggacagaacatatgaaattacccattcagaggagcaagaataaaaaagggtaaagaagacctacaagaattgtggaataccatcaagcagactaacctctgcataatagggaatcctgaagatgaggaagaaaagggtgtagaaagcatacttaagcaaatcatggctgaaaaagtcccaaatctagagaaagatgacactgtctaggtacaggaagctcagtgatcagcaattaaaatcaannnnnnnnn

SEQ ID NO: 13308 - DNA, 513 bp, Homo sapiens
  misc_feature 511, 512, 513: n = A,T,C or G
actttttttttttttttttttttttttttggtagcgtcgcttctgtcctactttatttattggtcagggcaatcacaaagatgtgcataggctcaaagaaaagagacataaccccgaccacgcgatggaagaagtgacacggtcatgttatgagaggagtgtgtgggatgggagatagggctgtggccacctgcagaaaacagcatctgctacaggctgtcatggaagcgcaggatggggatttagcctacctgaggggtcagtcagcaaaggcctctgggaggaagtgagatcttcggctgaggatgtgaagggctaaaaggagaatgaggaagagtttcagggagaggaatcaatgaaacgagtccagagacgctggtgagttggatggtttgcttcagtatgatgactatacagtaggggcaatggagactggtgcaggtagtatagagagaaggtgccatgtgctctggctctgtcttctatgccgactccttccagcagaggagcnnn

SEQ ID NO: 13309 - DNA, 2525 bp, Homo sapiens
  misc_feature 1, 2523, 2524, 2525: n = A,T,C or G
nacccaagaagcagcaacgcccctcactataaattcggagctgcctcctcgccaatgattccagcgcctgacagccaggaccccaggcagcagcgagtgacaggacgtctggaccggcgcgccgctagcagctctgccgggccgcggcggtgatcgatggggagcggctggagcggacccagcgagtgagggcgcacagccgggacgccgaggcggcgggcgggagacccgcaccagcgcagccggccctcggcgggacgtgacgcagcgcccggggcgcgggtttgatatttgacaaattgatctaaaatggctgggtttttatctgaataactcactgatgccatcccagaaagtcggcaccaggtgtatttgatatagtgtttgcaacaaattcgacccaggtgatcaaaatgattctcaactcttctactgaagatggtattaaaagaatccaagatgattgtcccaaagctggaaggcataattacatatttgtcatgattcctactttatacagtatcatctttgtggtgggaatatttggaaacagcttggtggtgatagtcatttacttttatatgaagctgaagactgtggccagtgtttttcttttgaatttagcactggctgacttatgctttttactgactttgccactatgggctgtctacacagctatggaataccgctggccctttggcaattacctatgtaagattgcttcagccagcgtcagtttcaacctgtacgctagtgtgtttctactcacgtgtctcagcattgatcgatacctggctattgttcacccaatgaagtcccgccttcgacgcacaatgcttgtagccaaagtcacctgcatcatcatttggctgctggcaggcttggccagtttgccagctataatccatcgaaatgtatttttcattgagaacaccaatattacagtttgtgctttccattatgagtcccaaaattcaacccttccgatagggctgggcctgaccaaaaatatactgggtttcctgtttccttttctgatcattcttacaagttatactcttatttggaaggccctaaagaaggcttatgaaattcagaagaacaaaccaagaaatgatgatatttttaagataattatggcaattgtgcttttctttttcttttcctggattccccaccaaatattcacttttctggatgtattgattcaactaggcatcatacgtgactgtagaattgcagatattgtggacacggccatgcctatcaccatttgtatagcttattttaacaattgcctgaatcctcttttttatggctttctggggaaaaaatttaaaagatattttctccagcttctaaaatatattcccccaaaagccaaatcccactcaaacctttcaacaaaaatgagcacgctttcctaccgcccctcagataatgtaagctcatccaccaagaagcctgcaccatgttttgaggttgagtgacatgttcgaaacctgtccataaagtaattttgtgaaagaaggagcaagagaacattcctctgcagcacttcactaccaaatgagcattagctacttttcagaattgaaggagaaaatgcattatgtggactgaaccgacttttctaaagctctgaacaaaagcttttctttccttttgcaacaagacaaagcaaagccacattttgcattagacagatgacggctgctcgaagaacaatgtcagaaactcgatgaatgtgttgatttgagaaattttactgacagaaatgcaatctccctagcctgcttttgtcctgttattttttatttccacataaaggtatttagaatatattaaatcgttagaggagcaacaggagatgagagttccagattgttctgtccagtttccaaagggcagtaaagttttcgtgccggttttcagctattagcaactgtgctacacttgcacctggtactgcacattttgtacaaagatatgctaagcagtagtcgtcaagttgcagatctttttgtgaaattcaacctgtgtcttataggtttacactgccaaaacaatgcccgtaagatggcttatttgtataatggtgttactaaagtcacatataaaagttaaactacttgtaaaggtgctgcactggtcccaagtagtagtgtcttcctagtatattagtttgatttaatatctgagaagtgtatatagtttgtggtaaaaagattatatatcataaagtatgccttcctgtttaaaaaaagtatatattctacacatatatatatatgtatatctatatctctaaactgctgttaattgattaaaatctggcaaagttatatttactttaaaataaaataattttattgcaaaaaaaaaaaaaaaaaaagatctttaattaggcggccgaaaattttaaaacctgggggcggggccaggaagaaaggaagggcggaacggggaagggggtttccaaaaagggggccgggtgaacgagggtgggcgtaaggcgcnnn

SEQ ID NO: 13310 - DNA, 424 bp, Homo sapiens
actttttttttttttttttttttgagacggagtttcactcttattgcccaggctggagtgcaatggcgcgatctcggctcactgcaacctctgcctcctaggttcatgcgattctcctgcctcagcctccccagtagctgagattacaggtgcctgccaccacccccggccaattttctgtatttttagtagagacggggtttcatcatgttgaccagcctggtctcaaactcctggcctcaagtgatctgccctcctcagcctcccaaagtgctgggattacaataattttcactttcatggtgcttataatacactggatgatgtgaccaaggaagaattggacccaggtcataaatgatctaaatatggccttgagatgttttaatgttcttctatgaacatttataaggaggaattaagt

SEQ ID NO: 13311 - DNA, 556 bp, Homo sapiens
  misc_feature 556: n = A,T,C or G
acaaaccagcccaggttgtaaggactaaaataaatacctgctctttaatgcccaggcactgacaaacatccacaaacatcaagaccatccaggaaaatatgacctctctaaatgaaataaataaggaatcaggaaacaatcctggagaaacagaaatatgtgtgcttttagacaagaattcaaaatagctgtgttgagcaaactcaagataacacagagaagaaattcagaattctgttagataaatttaacaaggagattgaaataatgaagaatcaagcagaaattctggcatttaaaaatgcaattgacatatgtaagaatggatgagagtctcttaattcagaatttatcaagcagaaagaattagtgagcttgaagacaaactatttgaaaatacagtcagagaacacaaagaaatagaaaagaatgaagcacacctacgagatctaggaaatcgcctcaaaaggacaaatctaagagcaattggtttaaagtggaaatagagaaaaagatagggggagaaatctcattcaaagggataatcacagaggan

SEQ ID NO: 13312 - DNA, 515 bp, Homo sapiens
acttttttttttttttttttttggttaaagatctagcctgaaaatcccattacaaaaactgcctagaacacagtttacctttcttggaaagatgaagaaccaagttaatccagaatacactcaaatcccctggctcttgaaagtctcagttttcaacctgcttggagattgtttagacaaatctctaagtcttaactaaaattcattttcaggtattatattaagccaagataaatagaaagtgttggaggtcgtaaaaaaaaaaaaaaagacaaaataaacccactaccttcaagggttaacaactactaaaactatacttatggcccttcatcactgcatttgctaacccagctttccattaacaaaaaatgcctcatgaaatggacaccttggagaaaataagtgcaccccaataagtgcacaaagcagcttgactcttgctgatttccaggatgactgatgaaaatgggccatcagttgttggcattttcatacttcctttgacaacatgc

SEQ ID NO: 13313 - DNA, 655 bp, Homo sapiens
acgcgggcggggggtggaccacgccgccctccatccgtgctgcatgaaaaacattccacgtgccccttgtcgcgcgtctcccatcctgatcccagacccattccttagctatttatccctttcctggtttccgaaaggcaattatatctattatgtataagtaaatatattatatatggatgtgtgtgtgtgcgtgcgcgtgagtgtgtgagcgcttctgcagcctcggcctaggtcacgttggccctcaaagcgagccgttgaattggaaactgcttctagaaactctggctcagcctgtctcgggctgacccttttctgatcgtctcggcccctctgattgttcccgatggtctctctccctctgtcttttctcctccgcctgtgtccatctgaccgttttcacttgtctcctttctgactgtccctgccaatgctccagctgtcgtctgactctgggttcgttggggacatgagattttattttttgtgagtgagactgagggatcgtagatttttacaatctgtatctttgacaattctgggtgcgagtgtgagagtgtgagcagggcttgctcctgccaaccacaattcaatgaatccccgaccccctaccccatgctgtacttgtggttctctttttgtattttgcatc

SEQ ID NO: 13314 - DNA, 637 bp, Homo sapiens
acatatttgtgtaatgtaaacttgcttgtgttgatatgaaaacgtagtttgaaaactgtacgcggggattccccagaccttctgcagattctgtggttatactcactcctcatcccaaagaatgaaatttaccactctcctcttcttggcagctgtagcaggggccctggtctatgctgaagatgcctcctctgactcgacgggtgctgatcctgcccaggaagctgggacctctaagcctaatgaagagatctcaggtccagcagaaccagcttcacccccagagacaaccacaacagcccaggagacttcggcggcagcagttcaggggacagccaaggtcacctcaagcaggcaggaactaaaccccctgaaatccatagtggagaaaagtatcttactaacagaacaagcccttgcaaaagcaggaaaaggaatgcacggaggcgtgccaggtggaaaacaattcatcgaaaatggaagtgaatttgcacaaaaattactgaagaaattcagtctattaaaaccatgggcatgagaagctgaaaagaatgggatcattggacttaaagccttaaatacccttgtagcccagagctattaaaacgaaagcatacaaaaaaaaaaaaaaaaaagt

SEQ ID NO: 13315 - DNA, 495 bp, Homo sapiens
  misc_feature 494, 495: n = A,T,C or G
actttttttttttttttttttttttttttttttggcaatggggtctcaccctgtcacccaggctggagtgcagtggtgcattcatagctcactgcagctttgaactcctgggctcaagtgatcctcctacctcagcctcctgggtagctgggactacaggcacatgctactgtgcctagccaacattaacacttttaaaaaatgatcaaaacatgggaacctaaaggctcaacaatagaactcacaataaattccagtgtcaatataatggaaatttacataggcattagaagttttatttacaattaattgttggcaaattcttaacaaatattcataaaatcaagttgaaaaaacaaatgacaatcatttaaataataatctcagaatatttttgattaaaggagctatacaaattatatgtatgtacatacatgaaaagaaaatgagacattttaatagtaaaatatttccaaatgccataccagtagtann

SEQ ID NO: 13316 - DNA, 1113 bp, Homo sapiens
  misc_feature 414, 415, 416, 417, 418, 419, 420, 421, 422, 423, 424, 425,426, 427, 428, 429, 430, 431, 432, 433, 434, 435, 436, 437,438, 439, 440, 441, 442, 443, 444, 445, 446, 447, 448, 449,450, 451, 452, 453, 454, 455, 456, 457, 458, 459, 620: n = A,T,C or G
  misc_feature 626, 627, 628, 629, 630, 676, 683, 849, 975: n = A,T,C or G
ccctttcgagcggccgcccgggcaggtacgcgggaggctccaaacaggcatgcgaggtgcctttggaaagccccagggcactgtggccagggttcacattggccaagttatcatgtccatccgcaccaagctgcagaacaaggagcatgtgattgaggccctgcgcagggccaagttcaagtttcctggccgccagaagatccacatctcaaagaagtggggcttcaccaagttcaatgctgatgaatttgaagacatggtggctgaaaagcggctcatcccagatggctgtggggtcaagtacatccccagtcgtggccctctggacaagtggcgggccctgcactcatgagggcttccaatgtgctgcccccctcttaatactcaccaataaattctacttcctgtccaccnnnnnnnnnnnnnnnnnnnnnnnnnnnnnnnnnnnnnnnnnnnnnncccccccactttaaaaaatccgggcccccccgggtttaaaaaaataatttaaaatttttaaaaaccccaaagggggggggggggccccggacccaaattttttttccttttaaaaagggaaaaatgggcccccttggggaaaaaagggtttaacttgtttngggggnnnnnccccccccccgggaaaaaaagagggaaatcttttttctcgagaaanaattggnactaaaaaaattaattttgagaaaaccccaaaaagaagaataaaaaaagccggaaacaacacgatatgacaaaaaaacaaaaacataggcaggagggtacattgaagaaatatttatgtcacccgagattaaaggaatgacagaaaaaaagatagtcgaagcacancaaatttaaaggggaggacagggaaacaaacagtaaaaacgtaaaaatgaaaataaaatttaccaatatcgagaaataatgacaagaacgttaacgaaagaaagaatatcagactatacggatganaaaaaaagaaaaaatagttaaaagaataaaatagaacataacttgataaaaaaaaaaccataaaaaaagaaaatgaaaaaaacagatagagttaattaaactaaaaaataactaataatagaatgtgattatcttata

SEQ ID NO: 13317 - DNA, 1132 bp, Homo sapiens
  misc_feature 1, 2, 3, 4, 1129, 1130, 1131, 1132: n = A,T,C or G
nnnncgcggccgcgtcgacacggctgcgagaagacgccgagccagtagcggggctccggttcgtactcgttaactgcgaccggggttcagcgctcgggtgaggagctggtggcgtcggcaggttcgaggcgattcgagctccagctaggatgatcgaggttgtttgcaacgaccgtctggggaagaaggtccgcgttaaatgcaacacggatgataccatcggggaccttaagaagctgattgcagcccaaactggtacccgttggaacaagattgtcctgaagaagtggtacacgatttttaaggaccacgtgtctctgggggactatgaaatccacgatgggatgaacctggagctttattatcaatagatgagaatcctcatcttcctgccccgctttcctctcccatcctcatcccccacactgggatagatgcttgtttgtaaaaactcaccttaataaagacttagatgttaataaagaaaaaaaaaataaacaacaaaaaaaagaaaattggtgggcggctggggccctggaaaaagcttctaagaccatccgatggggccgacgaggccccagggcgcacaggggcacatgggcgcacaagcggatgccaaaggagacccgcggcacagcaacagggcaggggatccacacaaatatacaacgcgccagggggaacacccgagcgctctgggaaaaaatcccaggaggggccaccgcgagagcaccaaaacggggctcaaacaaaggcgatccccaagcgaagctcggaaatacaataagcgcccgacgtgtccaccgaacaccgacaaccgccactcacgaaccagacacgacaggaacaaaggtgaaaccaaggggccacacaagaaaacacaccacaagggacgcacccgccgcagcagcagagagcgagcgcgggggagatggagcggggaaggggcgaaaaccccgcgaagaatcgtgacagacacgacagggtgccgcaccgaccggaggccaaggcgagggcggaatactgagcggagagggaaaggcgaggcgagcagcaccgcagcagccgtgcaagccggaagcggagaagcgagacagaggcgcaagcgcgacacagcaacaggtggacnnnn

SEQ ID NO: 13318 - DNA, 858 bp, Homo sapiens
  misc_feature 830, 831, 832, 833, 834, 835, 836, 837, 838, 839, 840, 841,842, 843, 844, 845, 846, 847, 848, 849, 850, 851, 852, 853,854, 855, 856, 857, 858: n = A,T,C or G
gagagtgcatctatctctgtatttgtgcttttggtcttaatagtttgtaagccttatgtagagttttgataatatttcatggttttaggcctaggcagggattagattttatctcagattttgctaagagtatttcttctggagactagcaggctgctagtaagaattgatagaattggctctgtgtcactgggagaactggagttgaagggttacaggagatgagtcctggagaaggggaggcagggacaagggtgccaggaagctcaggggatgaaagggaaatggagagtccagtgagagaaggctggcgaggtgtagagagtggccagacacatgcctgacagttgggaccacttctctatacaaatcaggaggaggcgaggtaggcaggatagttcagagtttgtgggaaggaacctgacatctgaagtcagtggagtgtgtcttgggctgctgcctgcactctgccattcatagatcaggtcttctttttccttccccagaactgccctgagctgaaaccacctttcttctctccctatagcagtacatctaccccacctacaccctgcatccactccacagccccttgtcttcttcagtccctctttccctgatgaccacagacctctccaagctgggcactgttctatggtgcgttttgttaaagtctaagggaagtcctgtaggaagaggtagttgttactaaacttgaggaaacatgaaacaacatatagcccccaattcaaaaaacttactaaaatttattaaaagcatttgacattttagttaagtccctgttcataactactgttcccccataaaannnnnnnnnnnnnnnnnnnnnnnnnnnnn

SEQ ID NO: 13319 - DNA, 347 bp, Homo sapiens
acgcgggccaccgggcgcggtggcgcgtgcctgtagtcccaagtatctgagaccactgccatgagccatcatgctcagctaattttttttattttttataggatggggtctcactatgttgcccatgttgctcaggctgatctcaaactcctaggctcaagctaatcctcctgccttggcctcccaaagtgctggaattacaggcatgagccaccttgccccatctgaataaataggaaattaatgttcacttccagccctagactggaagctcctgagccccagtgctgtgtctgtttaggatctattgcttaacagattgatgaccctcacataggaagttcagt

SEQ ID NO: 13320 - DNA, 2048 bp, Homo sapiens
  misc_feature 1, 2, 3, 4, 2047, 2048: n = A,T,C or G
nnnngcggtcctttcctccgcagtgagccgatttgctctgccagcagctgtcggtgccgcgctcgacaccgagtcctagctaggcgctcacagaatacgcgctccctccctcccccttctctgtcccccgcctctcgctcaccccggcccactccagcggcgactttgagggattccctctctggcggcctctgcagcagcacagccggcctcattcggggcactgcgagtatggatctccaaggaagaggggtccccagcatcgacagacttcgagttctcctgatgttgttccatacaatggctcaaatcatggcagaacaagaagtggaaaatctctcaggcctttccactaaccctgaaaaagatatatttgtggtgcgggaaaatgggacgacgtgtctcatggcagagtttgcagccaaatttattgtaccttatgatgtgtgggccagcaactacgtagatctgatcacagaacaggccgatatcgcattgacccggggagctgaggtgaagggccgctgtggccacagccagtcggagctgcaagtgttctgggtggatcgcgcatatgcactcaaaatgctctttgtaaaggaaagccacaacatgtccaagggacctgaggcgacttggaggctgagcaaagtgcagtttgtctacgactcctcggagaaaacccacttcaaagacgcagtcagtgctgggaagcacacagccaactcgcaccacctctctgccttggtcacccccgctgggaagtcctatgagtgtcaagctcaacaaaccatttcactggcctctagtgatccgcagaagacggtcaccatgatcctgtctgcggtccacatccaaccttttgacattatctcagattttgtcttcagtgaagagcataaatgcccagtggatgagcgggagcaactggaagaaaccttgcccctgattttggggctcatcttgggcctcgtcatcatggtaacactcgcgatttaccacgtccaccacaaaatgactgccaaccaggtgcagatccctcgggacagatcccagtataagcacatgggctagaggccgttaggcaggcaccccctattcctgctcccccaactggatcaggtagaacaacaaaagcacttttccatcttgtacacgagatacaccaacatagctacaatcaaacaggcctgggtatctgaggcttgcttggcttgtgtccatgcttaaacccacggaagggggagactctttcggatttgtagggtgaaatggcaattattctctccatgctggggaggaggggaggagggtctcagacagctttcgtgctcatggtggcttggctttgactctccaaagagcaataaatgccacttggagctgtatctggccccaaagtttagggattgaaaacatgcttctttgaggaggaaacccctttaggttcagaagaatatggggtgctttgctcccttggacacagctggcttatcctatacagttgtcaatgcacacagaatacaacctcatgctccctgcagcaagacccctgaaagtgattcatgcttctggctggcattctgcatgtttagtgattgtcttgggaatgtttcactgctacccgcatccagcgactgcagcaccagaaaacgactaatgtaactatgcagagttgtttggacttcttcctgtgccaggtccaagtcgggggacctgaagaatcaatctgtgtgagtctgtttttcaaaatgaaataaaacacactattctctggccaaaaaaaaaataaattgaacaagaaaacaaagcttaaatggtgtctttggcgttcagaagagaaagaggaaaagattgagacggattttgcatgtttgcaagaggaaaaagtaaagacagggcacggaaaccaatgagggggaaggtggcttttctatggtgaaaaaaacatggatttttttgggcaaaataaatagttttattggcacctcttgacagtgggccctgcttctgagcgtcttgggcctgaggtggcattcactttggnn

SEQ ID NO: 13321 - DNA, 503 bp, Homo sapiens
  misc_feature 502, 503: n = A,T,C or G
actaaccagttgggttaaatttataatatattgtaactcataatatatcaaattggaaagttttgaaagaggcataaaacactttccttctcaagccaactttcttacttctttttccttcattcattgtgatacaagagtcccagttagtaacaccatcgatttcttttttttttttttggagaccgagtctcactctgttgcccaggctggagtgcaatggcatgatcttggctcactgcaacctccacctcctgggttcaagtgattctcctgcctcagcctcccgagtagctgggattacaagtgcccaccaccatgcctggctaatttttgtatttttagtagagatgggttttcaccatgttggccaggctggtctcaaactcctgacctcaggcaatctgcctgcctcggcctcccaaagtgctgggattataggcatgagccaccacgtccagcctcaacatcatgttcttaatattcatctatgctgacatgnn

SEQ ID NO: 13322 - DNA, 2326 bp, Homo sapiens
atagggagtcgacccacgcgtccggcctgaccacgctccatactgggagaggcttctgggtcaaaggaccagtctgcagagggatcctgtggctggaagcgaggaggctccacacggccgttgcagctaccgcagccaggatctgggcatccaggcacggccatgacccctccgaggctcttctgggtgtggctgctggttgcaggaacccaagcaccaggtatccccagtgatgatgacttggaggttcccgggggctcacctgggttcaggcgtgaacgatggtgacatgcggctggccgatgggggcgccaccaaccagggccgcgtggagatcttctacagaggccagtggggcactgtgtgtgacaacctgtgggacctgactgatgccagcgtcgtctgccgggccctgggcttcgagaacgccacccaggctctgggcagagctgccttcgggcaaggatcaggccccatcatgctggacgaggtccagtgcacgggaaccgaggcctcactggccgactgcaagtccctgggctggctgaagagcaactgcaggcacgagagagacgctggtgtggtctgcaccaatgaaaccaggagcacccacaccctggacctctccagggagctctcggaggcccttggccagatctttgacagccagcggggctgcgacctgtccatcagcgtgaatgtgcagggcgaggacgccctgggcttctgtggccacacggtcatcctgactgccaacctggaggcccaggccctgtggaaggagccgggcagcaatgtcaccatgagtgtggatgctgagtgtgtgcccatggtcagggaccttctcaggtacttctactcccgaaggattgacatcaccctgtcgtcagtcaagtgcttccacaagctggcctctgcctatggggccaggcagctgcagggctactgcgcaagcctctttgccatcctcctcccccaggacccctcgttccagatgcccctggacctgtatgcctatgcagtggccacaggggacgccctgctggagaagctctgcctacagttcctggcctggaacttcgaggccttgacgcaggccgaggcctggcccagtgtccccacagacctgctccaactgctgctgcccaggagcgacctggcggtgcccagcgagctggccctactgaaggccgtggacacctggagctggggggagcgtgcctcccatgaggaggtggagggcttggtggagaagatccgcttccccatgatgctccctgaggagctctttgagctgcagttcaacctgtccctgtactggagccacgaggccctgttccagaagaagactctgcaggccctggaattccacactgtgcccttccagttgctggcccggtacaaaggcctgaacctcaccgaggatacctacaagccccggatttacacctcgcccacctggagtgcctttgtgacagacagttcctggagtgcacggaagtcacaactggtctatcagtccagacgggggcctttggtcaaatattcttctgattacttccaagccccctctgactacagatactacccctaccagtccttccagactccacaacaccccagcttcctcttccaggacaagagggtgtcctggtccctggtctacctccccaccatccagagctgctggaactacggcttctcctgctcctcggacgagctccctgtcctgggcctcaccaagtctggcggctcagatcgcaccattgcctacgaaaacaaagccctgatgctctgcgaagggctcttcgtggcagacgtcaccgatttcgagggctggaaggctgcgattcccagtgccctggacaccaacagctcgaagagcacctcctccttcccctgcccggcagggcacttcaacggcttccgcacggtcatccgccccttctacctgaccaactcctcaggtgtggactagacggcgtggcccaagggtggtgagaaccggagaaccccaggacgccctcactgcaggctcccctcctcggcttccttcctctctgcaatgaccttcaacaaccggccaccagatgtcgccctactcacctgagcgctcagcttcaagaaattactggaaggcttccactagggtccaccaggagttctcccaccacctcaccagtttccaggtggtaagcaccaggacgccctcgaggttgctctgggatccccccacagcccctggtcagtctgcccttgtcactggtctgaggtcattaaaattacattgaggttcctaaaaaaaaaaaaaaaaggcgccgctaga

SEQ ID NO: 13323 - DNA, 2381 bp, Homo sapiens
  misc_feature 1, 2249, 2375, 2376, 2377, 2378, 2379, 2380, 2381: n = A,T,C or G
ncgaccacgcgtcccaaggcgccggcgatcgcggcctgaggctgctcccggacaagggcaacgagcgtttcgtttggacttctcgacttgagtgcccgcctccttcgccgccgcctctgcagtcctcagcgcagtctttccacaggagccagcatacttcctgaacatggagagtgttgttcgccgctgcccattcttatcccgagtcccccaggcctttctgcagaaagcaggcaaatctctgttgttctatgcccaaaactgccccaagatgatggaagttggggccaagccagcccctcgggcattgtccactgcagcagtacactaccaacagatcaaagaaacccctccggccagtgagaaagacaaaactgctaaggccaaggtccaacagactcctgatggatcccagcagagtccagatggcacacagcttccgtctggacaccccttgcctgccacaagccagggcactgcaagcaaatgccctttcctggcagcacagatgaatcagagaggcagcagtgtcttctgcaaagccagtcttgagcttcaggaggatgtgcaggaaatgaatgccgtgaggaaagaggttgctgaaacctcagcaggccccagtgtggttagtgtgaaaaccgatggaggggatcccagtggactgctgaagaacttccaggacatcatgcaaaagcaaagaccagaaagagtgtctcatcttcttcaagataacttgccaaaatctgtttccacttttcagtatgatcgtttctttgagaaaaaaattgatgagaaaaagaatgaccacacctatcgagtttttaaaactgtgaaccggcgagcacacatcttccccatggcagatgactattcagactccctcatcaccaaaaagcaagtgtcagtctggtgcagtaatgactacctaggaatgagtcgccacccacgggtgtgtggggcagttatggacactttgaaacaacatggtgctggggcaggtggtactagaaatatttctggaactagtaaattccatgtggacttagagcgggagctggcagacctccatgggaaagatgccgcactcttgttttcctcgtgctttgtggccaatgactcaaccctcttcaccctggctaagatgatgccaggctgtgagatttactctgattctgggaaccatgcctccatgatccaagggattcgaaacagccgagtgccaaagtacatcttccgccacaatgatgtcagccacctcagagaactgctgcaaagatctgacccctcagtccccaagattgtggcatttgaaactgtccattcaatggatggggcggtgtgcccactggaagagctgtgtgatgtggcccatgagtttggagcaatcaccttcgtggatgaggtccacgcagtggggctttatggggctcgaggcggagggattggggatcgggatggagtcatgccaaaaatggacatcatttctggaacacttggcaaagcctttggttgtgttggagggtacatcgccagcacgagttctctgattgacaccgtacggtcctatgctgctggcttcatcttcaccacctctctgccacccatgctgctggctggagccctggagtctgtgcggatcctgaagagcgctgagggacgggtgcttcgccgccagcaccagcgcaacgtcaaactcatgagacagatgctaatggatgccggcctccctgttgtccactgccccagccacatcatccctgtgcgggttgcagatgctgctaaaaacacagaagtctgtgatgaactaatgagcagacataacatctacgtgcaagcaatcaattaccctacggtgccccggggagaagagctcctacggattgcccccacccctcaccacacaccccagatgatgaactacttccttgagaatctgctagtcacatggaagcaagtggggctggaactgaagcctcattcctcagctgagtgcaacttctgcaggaggccactgcattttgaagtgatgagtgaaagagagaagtcctatttctcaggcttgagcaagttggtatctgctcaggcctgagcatgacctcaattatttcacttaaccccaggccattatcatatccagatggtcttcagagttgtctttatatgtgaattaagttatattaaattttaatctatagtaaaaacatagtcctggaaataaattcttgcttaaagactggaaaaaaaaaccnttgcgtacccaaactaattgccttggaagacatccccctttggcaagtggcgtataaccgaaaggccggaccgatcgccttccaacagttgccaacctgattggcaatggcaattgtagcgttaannnnnnn

SEQ ID NO: 13324 - DNA, 1008 bp, Homo sapiens
  misc_feature 1, 60, 70, 999, 1000, 1001, 1002, 1003, 1004, 1005, 1006,1007, 1008: n = A,T,C or G
nacgcgtccgtctgagggtggatgcggttactatgtggaaaagaagaaacggttctgcangatggtggtnggcgggggaaaagattttgtggtgaacacgctggagccatggaggaagaagatgctcggaaaagaatcctgtgtcctttagatccaaaacacacagtatatgaagatcaactagcaaggcatttgaaaaaatgtaactcaagagagaaaccaaaacctgatttctatattcaagatattaatgcaggcttaagagatgaaacagaaatacctgaacaattagttccaatttcttctctatctgaagagcagttggaaaagttaattaagaaattgagaaaagcaagtgaagcattacacgatgcacttaatgaccctaaaaatggcgattctgcaaccaagcacctgaaacagcaggtaacattgaaaatttaaagttacttggtccaagaagatgctttgttgagtttggagcgggaaagggaaaattatctcattgggttgatattgccttaaaagatgctgaaaaagttcacttcatcctagtggaaaaggtgaccacaagattcaaggtggatggaaaacacagaaagaaaaattcagtgtttgaaagacttcaaattgatattcaacacttgtgtttgaacaagattcctgtgctaagagaagaaaaactacctgtggtaggaattggaaagcatctgtgtggtatggcaacagacggagtctcgctctgtagtccagactggagtgcagtggcgcaatctcggctcactgcatcctgcggctcccggcttcaagcgattctactgcctcagcctcccgaattgctgggactacagactcgtgccaccacgcccggctaatttttgtatttttagtagagacgggatttcaccgtgttagccaggaaggtctccatctcctgacctcgtgatctgcccacctcagccggcgtgagctactgcgcctggcctgaaataacttaannnnnnnnnn

SEQ ID NO: 13325 - DNA, 729 bp, Homo sapiens
  misc_feature 721, 722, 723, 724, 725, 726, 727, 728, 729: n = A,T,C or G
atactttttgaaagtggcaggcagtattttattttaaactatgtattggttatgattctatcttagggccatgaaatgacaagcattggactgctacttggtgtttctgctgcaaaactaggcaccatggatatgtctattactcggcttcttagcattcgcattcctgctctcttacccccaacgtccacagagctggatgttcctcacaatgtccaagtggctgcagtggtttggcattggccttgtatatcaagggacagctcacagacattctgcagaagtcctgttggctgaaataggacggcctcctggtcctgaaatggaatactgcactgacagagagacatgctccttaactgctggcttggccctgggcatggtctgcttggggcatggcagcaatttgataggaaggagataccataaatgtggatgtgacttgtccaggtgctactctagctttggctatgatctacttaaaaaccaataacagtgtcttctaggaagcccagacacatggagaagttctgagtgttttggccgatagtcccagatgaggttccagcaacagctgggatcacccatgagatgtgagtgaggaaggctttgagatggtttcagccctagccaccactgacctcataagagaccacaagaatgagaatcacctggccaagcccagcagaccttcagaattcagaaataaaataattcatcnnnnnnnnn

SEQ ID NO: 13326 - DNA, 1309 bp, Homo sapiens
  misc_feature 1, 2, 1309: n = A,T,C or G
nncgaccacgcgtccgaggcaccgcccaacacggtctccgctcagggtgacccggaagcagttgcgccagcagcgtcgcgcggcccagttcccttttccggtcggcgtggtcttgcgagtggagtgtccgctgtgcccgggcctgcaccatgagcgtcccggccttcatcgacatcagtgaagaagatcaggctgctgagcttcgtgcttatctgaaatctaaaggagctgagatttcagaagagaactcggaaggtggacttcatgttgatttagctcaaattattgaagcctgtgatgtgtgtctgaaggaggatgataaagatgttgaaagtgtgatgaacagtgtggtatccctactcttgatcctggaaccagacaagcaagaagctttgattgaaagcctatgtgaaaagctggtcaaatttcgcgaaggtgaacgcccgtctctgagactgcagttgttaagcaaccttttccacgggatggataagaatactcctgtaagatacacagtgtattgcagccttattaaagtggcagcatcttgtggggccatccagtacatcccaactgagctggatcaagttagaaaatggatttctgactggaatctcaccactgaaaaaaagcacacccttttaagactactttatgaggcacttgtggattgtaagaagagtgatgctgcttcaaaagtcatggtggaattgctcggaagttacacagaggacaatgcttcccaggctcgagttgatgcccacggtgtattgtacgagcattgaagatccaatgcattcttttgaccccttctaaccaggcaatgccttcatttacctttggagggcatcgactaaccgcaggttttggcaaggcgagcttattcatgatctttaaccattttgtggggtgctaaattggcatcatatgtcaagttttatcagaataataaagactccatgtgtccactgggccggttacatgaacgatttgggcaatggcaccctccttttgggacgggcgcaccgacgggaatgcggcttggcgcacacggagagaccccttggtgcacaagtgcgcacaactccacttgcggcccggcttgtcaaccacgttatcggagcgccgaaaagataagtgagtcgagtgatgtgaaccgcacacaactgtgtcctatcaccgaccgtaacaaagcgaacagtacaatatcgtgactagacacgaaacacagcagttagtgcctgcttatgtaaatgagcataaccataatactcatccgcatgctatgatagtctatgtcaatctacgn

SEQ ID NO: 13327 - DNA, 2358 bp, Homo sapiens
  misc_feature 1, 2, 3, 2353, 2354, 2355, 2356, 2357, 2358: n = A,T,C or G
nnncagcaacctcggctgtatttattgatacaaggaagatcacccgagagtcagacgacgtggcggcgaggggccctggaaatctccagatacccaagctggaagggcgtggagtcttctcccgttctcctagtttacagatgttgtgacctaggctcaccatgggcctggggtctgaaagcgggacgtgggctgcgggggtcaaagagccggtttggtggaggtcagcgccacagcgcgccgtgccaggaagactttattctgcgcctccgtctgtctctgacgtttgagctcagagatgaggcgtccgtaggagttagccagagccacagtgtacgccatcaggatgctggagatcagcagaaggggcacagcaaaagcctgggtccccaggaagaagaggaaattctgggtggtctcagggaggctggaaatagactcagggatctgggcccagatggacgactgcccccggaatggaccacaaagcttagaaggcgggatcaggaagatgctgtaaagcaggggaacgctggagatggccagacccaggagaaggaccaaggggaaaaagaaattcgccgcggaggcccggaaggtgcgggcagccggggagcaggtggagaagagggtaagcttcttcaggtagaaaagcagcaggaacttgaccgtgttaagcaggggcagtaaagggcagaaaaaactccccacccagaccaccgtctgcgcgtagatgagccccagcacctcgtcgggcacctggaactcctgggtccccgccagacgacccagcgccccaggacagaggccacagaggagctttctaggaaactggatgagcagcgcgactgccaagacagtcagcagatcaaagagcagaagtttgtacatttcctggcccaggacagtctcccagcacggaagttgtttgtaattgtagccacaggttttgcagtcctcagcctcggagtcgcccccacaagtgatctgattccagagagagaagagcaggaccaccagggaggcgaggcgaagaaacacggtcctgagcaggataaaaacgatctggcgactccgagtgtagccctccagtggagcaatgagcttgaacacgggcggcagcacaaaattgaccccagcgatgaagatggacggaaggtaattcaccccaagcttcagcagtggcaactcctggacaaggggcatctcctgcagctccacggtgcaccccgtagcccagtagacgccatagaaggctgcccccaggagcgcgaccaccagcaggttgagcagcacccgcaccaaccaaaccctggcttgctggcccagcgtccgcaccgcagcctggcgccgcaccactgtctcctccagctccacctttaattcgtacaagatgatgcgctggcgcagccgcacgtggacgtccccgcagagaccgaagtcccaggccgagaacacccggtggctgtagctggtcagagcctcggactccgccagcagtgtctgcttcagcccagacaccgagcgatgcaggatgagcaggaggcagatgaggccaacggcaaaggcccagcacaggtaggtgaccgccaggcgtgggcggggcgggtagaagccatagaagagaggggaccattccaggtaaccctcacccgagagcaagttgaagagctgggtggcaaaggtgaccaggccctgggagtgggggttataggagccgcagggcgaggagatgtcggggccgggagggcctgggggagcgcctcccaaccaggtgggcagcagcgtcatgcaggccatgagcacagaggccagcacgttaagaaggagcaggaagcgcagcagggagaagtaggactccgtgccggcgccaaactggcccccgatcctcttcagtgtccacgcccagggctgcaggcttcgcaagccttcctttgttttctccttggacctccgaagtagccgcgcccatcggtccgtcttagttccagagccatagaccacctggtccctgctggcatttctttgcctgtgtgcccgtctggcctgcatgggccagggcagttcccgggaagggtgagggtcctgcagctctgtctgggtgacttctgtgaaggcctttctgctccttcctccatcctcctcctcctcctccagcgccccccaaggcagcaccccagggtctcggtaccgaagggtggcagcactgggcagctcgttcagcacagaagacagcgatgggcctcctctggcctcccggggggccagccactccctagaggagccccaggcttctgattccaaggtcgggttttcttccatggcccaggctgggctgtctctacggacgcgnnnnnn

SEQ ID NO: 13328 - DNA, 491 bp, Homo sapiens
  misc_feature 482, 483, 484, 485, 486, 487, 488, 489, 490, 491: n = A,T,C or G
acgcggacaaaaaatacaaaaattagccgggtgggacacgcctgtaatcccagctactcaagaggttgaggcaggagaatagcttgaacccgggaggcagaggttgcagtgagccgagatcacaccactgcactccagcctgggtgacagagcgaggctccgtctcaaaaaaaaaaaaaaaaaaaaaaaaacaaaaaaaattgttttagcgctgggtttcccaaggtgggagagacagacccagcctggagctggcccctggcctgtgtgctgacttcttggggtcctcaaaccactggatttttctgttgagcctgtacaaaccatgagcaacaatctccttaaagtggaaaagttattcctgatcgttccaccaagccagtagttttttctccaactcttatgttaaccgatgaaaaaaaggcttgtattaatgcaaaaactgctcttctaatggaaaaaaacaaaccagaaaaagaacnnnnnnnnnn

SEQ ID NO: 13329 - DNA, 1240 bp, Homo sapiens
  misc_feature 1, 2, 1235, 1236, 1237, 1238, 1239, 1240: n = A,T,C or G
nnacggtgacttgaaggagctgggaattaagacagatgggtccaggcagcagattctggcagcgatttctgaactgaacgcaggcaagggacgcgagagacaaattttacaggaaaccattcacaactttcactcttcctttgagagcagtgccagcaacaccagggcccctggcaacagcccctgtgcgtgatcctccttcccgcagccaccagcgtgagttcttctgaatcccgggaccccttcacgtggccacagccccagccctgcccccgtcacactgctgtgccttagttcatgttgttcccttttgctcggggatgcccacttcacgtcgacggcattcattggtagtacttcttgctgcaacaaacttcaacacacagagacagattcccatgtaacagtccagtgggggtgcttctgcttggcacgtggttcacacagtgatgcagggactcagctcctttcatcctgtgctctgccctccccgggagcctcagagttgcttctggctggcggcaagggaaagggacgatggagaaggcacggctgcttcttacctgccttgctcttaactgacacacatcactcctgctcacgtcctcttggccactggtagtcatgtggccccacctggatgcagaggaggccaggatgtgcagtctccacatagtggcttcccagcaacaacttttgacttagatggggggtatgtattatggtgagaggttagccttcctggcacatcttcccttaaaacttctaacttgcccctcctagtccaagtcacctctcagatgaagtcttttttgaccccctttcagccactgggtcccttagtgctgtgtatgtgactgctgtagcattccactgcacctgctgcatacagcttacattggagatgtgtatgtcaaacgcatttttctttattgcaaagagagtctattatgagaaggaaagaaagtgcgaggcctgctgtgttgggatccccttcttacttcctaaacttaagctccataatcgggaacggggagggtcagaacaaatgaaggatcctggtaccaaaagtgactaactgggatcagagggaatctgacagagaagtgtagaaaaagcgcgacggggcctggtaaaggccgggcccagattggacaagagtgtgctctgttttcttccttcttctccccaggagcggtatgacaaaactgaaagaggacgaaaccgtagggacnnnnnn

SEQ ID NO: 13330 - DNA, 525 bp, Homo sapiens
  misc_feature 524, 525: n = A,T,C or G
acgcaagagctcacccacctacctgacccaccactggcatttccagaacccaggcaagccacctggaaagagttggtctgcctggagtagctaacactggtgctagtatacatcaccttggtgcccaagaacgggcatgcccagcctactgtagccactgctgggacccgaagactggcccatgtatcccattccccaacaaaacttcaccacagcttccactaacaaccacatgctaagccactgagtaaatcacagacaaaaatgatgctgtttatagttgaagaaatcatacagcgattacactactgcacatgcccagaatcaaagccaaagcatcctacccaatgaacactatgcatacattttcaggaaaagtcctcccctatgaaagcaaattcaaaaaattggaaaaagcaactgttacacaagatgcacaaataccaatgtaagaacacaggaaacatgaaaagcaaggaactatgacacctccaaaacaacacaataattttccagcaacatann

SEQ ID NO: 13331 - DNA, 2154 bp, Homo sapiens
  misc_feature 1, 2, 3, 4, 5, 6, 7, 8, 9, 10, 11, 12, 13, 14, 15, 16, 17,18, 19, 20, 21, 22, 23, 24, 25, 26, 27, 28, 29, 30, 2154: n = A,T,C or G
nnnnnnnnnnnnnnnnnnnnnnnnnnnnnngtagaaaacatattcattgaaaagtgagtgtccattgcacatgactgtgcatatcaacaacatataatctggccacacccacccctctttagccatgccaagggtgagctgcagagttacaacagctgttttggattcttgtaagtgttcatgtcatcatcagtacgaggtccacttctcttcacttctgcttcttcacagttaacaaaccagggaagtgtgccttgtctttctccagataggttaaaaaggccgcaggaattcagagagtaaccaacttgtcactaatacagcctttttgccaggccaccagagcatttgaaaagatagttactactgctaagagtcatatcattgagcagaaccttgtacagtgaaacatttttatgtgtgtctttgaattctttaagcaaaggcagagcagtttggtactggaaatcacaacaaagaaaagcacattgcacattccctaactgccattattaaaataattacttcatttattggagtgtttcacattgccgggcactatcatgggtgctttacactcattgtcttattcagtcctcacattgctcctacaaagactataattttattatttcccttttgcagaagaaaacaaaaacaaactaagagtcagattaagtaagcacatagcacacgacagcagaaggtgagcccaggtttgtttgaatgcctctaaagcccatgctttttcctttgtacctccccacatgctccatctactttggttaggtagctccagcctctgccctgtgccaaggggctgaaagtctctgaagacctgatgacccagcttccagtcagatccttaccctgtctacttccagtccccccatgtggctgtgctggaagctctcggatatgccttgtcccagcttctacaggctgaggaagctccagagaagatcattccccctgcttctgccagcagctccatcttggcctccactctccctcagcacatgctacaaatgttgcaacctggcccaaagctcaaccctggggtcgctgtggagtttgcctggtgccttcattacatcatctgcagccaggtcagcaatcctctgctcattggccatggggctctgtctactctggggttgctgctgttggacttggctggggctgtccagaaaaccgaggatgcaggactggagctgctggcatgccccgtgcttcgatgtctaagcaacctgctaactgaggcagcagtggagactgtgggagggcaaatgcagctcagagatgagcgtgttgtggcagccttatttatccttctgcagttctttttccagaaacagcccagtctgctccctgagggcctttggctcctcaacaacctcactgcaaacagtcctagtttctgtacctccttgctctccctggatctgattgagcctctcttacagctgttgccagtatctaacgtggtgagcgtaatggtgctcacagttctgtgcaatgttgcagaaaagggtcctgcttactgccagcggctgtggccagggcccctgcttcccgccttgctgcacacactagccttttctgacactgaagtagtaggccagagtttggagctgctgcatctgctgttcctgtatcagccagaggctgttcaggtcttcctgcagcagtcagggctgcaagccctggaaaggcatcaggaagaggcccagctccaggatcgtgtgtatgctctccagcagacagctcttcaagggtgatcttgtttctcaatgtcactcattcccctctctcttaacatcaagcttgtttgtccagtagagcctttggagatttaggaccataatgaggtctcatgttctctgctcccacacctaagccaagacctttgggtcccagctcctccccttccactcagcactatccaggcaggaggaccaaaagggactcagtgtggtctacttactctggggccctagaatccctgcccccccgccacccttcatgtttgcttcagcagctggtagcttttgatgagacagaataaagttttatttttataaaaaaaaaaaatccgggtctttttcgggggggaaaggtataaaggcacttgtcttgttccgcgcctttgan

SEQ ID NO: 13332 - DNA, 396 bp, Homo sapiens
  misc_feature 393, 394, 395, 396: n = A,T,C or G
acaacaaataaccccaacactcagtagctaaaacaatgaacatttattatctcatagtttctgcaggacagttatctggaagacttagctggttagttatggtttaggatctttcaaaaagctactgctgtgtcagccacagctgcagtcatcaaggctcaactaggaaaggatcagcttacaagctcactcatgtgcctgttaccattcatgtgggcctcgctgaaggaatgcctttggcagctggcttctcccagagtgaatgatccaagacagagcaatagagaacacccaaaatggaagctacagattttgttgttgttgttgttgttgaagttgttgttgttttggacaaagtctcactttgcggcccaagctggagtgtggtggtannnn

SEQ ID NO: 13333 - DNA, 1384 bp, Homo sapiens
acatataaatactgacatcagcattctttttatagcacctctcttgtcattctctttttttatcccccctctctaatattcccccttttttcccaccagggcctttttttccccaattatacgccaattttccaacccttttccgccctttgcacttattcgaaatttgaaccgcgcttcaatgtccccgtcacgtggattgtcccgcaaatatgatacggtttaaactaaaatattctattggttcatacaacattttagaagaaagtagaaatacacatacccaccacatcagcattcagtcagaaaaaaatagttaagatgtaaaatactaggatgaggattagcataaaaagatgtagattccatgcaaaaactgacagcaaattaaagaaagtgtactggaaacaattcttttttggatttaaccttcctctactttccttatatttttcactaaaataaatgaataaatagacataaataaatgaataaatgtaggaagaaggtcatatttcaacactaattttagtaatgctttacataggagttcttataaaatatttacttaaaattcacaatttactagatgtagtcatatagatctaacacagcgcttagagacaaactttattggggccttaatggatttataggaatataaagttatacaacaagaacaggatgtcaccaaaagagttcactggttggctgctgcaggaccatctcacaggcattgtttgctttggtaagttcaccatgatccagggcatggccttaaatctcagaggtcttacaacccgatcttgcccatgtcttagaattcatcgaaattcaggaagtgaaatcgtgctgattacatcataagacttaaaaagcacaacttccaggttcaggacaccagaaaaagcagggtagcattgtaaataatcttcattgttttcaccaggtgaactattatatgaatgcaccagggaaatggagtcatactgcaatcactcaaagactggtttagggtgggagaaatttatttctctacttctccggaggaggagggtgcgacttcaggccggctgatgcaggaggaggtgcggagggtagagtggtactacctccgttgggagttccttccggataatcccaacgcggagcgaggaggcagcgcttttttttggaggcttggcttcccgtgcgtttccaggtgggagagtggatctcccggaggcacaaggttggtctcccataaggattacagaaacgggtcgtcagttttctccggtgggccctggcaaagccaagagacctgagatggcggcgagtcccctccaggcacagagctggcttcctcctgtttcgctcttaccgtatttcctgtatcccgcgt

SEQ ID NO: 13334 - DNA, 425 bp, Homo sapiens
  misc_feature 1, 2, 3, 4, 5, 6, 7, 373, 393, 395, 396, 397, 398, 399, 400,401, 402, 403, 404, 405, 406, 407, 408, 409, 410, 411, 412,413, 414, 415, 416, 417, 418, 419, 420, 421, 422, 423, 424,425: n = A,T,C or G
nnnnnnntttttttttttttttttttgagtaatattagagtcactgacaatgagaaaaatggaacagtggatttaaaacatgaaatggcccattaaatgggtcctgaacttgttttaaaactccagataatatagcttggctgtttctgtctttccaaaatgtcaaaatttgtctaggattaatggttctctaaatcaataggatttcatgtttataaatggtttacggttccactggttttaaaatgttatgagctcatgcattatcatcaacgctgagcctttactgaaatttactgacatttagtatggcattcagaccaaacatggaaggaggacagagcggaatccttccacaagggcatgggccccnggaaccgcagggggtccccnannnnnnnnnnnnnnnnnnnnnnnnnnnnnnn

SEQ ID NO: 13335 - DNA, 390 bp, Homo sapiens
  misc_feature 1, 390: n = A,T,C or G
nacttattttttttttctttttttttttcccggaatcgggttttacaatgaatgttaacttgcaccaggaggctaccttgggcccccagagccttcttaaaaccctggcaccctgccaggggagctccaactttgcagcccaaaaaaagtcatgttggcagcttatcaggagccagggagttacatggcgccctgggggtaataatattttccagaacgctcaagctaatagtcccatgatgggcgattgaaaggactgcaggtatgctcttccttgtccttagccttggaagtctcatccatcttttggcaaagggccacatcacacttctgcttgaccttcaatggcaaaattggggacaacttgcttttgttttactttacctaacn

SEQ ID NO: 13336 - DNA, 279 bp, Homo sapiens
  misc_feature 270, 271, 272, 273, 274, 275, 276, 277, 278, 279: n = A,T,C or G
accaagcaaaacacttgggttatgtcgtggctaaataaagaacccaggaggggctaattagccactttatataaagtaaaagtcacacctctagagcatcttttagggtagctgtgttagccaaggaggtgtttctctttggaggcttatgttatctcataaatctacagcttgaggaggaaagtttttcaccccttttttctggaagggtagagatatccctgaactatatgtggtattgacttgggggtgcaagcgcagggaagtgcnnnnnnnnnn

SEQ ID NO: 13337 - DNA, 1676 bp, Homo sapiens
  misc_feature 1670: n = A,T,C or G
cgtccgcccacgcgtccggcagcagggtcagaagggaggtggccggtctccgtcgtgacctctgacggtttctgagcgttggcctttggcacgcgctacacccttttgctttggttctgccatgccgatgtaccaggtaaagccctatcacgggggcggcgcgcctctccgtgtggagcttcccacctgcatgtaccggctccccaacgtgcacggcaggagctacggcccagcgccgggcgctggccacgtgcaggaagagtctaacctgtctctgcaagctcttgagtcccgccaagatgatattttaaaacgtctgtatgagttgaaagctgcagttgatggcctctccaagatgattcaaacaccagatgcagacttggatgtaaccaacataatccaagcggatgagcccacgactttaaccaccaatgcgctggacttgaattcagtgcttgggaaggattacggggcgctgaaagacatcgtgatcaacgcaaacccggcctcccctcccctctccctgcttgtgctgcacaggctgctctgtgagcacttcagggtcctgtccacggtgcacacgcactcctcggtcaagagcgtgcctgaaaaccttctcaagtgctttggagaacagaataaaaaacagccccgccaagactatcagctgggattcactttaatttggaagaatgtgccgaagacgcagatgaaattcagcatccagacgatgtgccccatcgaaggcgaagggaacattgcacgtttcttgttctctctgtttggccagaagcataatgctgtcaacgcaacccttatagatagctgggtagatattgcgatttttcagttaaaagagggaagcagtaaagaaaaagccgctgttttccgctccatgaactctgctcttgggaagagcccttggctcgctgggaatgaactcaccgtagcagacgtggtgctgtggtctgtactccagcagatcggaggctgcagtgtgacagtgccagccaatgtgccagaggtggatgaggtcttgtgaaaacctggctccttttaacacggccctcaagctccttaagtgaattgccgtaactgattttaaagggtttagattttaagaatggtgctctttcatgcctattatcagtaaggggacttgtattagagtcagagtctttttatttaggccagttgtcaagtgtcaataaaagcatcatgtaatttatggttttcattttatttaaaattcagcaaaatcatacgccatctaccgtgatgactgccaactccatggcagaccctttctgggattcaaaaaccaattcatcagatcgctgcctctgagggatgtacagattggctggggagctgagtgctacaataaaggaggaagtaccggggaacagtgcagggcaaaggcaggaaagagatctgagctgcctgggagatcatctgggggtgcggagtacaaagctttgcaagggtgtgggttttgggaatgacgctaaactgaaggtgggagagaacagataaaaaggttgggaagttgcacactgtacactgttaagaagttgagcttttatcttaggagggcagccaggaaggttttggcctcgtgcccgaattcttgggcctcgaggggcccaatttccccttaggtgagtccnttttaa

SEQ ID NO: 13338 - DNA, 898 bp, Homo sapiens
  misc_feature 1, 2, 3, 4, 5, 6, 7, 8, 9, 10, 11, 12, 13, 654: n = A,T,C or G
nnnnnnnnnnnnncggaagtcttctagaattaattaacgcgggggtggtaaagtattccttaggatgtcttagaggtgagaaatccctattgttgggggggttgaacctcacacaaacctccagtagtaagaaaaatattcagaactccccttttctttcttctcagggaaagaaacagtagctccactcctgccggtccctcccctaggggagagggaagcagaggagaaaacagcagcataggtggctggcaaagacaaaggaaagaccagtagaagagaaagaaaccaaaaacagcaagcgcagagccaaacagccaggcaggcaggccaaaggttaagtccctctccccagccctgcggtttgtgaaaaagagggtgggcaccggctccgggaggagagcagaggaggtgaaaaggcgtaattcttgcaatttgcggcaggcatatctgccaagcctctaggctagtgactgcccggggcccagactgcagccacgcaaatcccactcagcccaagaaaaaaaaaaaaaaaaaaaaaaagtaagaggggaaatcagggccaaaaaaaaaaaaaacagcagcgcggggtcgggggcggggccttgtacgcgtacaaggccccgcaggatggagctgggtcaaggaccaggnagccctgactcccagaggttgccaccggggagaagcagcggtcctccatccagaacctaggggctgaagcaaaggcttgccaggacccttgaagatgcttttggctcacctcatttcaccccacgctctgctggctggcagaggagaaggcagtcgtttcctctctgaagagtatattttccggattgccctctggttagggtgcccatataaatcaggagtaatatatgaccgcgtgtgcatg

SEQ ID NO: 13339 - DNA, 321 bp, Homo sapiens
acgcggggaggcgggtgcgctgggagcctgggccgggagccggattatcgcggaacacctgcccattaatcttgaccctgttaaaacaataactgcctatccagatatgccacacttctgcctgctgttggcaaccctcctggactaggctgctcttgttaatcacatggatgttgttccttaacgttgccagcatgaaagtgcttcagatggctttgagtcctaatcttgtggttctgttcactgaagataagcagcaattttttgattattttattttcctatggattgccaataggtctaaataacctccttagttgt

SEQ ID NO: 13340 - DNA, 537 bp, Homo sapiens
  misc_feature 531, 532, 533, 534, 535, 536, 537: n = A,T,C or G
actttttttttttttttttttttttttggttttttccagacacggagtcttgttctgccaccaggctggagtgcagcggcgcgatctcggctcactacaaccttcgactccgtggttcaagcaattctcctgcctcagcctcctgggtagctgggattacaggcacgtgccaccacgcccagctaattatttgtatttttaatagaaacagcgtttctccatgttggccaggatagtctcgatctcctgacctcatgatccgcccgcctcggcctcccaaagtgctgggattacaggcgtgagcccccacaccgggccaactggctgatgatttaagtgatctgggcaagaggtagacacacaaatttttaccagctctttgggtaagtctgaggttaaagactgttttctaaattaatcattcttaaagtgtggtccctggtttagcagcatcgccatcatttaggaactaattagaagtgaaaattatttgacctgcgctaaacatgctgaattagaaacgttggatannnnnnn

SEQ ID NO: 13341 - DNA, 588 bp, Homo sapiens
caccgcggtggcggccgaggtacttccttggtggtccagatactctggaagttgaaagtgtgtgtgaatggtctcaagccatgcggtgttgcttgtgtggatggtgacaagtcctgctggacggagtgggtgggtgctacctgtggttccatggccacctcatacagcttagggcagatcctgacgtgggtttatatcagcatgccaatgctaagaggagcctaaatttccattagggaagcagccaggtaggacgaagtgagtgaagagtgtaagaaagctccaggggtgggggaagaggagttaagatcctccccagggaaaatgaaacctcaagtgcgtgaggttaggaatttaagcaagctagggaaaaacaggatagacaagaagtctctagaattaagaagttgagtctacccagcattcagtatgggaaatgtttctagtaaattgggagcgaagaaagatgcaagtgatcaaattccccctaataaatcctttagggtttatgttaaagattgggaagataatgaaacacctaaattcaaaaagaagtagtagatgattaagtattgttgcttcatttga

SEQ ID NO: 13342 - DNA, 1420 bp, Homo sapiens
  misc_feature 1393, 1400, 1417: n = A,T,C or G
gggcgaattggagctccccgcggtggcggccgaggtacactgcccaggcaaagcgtccgggcagcgtaggcgggcgactcagatcccagccagtggacttagcccctgtttgctcctccgataactggggtgaccttggttaatattcaccagcagcctcccccgttgcccctctggatccactgcttaaatacggacgaggacagggccctgtctcctcagcttcaggcaccaccactgacctgggacagtgaatcgacaatgccgtcttctgtctcgtggggcatcctcctgctggcaggcctgtgctgcctggtccctgtccccctggctgaggatccccagggagatgctgcccagaagacagatacatcccaccatgatcaggatcacccaaccttcaacaagatcacccccaacctggctgagttcgccttcagcctataccgccagctggcacaccagtccaacagcaccaatatcttcttctccccagtgagcatcgctacagcctttgtaatgctctccctggagaccaaggctgacactcacgatgaaatcctggagggcctgaatttcaacctcacggagattccggaggctcagatccatgaaggcttccaggaactcctccgtaccctcaaccagccagacagccagctccagctgaccaccggcaatggcctgttcctcagcgagggcctgaagctagtggataagtttttggaggatgttaaaaagttgtaccactcagaagccttcactgtcaacttcggggacaccgaagaggccaagaaacagatcaacgattacgtggagaagggtactcaagggaattacatcttctttaaaggcaaatgggagagaccctttgaagtcaaggacaccgaggaagaggacttccacgtggaccaggtgaccaccgtgaaggtgcctatgatgaagcgtttaggcatgtttaacatccagcactgtaagaagctgtccagctgggtgctgctgatgaaatacctgggcaatgccaccgccatcttcttcctgcctgatgaggggaaactacagcacctgggaaaatgaactcacccacgatatcatcaccaagttcctgggaaaatgaagacagaaggtcttgcccagcttacatttacccaaactgtccattactgggaacctatgatcttgaaggaggcgtcctgggggtcaactggggcattcacttaaggtctttcagcaattgggggcttgacctcttccggggttcacagagggagggcacccctggaaggtttttccaagggccgttgcattaaggctgtgcttgaaccattcgacgagtaaaggggattgaaggtggttgggggcctgtttttagagggccttaccctgtctattnccccccnaggttcaagtttaacanacc

SEQ ID NO: 13343 - DNA, 457 bp, Homo sapiens
acttaaaagctaaggattttggactataccctttaaagtgatacgaagagaatgtgacataggcaaatgattaaggaagattaatatagaagttaatggccggatgtggtggctcacgcctgtggtcccagcactttgggaggccaaggcgaatgggtcacctgaggtcaggagtttgagaccagcctgaccagcatggtgaaaccccatatctactaaaaatacaaagttaactgggtgtggtggcacaaactccgttttaaaaaaaaaattcagagtatgtagactctggaggaagtctgggtgggatgtaatgaggacctgctagaatttggatcactttcaattgaagtcagggtattgtgcataatagaaagtattggactgagatatttggttaccatggaggccaatgcttttttcatcttattaaatgtgatgtgacttttttctttgt

SEQ ID NO: 13344 - DNA, 1551 bp, Homo sapiens
  misc_feature 1, 2, 3, 4, 5, 1550, 1551: n = A,T,C or G
nnnnnaacattgttgtcaaacggccagctctcctttgcccttttatctacctttaaaggctgtctccccagttataacccccctttttttttttcccccaaccgagcccaaactcatgttctcaactttattccccatcccagtggtggctcttctgtacagtggagaaagaagggggaccccaccagggctatggagagacagtagaggcaggactgaaccgtcagcaaagattaaaaggatgacctgaggctggcaaccacaaaaccaagaagccagcgggggctgccccttccaagtctcaccaatgacccagagcaggttccagagcccaaaggcccaaaagtgcaattcccaaaagccaaggtctgggagccatcaaggagctcccagagatccagcgacgctcagagggcaagggtgtctttgatgagcctgcgcatggtggtggtgactgaggtgcccagggcatcagtgatctggaaggagatcttgtacaggtagggctgcacgtcccgcaagcctgtgtcaaacacgttatccacctccgactgtgtgggcatcttgggcaagtactcatgccgattcatcacctccacgatgttgatgatcttctcgcagagtttctcacccaccttctcccggcagatctgccgctcctgctccgtggccagggctaccacatgcaccttgaccgtccacacttcccatgggatgcactcgtctgagaatggccagcgagacttcttcttctggtagaactccaaggacatctgccccagcccatcgccaccagagttgcgcagtgcatccttgaactccccaacaaccttgcgcagggcacgatccagttcctcagaagagacacgcacataagtgaagtcgatgaagtcacagtcaacatcctgggtgcccacggtgccaatggagtaggtgccctccttcttgtagtggaacttgcctgtgctgcggtgcagaagcaccgtgtgcagcacagccagcatggcctcctccacctgccgcccctccaccgacacctccagcacctccgagcgacagttcatcctgcacccagtaacccacaccaaggtgtggaactaggataaagacaggggatcttcaccctacccaagggccacccttgagtgtagagtttggagcacggattcctcaagctcggctcatgcccttcctcctcctcctcacgccctggtgcgacctccgcaggtacgcttcaacctccgcacggcgctgagccacaagagaccagctccacagtccacgtaaccagggaggaacggactcctcgggtgtctcgggggcggcgccccgcgcccaggctggctggactcggaagctggaggagcgcccgcgttccactgccccgggggatgcccacgccggcacaggagagggggcacacggttaaaacagctcccacctcccccaaccacagtccacgaccagcctctcagatgccaccactctcccggcaggctccagaccacctgggtcggaggctgagccgggacccgtggtcgactccctann

SEQ ID NO: 13345 - DNA, 852 bp, Homo sapiens
gcgtccgcctccacccccagctggagggtgtgagcctgcccgccgagaggaagccagttacagaatcacaccctccacccccagctggagatggaaggaggatgctcaccgcccattcctcatgcaggccatcgatggaaatgtcagacagtgcgagtccacgcctgaacacttctggggtccgctctgggactgacactggcagatccatcggtgagctcccgcctgccacctctgggcctgcattgcggtgatagggccaagggcctgggccttcaattctccagacttgccaaaatgctcagcgcaggcctcgtcggcaactgcagacaagcagaggcagcacctgggctctgcctgtgcctggcacagtgaagcgagggtgggggcaggaatgagggtcctctccatgccaaggggggaagatagaagaacaaaatttcacctaaaggtagtgtctttagaccgtgcaatgttgtgctcctgttagtctgatatcaggggcttccagcttggcaaaggaaaaaaaacaggttgaggcacatgatagaagacaggcagggatgccacaatcataaccatggcaaagaccaggatcagaaaggcccaccatctctgaccccaaatccctgggcagatggttccagaactcagaattttcccagttgtagaaagatggggccaggtgatccgcctgccttggcctgcgataaaattgcacagaagtaaatacacacacgtgaggatacggaaaaccggggaaacctgagcaagagcagtcagaccccggctgtgatggcgcccagtagttctgcgagatgttaccattggggaaactgagtgaaggcgggt

SEQ ID NO: 13346 - DNA, 1255 bp, Homo sapiens
  misc_feature 1, 2, 3, 4, 5, 6, 7, 8, 9, 10, 1253, 1254, 1255: n = A,T,C or G
nnnnnnnnnnccatgttgaccatgactatttagaagtcctggagcagcaaacatagatggagagtttgagggctttcgcagaaatgctgtgattctgttttaagtccataccttgtaaataagtgccttacgtgagtgtgtcatcaatcagaacctaagcacagcagtaaactatggggaaaaaaaaagaagaagaaaaagaaactcagggatcactgggagaagccatggcattatcttcaggcaatttagtctgtcccaaataaaataaatccttgcatgtaaatcattcaagggttatagtaatatttcatatactgaaaagtgtctcataggagtcctcttgcacatctaaaaaggctgaacatttaagtatcccgaattttcttgaattgctttccctatagattaattacaattggatttcatcatttaaaaaccatacttgtatatgtagttataatatgtaaggaatacattgtttataaccagtatgtacttcaaaaatgtgtattgtcaaacatacctaactttcttgcaataaatgcaaaagaaactggaacttgacaattataaatagtaatagtgaagaaaaaatagaaaggttgcaattatataggccatgggtggctcaaaactttgaacatttgagcttaaacaaatgccactctcatgcattctaaattaaaaagttaaaatgattaatagttcaggtggaagaaataagcatactttttgggttttctacacattttgtgtagacaattttaatgtcagtgctgctgtgaactaaagtatgtcatttatgctcaaagtttaattcttcttcttgggatattttaaaaatgctactgagattctgctgtaaatatgactagagaatatattgggtttgctttatttcataggcttaattctttgtaaatctgaatgaccataatagaaatacatttcttgtggcaagtaattcacagttgtaaagtaaataggaaaaattattttatttttattgatgtacattgatagatgccataaatcagtagcaaaaggcacttctaaaggtaagtggtttaagttgcctcaagagagggacaatgtagctttattttacaagaaggcatagttagatttctatgaaatatttattctgtacagttttatatagttttggttcacaaaagtaattattcttgggtgcctttcaagaaaattaaaaatactactcactacaataaaactaaaatgaaaactcnnn

SEQ ID NO: 13347 - DNA, 1908 bp, Homo sapiens
  misc_feature 1, 2, 1905, 1906, 1907, 1908: n = A,T,C or G
nnccgggcaaccagagattggccattccgctactgcgcaaagatggtggaggaggagaacatccgcgtggttcgttgtggcggcagcgagttgaactttaggagagctgtgttctctgcagattctaagtatatcttctgtgtctctggagactttgttaaagtttacagcacagttacagaagagtgtgtacacatactgcatggacacagaaatctggtgactggaatccagcttaaccccaacaaccatctacagctgtattcttgttcccttgatggcacaattaaactgtgggactatatagatggcatcttaataaagactttcatagttggatgtaaacttcatgccctctttactcttgcccaagctgaggattctgtctttgttatagtgaataaagaaaaaccagatatatttcagctggtttcagtgaaactgccaaaatcctcaagccaggaagtagaagccaaggagctgtcctttgttttggattacataaaccagtcacccaagtgcattgcctttggaaacgagggagtatatgttgctgcagtacgggaattttacttgtctgtttattttttcaaaaagaaaacaacatcaaggtttactttatcatcatcaagaaataagaagcatgctaaaaacaattttacgtgtgtagcatgtcacccaacggaagactgcatcgcatctggtcacatggatggcaaaattcgtctttggaggaatttttatgatgataagaaatatacgtacacatgtttacattggcaccatgatatggttatggatttggctttttcagtgacaggcaccagtctgctgagtggcggtcgtgaatctgtacttgtagagtggcgcgatgcaacagagaagaataaggagtttctcccgcgtttaggagctactattgaacatatctcagtctcgcctgcaggagatttattctgcacttctcactctgataataagataataattattcaccgaaaccttgaagcatccgcagtaattcaaggcctagtgaaagataggagtatcttcactggtttgatgattgatccaagaactaaagctttggttttgaatggaaaacctggccacctgcagttttattctctccagagtgataaacagttatacaatttagatattatacagcaagaatatattaatgattatggtctgatccaaattgaactaacaaaggctgcatttggctgctttggtaactggcttgcaacagtggaacagcggcaagaaaaggaaactgagcttgaattgcaaatgaaactgtggatgtataataagaaaacacaagggtttattcttaacactaaaattaacatgccacacgaagactgcattacagctctctgtttctgtaatgcagaaaaatctgaacagcccaccttggttacagctagcaaagatggttacttcaaagtatggatattaacagatgactctgacatatacaaaaaagctgttggctggacctgtgactttgttggtagttatcacaagtatcaagcaactaactgttgtttctccgaagatggttctttactagcagttagttttgaggaaatagtcacaatatgggattctgtaacatgggaacttaaatgcatctggccagagcgtggggaaaaagggcccttggttggggaatagcgtgtccaaggatctactggggcaccgaaaggcgacctgcgggggaaccggcggacgcgtcggagggccgaccaccgtcggatcgacgccccaacacacaacaggcgaacccgccgagacacaggcgccgagccacacttgtcgaacaacaccaacgaggcaaaacacaccacaccaacacaggcacggtccaccacacaccaacagaagcgcaagcannnn

SEQ ID NO: 13348 - DNA, 893 bp, Homo sapiens
acgcgggctgtcattcatttacccatgcagaaaaaatggtaacttgaagagagtggcatgtgcctgctgccttagaggttatagaatccccacagtcaacaaaaaagcctctagagacatgactgttgccatggaaaccagagaaaatgtgtcttctcatccctcatttgtaaatgagggggtggagcagatcatctgtctctaaggtctttttcagtgctaaaatgtggtgattctttgggaaaaactttttgcatcaagtatgattaaatattctgaaagacgagtgtagcttaaaatttgttttgtttttaaattctgttcatgggtcttcttaaaatggacccttgccgaaaggcggcctgtgacggcctcaggtgggaagatggatgtccttccaagggtgtggctggcagtggggtttgcatgactgcttcttgtctgtgtttcaagtgctctcatctattggtttggtttcctttctttttttttttttttctcattgtgccactttttttttcctcccacctttttatcttcacgcagataagtttctttgcttcacttctcccaagactccctcgtcgagctggatgtcccacctctctgagctctgcatttgtctattctccagctgaccctggttctctctcttagcatcctgccttagagccaggcacacactgtgctttctattgtacagaagctcttcgtttcagtgtcaaataaacactgtgtaagctatttctgtttgctattctttttacttcttatttattgacattttagtttcaacattgaataaaactacaaagctgctattcactatagggatctctcccgggctgaagtgaccatattttcaaggggtgaaaccatctcgcacacagcaa

SEQ ID NO: 13349 - DNA, 536 bp, Homo sapiens
  misc_feature 534, 535, 536: n = A,T,C or G
actttcttttttttttttttttttctttttttttcttgggttggagagacggagtcttgctgtgtcactcaggctggagtgcagtgatgcaatcttggcacactgcaacatccgcctcccaggtttaactgattctcctgcctcagcctcccaagtagctgggattataggagtgcaccaccacacccggctaatttttgtatttttagaagaaacagggttttgccacgttaaacaggctggtcttgaactcctgacctcaggtgatctgcccacctaggccttacaaagtgctgggattacaggcgtgagccacatgcctaacccatgtgagtatcttctggaacatcaagttcactaataactccagaaaaattttaaaagtaactcaaaatctaaatctctaactctaccctttggaccaacccaaaaatattacatatgggattctatatgcctattcctaaaacatttaaagacaatattggttttacagtcttctccaagggaaatatgcctatcaatctttagcannn

SEQ ID NO: 13350 - DNA, 1721 bp, Homo sapiens
atggcgaattggagctccactctgtggcggccgaggtacgcggggatttttttttaactgtgctatggagtagaagcaggaggttttcaacctagtcacagagcagcacctaccccctcctcctttccacacctgcaaactcttttacttgggctgaatatttagtgtaattacatctcagctttgagggctcctgtggcaaattcccggattaaaaggttccctggttgtgaaaatacatgagataaatcatgaaggccactatcatcctccttctgcttgcacaagtttcctgggctggaccgtttcaacagagaggcttatttgactttatgctagaagatgaggcttctgggataggcccagaagttcctgatgaccgcgacttcgagccctccctaggcccagtgtgccccttccgctgtcaatgccatcttcgagtggtccagtgttctgatttgggtctggacaaagtgccaaaggatctttcccctgacacaactctggttgacctgcaaaacaacaaaataaccgaaatcaaagatggagactttaagaacctgaagaaccttcacgcattgattcttgtcaacaataaaattagcaaagttagtcctggagcatttacacctttggtgaagttggaacgactttatctgtccaagaatcaactgaaggaattgccagaaaaaatgcccaaaactcttcaggagctgcgtgcccatgagaatgagatcaccaaagtgcgaaaagttactttcaatggactgaaccagatgattgtcatagaactgggcaccaatccgctgaagagctcaggaattgaaaatggggctttccagggaatgaagaagctctcctacatccgcattgctgataccaatatcaccagcattcctcaaggtcttcctccttcccttacggaattacatcttgatggcaacttgggattgagtttcaacagcatctctgctgttgacaatggctctctggccaacacgcctcatctgagggagcttcacttggacaacaacaggcttgccagagtacctggtgggctggcagagcataagtacatccaggttgtctaccttcataacaacaatatctctgtagttggatcaagtgacttctgcccacctggacacaacaccaaaaaggcttcttattcgggtgtgagtcttttcagcaacccggtccagtactgggagatacagccatccaccttcagatgtgtctacgtgcgctctgccattcaactcggaaactataagtaattctcaagaaagccctcatttttataacctggcaaaatcttgttaatgtcattgctaaaaaataaataaaagctagatactggaaacctaactgcaatgtggatgttttacccacatgacttattatgcataaagccaaatttccagtttaagtaattgcctacaataaaaagaaattttgcctgccattttcagaatcatcttttgaagctttctgttgatgttaactgagctactagagatattcttatttcactaaatgtaaaatttggagtaaatatatatatgtcaatatttagtaaagcttttcttttttaatttccaggaaaaaataaaaagagtatgagtcttctgtaattcattgagcagttagctcatttgagataaaggcaaatgccaaacactagctctgtattaatccccatcattactggtaaagcctca

SEQ ID NO: 13351 - DNA, 395 bp, Homo sapiens
  misc_feature 395: n = A,T,C or G
acattcctaattatgcagaacgtaaagtctgaatgcaaaaacttttgcaggagatggagttgtagagattaagatggcgagtaggaggcaggactagcttgcagctcctgctcagacagacagagtagcatgtgaagactcacatcatgaacttttgctccaagaaataccgcaggaacataccacgaaaggcgagagaatccacagaccctttgaaggaactggattgctgccgcaggctccctgagatgccaaaaaactgagtcagcttgctttctcaggtggtggtctggggcaagttctcagccctggtcacaggctgcctggaaatagactccatgctgttggtcgggcatggcgggagtaagaccagcctttatgactgctggctgtan

SEQ ID NO: 13352 - DNA, 279 bp, Homo sapiens
  misc_feature 278, 279: n = A,T,C or G
gctaaaaattttttgtatttttagtacagatggggtttcatcatgttggccaggctggtctggcactcctgacctcaggtgatccacccgcctcggcctcccaaagtgctggggttacaggcgtgagccaccgtgcccagactcaaatcacattttttaatgatgttgcaaacgaatgtcgattttctcgatgtgattctcagttacagaaacttacacaactttgcttatcaaccctagacaataaaactattctacctagaggctctaggaaagcnn

SEQ ID NO: 13353 - DNA, 468 bp, Homo sapiens
  misc_feature 468: n = A,T,C or G
acttttttttttttttttttttttttttgggacggagtctcgctctgtcgccaggctggagtgcagtggtgccatctcggctcaccgtaacctccgcctcccgggttcaagcaattctcctgcctcagcctcctgagtagctgggactataggcgtgcgccaccatgcccagcttagtagagatggggtttcaccatgttggccaggatggtctcaatctcctgacctcatgatctgctcgcctcagcctcccaaagtgctgggattacaggcatgagccactgcgcctggacacatacattcttataaggaaacatacccacacatataaaacgttttgagaagtggaaagagcatggttctgagtcagcttgtgtgttatctctaacctcccaattcctaatctttaaaatgaaaattcatgtaatacccatgttagggaggggtttcaaatcaggtaacagatgn

SEQ ID NO: 13354 - DNA, 3119 bp, Homo sapiens
aggcgcttgttgggaaggttgatggacggatggctacatggatgtgatggagatggtttactatcgggaccttccgcaccctgctgatgtttgttgcttaggatatgaatggctgagcggaggctgtaaaacctggcactctgcttgggttatcaatactctggctgaccatcatcatcgtgggactgactttggtggaagtccttggttacatgtcattattgcgtttccgacaagttataaagttgtcattaccctctggatagtttacctttgggtgtctctcctgaagactatcttctggtctcgaaatggacatgatggatccacggatgtacagcagagagcctggaggtccaaccgccgtagacaggaagggctgaggtccatttgtatgcacacaaagaaaagagtttcttcctttcgaggaaataaaattgtcctgaatgacgtcattactctacggagacatgtggaaacaaaagttagagctaaaatccgtaagaggaaggtgacaacgaaaatcaaccatcatgacaaaatcaatggaaagaggaagaccgccagaaaacagaaaatgtttcaacgtgcgcaagagttgcggcggcgggcagaggactaccacaaatgcaaaatccccccttctgcaagaaaggctctttgcaactgggtcagaatggcggcagcggagcatcgtcattcttcaggattgccctactggccctacctcacagctgaaactttaaaaaacaggatgggccaccagccacctcctccaactcaacaacattctataactgataactccctgagcctcaagacacctcccgagtgtctgctcactccccttccaccctcagcggatgataatctcaagacacctcctgagtgtgtgctcactccccttccaccctcagcggatgataatctcaagacacctcccgagtgtctgctcactccccttccagccctcagcggatgataatctaaagacacctcccgagtgtctgctcactccccttccaccctcagcggatgataatcatcaagacacctcccgagtgtctgctcactccccttccaccctcagctccaccctcatcggatgataatctcaagacccctcccgagtagctgggattacaggtgcctgccaccacgcctggctaatttttttgtatttttagtagagaaggggtttcaccatattagccacaatggtctcaatctcctgacctcgtgatccatccgccccgccctcccagagtgctgggattacaggcgtcagccaccgtgaccggctcagactgtactcttctagccatctgaaatacgttttctaggtagagatagattgtgtaagggtacagttgtgaggataacagaaacatggcagattatttaaaatcatcctgaaagtggtgctttatctgatgaaagtgattgtaatccataggaaaatgtttcaacgtgcgcaagagttgccggcggcgagcagaggactaccacaaatgcaaaatccccccttctgcaagaaaggctctttgcaactgggtcagaatggcagcagcggagcatcgtcattcttcaggattgccctactggccctacctcacagctgaaactttaaaaaacaggatgggccaccagccacctcctccaactcaacaacattctataactgataactccctgagcctcaagacacctcccgagtgtctgctcactccccttccaccctcagcggatgataatctcaagacacctcccgagtgtgtgctcactccccttccaccctcagcggatgataatctcaagacacctcccgagtgtgtgctcactccccttccaccctcagcggatgataatctcaagacacctcctgagtgtctgctcactccccttccaccctcagcggatgataatctcaagacacctcccgagtgtctactcactccccttccaccctcagctctaccctcagctccaccctcagcggatgataatctcaagacacgtgccgagtgtctgctccatccccttccaccctcagcggatgataatctcaagacaccttccgagcgtcagctcactccccttccaccctcagcttcaccctcagcagatgataatatcaagacacctgccgagcgtctgcggggagcgtctgcgggggccgcttccaccctcagcggatgataatctcaagacaccttccgagcgtcagctcactccccttccaccctcagctccaccctcagcagatgataatatcaagacacctgccttccaccctcagcggatgataatctcaagacacctcctgagtgtgtctgctcactccccttccaccctcagctccactctcagcagatgataatatcaagatacctgctgagcgtctgcggattccgcttccaccatcagccgatgataatctcaagacaccttccgagcgtcagctcactccccttccaccctcagctccaccctcagcagatgataatatcaagacacctgccgagcgtctgcgggggccgcttccaccctcagcggatgataatctcaagacaccttccgagcgtcagctcactccccttccaccctcagctccaccctcagcagatgataatatcaagacacctgccgagcgtctgcgggggccgcttccaccctcagcggatgataatctcaagacaccttccgagcgtcagctcactccccttccaccctcagctccaccctcagcagatgataatatcaagacacctgctgagcgtctgcgggggccgcttccaccctcagcggatgataatctcaagacaccttccgagcgtcagctcactccccttccaccctcagctccaccctcagcagatgataatatcaagacacctgccgagcgtctgcgggggccgcttccaccctcagccgatgataatctcaagacacctcccttagctactcaggaggctgaggcagaaaaaccacgcaaacccaagaggcagagggcggctgagatggaaccacctcccgaacccaagaagcggagggtcggtgacgtggaaccgtcacgcaaacccaagaggcggagggccgctgacgtggaaccatcatca

SEQ ID NO: 13355 - DNA, 505 bp, Homo sapiens
  misc_feature 504, 505: n = A,T,C or G
accctactccaggccctggctcccaagtggcatctctgaacctggccaggaccagggttggggggtgggggagattcatcgccctgaagggaaagacaatactggctggatttgctacatgctgatagcagagtccatgggccttaagggaatacaggcagtagccaggcagtgaccaccacaggtcttgggcaaaacccagtgctgttctggttcaagtctgattcagtgcaataccaacggtggtggccacagaggtgcctgtgttacctctctcccagctctaggcagctcagcaaagagagagagactcactttatttgtgggaaagtaaggaaagagaacaagagtctctggtaatccatggaattcatccatatcttaccaccaagaccaccaaggtggaacaaatacaggtctgcaagagccacagcattactgggcctggggtgccccataatgtgggtatggctactgtgaccaaagacttggatcacaacaccnn

SEQ ID NO: 13356 - DNA, 1684 bp, Homo sapiens
  misc_feature 1, 2, 3, 4, 5, 6, 7, 8, 9, 10, 11, 12, 13, 14, 15, 16, 17,1681, 1682, 1683, 1684: n = A,T,C or G
nnnnnnnnnnnnnnnnngacttaaacaaaaatatttactcttttcaaagaagtaaccatttgccaggggaaaacattctgcttttaggtagtttcaaaattcaggggagggagcctgaaatttttgccatgattggtttgttagaaagagcagcgggctacttctagaattaattaacgcggggaaggtcacgacctcgcaaaaacttttcaagagcaacaaggaagaattctgctgcgaagaacacagtgtacggatcctccgcatattatctcaacagaggacagtagctcaggaggcagcttcaaacggtgacctgtggcctgggccatctcttcgtcatgtgcttcacttttccctgtttccctgtgaactggcttccatggttctgtagggtagtgagtcggggttgtggctgcagcagagcaggagatgcttgcccgagtgggagcaacccacccccgtgtccccaatgcctcactcctggcttctagtgcagccctttgtagactcacctcgcaagaaggaagatctgcctggagacctgatcccagtccagctttttgaccataggtcatctttgtccccttgctcctttgcatcatgtcataaaatttgaggatatcagctgattattttttcttccaagaatgaaaatcaagcagaattgattcctacacgaaaaaaaagcacacgaatgccaaacctttcctttggtggactggacactaaccagatgagagtaaatttcttatccgtggacgtatgtaagctactgctgctgtgtgctctccacagccatatttattgtattaaacaatcagcactaaaccttcaaaaattgcccagtgttcctagttaaatgttcagaggggagaaatagatatattttaaataatgttttgctaatgaaaagagtaaatatttttgtttaaatcagcaaaaactttccattattttatatttccgtctactatacctaaaacaaaagattgccgttatacctgggttccgctgatgcagtcagccagcacctcctcacatgcacacatgattagacataggtgcactcggtaccaagagtccattttatggtccagcatatactccattgattcatcatcactgcatgtgttcagccagtgtatctcacactatccatacaaatctaaaattgatactggaaatgttattataggaggcagtgatcgcatttaaaatcaggccacctacaagtttaattttcaacatctcatgtttttatttgtcccattacagcctcaaatgttggtcataaaaaaaatttaggctaccaaagtttaaagaataaactgacaattctattaagaacttacatttaaaaactccagtagttggctgagtaagactcttgggaatacacgattccgccaaatttgtccttcacatatcgggggaaggcttgaaaatccgagaatttttaggaaaggtttatgcaaatatgttttgtattacaactccctttttttgttaacacaatgggaggcgcaaacattgtgggactcaacggaaatgtgctttctcacaaattctttaacatggacggacatatcacctcttgttgataagagggacataaatgtaatagaggccgtcaatgacactgttacgaatcatatctcgagaattatcaactactacnnnn

SEQ ID NO: 13357 - DNA, 493 bp, Homo sapiens
  misc_feature 462, 463, 464, 465, 466, 467, 468, 469, 470, 471, 472, 473,474, 475, 476, 477, 478, 479, 480, 481, 482, 483, 484, 485,486, 487, 488, 489, 490, 491, 492, 493: n = A,T,C or G
accaccacacctggctaatttggtatttttagcagagacggtgtttcaccgtgttggctaggctggtgtcaaattcctgacctcaggtgatccaccggcctcagcctcccaaagtgctgggatttcaggtgtgagccaccatgcttttaaaattactatttgaataatgcttctgataatttttctttttttttcttgagaatcgcttgaacccgggaggcggaggttgcagtgagccgagatggcaccattgtcctctagcttgggtgacgagcaaaactccatctcaaaaaaaaaaaaagtttacctttccctttgtcccccaaacctctttttgggggtttattttagaaataaggcaaggggaacctttcccctaggatgttgctctgaaaaaaattttaaagagcgggaccctactctaaggcctgcttttacttttttggcctggaacaagtcacnnnnnnnnnnnnnnnnnnnnnnnnnnnnnnnn

SEQ ID NO: 13358 - DNA, 1978 bp, Homo sapiens
  misc_feature 1, 2, 3, 4, 5, 6, 7, 8, 9, 13, 29, 32, 1969, 1970, 1971,1972, 1973, 1974, 1975, 1976, 1977, 1978: n = A,T,C or G
nnnnnnnnnagcnagttggagtcctgggnttntccagctactgaccagaagccttcctcttctacccatctaggaggactgttacaatacttcaagtcactctttacacctcttcaaagaaagtcatgacaatgcagggctcctcattgctcccatctgcctctgctgcacacacaggcaccagcagggatgccacaggagtgcccacagggtgcaggactccactgatgagagatccagccaaagagctgcccccaggggtatgagggcaccagctgggttctccagggagcaggagttggacctccatggagccactaggcctggcctcctctacacatccccagggctatctggttaattccatcaagctcagagttaaaaggcatatcagcctggagtatttgggagagactggctgcagatccccgccagccaagatgcaagccactcgggacctgatgtcggcagctgtgcctctactgccctgaggacttaccagagggagccctactggccttcccccaccacagcagccctgcctgtgaagctcttgtttctgacatttcacaggcagagaggtgccatcagttcgcctccattccttgccaccatgaccagcctctccctgaactctctcttgctcgggacctgcctgagggctccctgctgcagttcgccgtacttccatctgctgggtgcctccatcgttggttgggtggggatggggcattttctgagctaagctttgtcattagtttgtgaagcacctggtcagcaacctgccccagacctggagggtcttttgtggactgaaggtagacaccagccagcatggtggccctgttctgggggagcagggtaaggcaggaggaagtgggtgagctccgagatgatgagcacatgaagcctgtggccccttcgtacctgcaatatgtcaggagcctcacgctcacccaagatcctgcaggggccaggctccatctcactggctctgagggcaggacagggtatcacacatttctcaccaggcctcctttcctatgggcattggtgcctcccagaggtttcttgggctgctggctggtgagagaggacccttaaagaagatcaagccaagctgaccttggaccctgtccagcacagcttctggcacaggatgcttggtgaatgtaccctttctttccctccctgcagctctgagggagcccctgaccttgtagtgggtggaggaggtaaggggcctccctccctaaatctgcctcttctgcaagctacttggagacttgcctagtcgtacccacccctccaggtccctggtgctagagcttctgagaagggcctttccctttcctctttgcctgctatataaggcaggctcctgtggctctgctggctcagtgtgggctgcaggaggactgcagactcagctgcaattctgaggggggtttgggaggcttgtgcgaggtctcaggcctgtgtggggagctggtgcctcttcctgcccgtatctttctcttccaagggcagtgctccaaggcagggactggagaagccaaggggagagtctaaaagggctagagcatttttaaaaatagacacagggtcttgggactggggtttcggattgagttgcaagcagggagaaaacctgaaggtcggtgcccctatggggctgaccagtagagaatttcctttactgtatttttgtgtctggtcttccctttctggttctaggacatccatgccaagtgagttggctgggtcctgttacagtcagagccgtagggacctccttttgtccattccggatgcgggacagcgctttgtcacttttttagttaaggccgggaccgtccggggggcccccggacctgtgaatgggcacaaaggctagacccctcgaaaggaattgtaaaaaaaaaggggggtccaggcgattaaggaaaagaagcaggattcgtcacannnnnnnnnn

SEQ ID NO: 13359 - DNA, 468 bp, Homo sapiens
  misc_feature 1, 2, 3, 4, 5, 6, 7, 8, 9, 10, 11, 12, 13, 14, 197: n = A,T,C or G
nnnnnnnnnnnnnncagcatttctttctttgcaccagaattgaggcgcacaatgcttcagtttttaggtaactacaattatcctgccagactaatacgatgacgggagtgctagtggagacttcctggagacagttgagggtcataggtcaggattgagtttgacagcagggaaaacagcctgatacggtttggctntgtgtccccacccaaatctcatgacgaatcgtaatccccagtgttggaggaggggcctggtggaaggcgactgggtcatgagagcggattttccctttgctgttctcatgatggtgagtgaattctcattagccttggctgtttaaaagtgtgtggcgccttccccttcactctcttcctcctgctccaaacatgtaggacatacacgcttccccttcgccttctgccatgattgtaagtttcctgaggcctccctagccatgcttcctgt

SEQ ID NO: 13360 - DNA, 2454 bp, Homo sapiens
  misc_feature 1, 2447, 2448, 2449, 2450, 2451, 2452, 2453, 2454: n = A,T,C or G
ncgtccgctcacgcgtccggggtgacagcagcccggagccgcggagcctcagcttccgcctggacccagcctcgtgggagccccgcgggtcctgcccagatgtggaagactgaggcctgttgaaagtgcagagctcagccctggcaccctctgttcccaagagctccatgcaggtgccacaggatggagaagaccttgctggccaaccctggtaccacggcctcctgtcccgccagaaggctgaagctcttcttcagcaagatggcgacttcctggttcgcgcctctgggtcccgtgggggcaaccccgtgatctcctgccgctggcggggctcagccctccattttgaggtgttccgtgtggccctgcgtccccggccaggccgacccacagccctctttcaactggaggatgagcaattccccagcataccggctctggttcacagttatatgacaggcaggcgcccactgtcccaggccacaggggctgtggtctccaggcctgtgacttggcaggggcctctgcgacgcagctttagcgaggacaccctgatggatggcccagctcggatagagcctctcagggcaaggaagtggagcaacagtcagcctgcagatttggcacatatggggcggtcaagagaagaccccgctgggatggaagcctccaccatgcccatatctgccttgccccgaacgagcagtgacccggtgttgctgaaggcccctgctcccctgggaactgttgccgacagtctcagggcctccgatgggcagcttcaagccaaggcaccaacgaagcccccccggacaccctccttcgaactgcctgatgcctctgaacgtcccccgacgtactgcgagctggtgccccgagtgcccagtgtccagggaacatccccgagccaaagctgcccagagccagaggccccatggtgggaggccgaggaggatgaggaggaagagaatagatgttttacaagaccacaggctgagatctctttctgcccccatgatgccccctcctgcctgctgggcccccagaatcggcccctggaaccccaagtcctgcataccctccgtggcctgttcctggagcaccatcctgggagcaccgcccttcacctgctattggtagactgccaggccacaggcctcctgggagtgaccagagatcagcggggcaacatgggagtctcatctggcctggagctgctcactcttccccatggacaccacttgaggttggaactgctggagaggcatcagacactggcgctggccggggcgctggcggtgctgggctgctcggggccgctggaggagcgcgcagccgcactgaggggactggtagagctggcgctggcgctgcggccaggggcggcgggggacctgcccgggctggctgcagtcatgggcgccctgctcatgccccaggtgtcccggttggagcacacgtggcgccagctccgaaggagccacacggaggctgcgctggcctttgagcaggagctgaagccgctgatgcgggctctggatgagggcgctggaccctgcgaccccggcgaggtggcgctgccgcacgtggcacccatggttcgcctactggagggcgaggaagtcgcggggccgctggacgagagctgtgagcggctgttgcgcaccctgcacggggcgcgtcacatggtccgggacgcacccaaattccgcaaggtggcagcccagcgcctgcgaggattccggcctaacccggagctgagggaggccctgaccaccggcttcgtgcggaggctgctctggggtagccggggcgcgggagctccgcgcgctgaacgctttgagaagttccagcgcgtcctcggcgtcctgtcgcagcgcctggagcctgaccgctgagagcgcagacacccttcttcacacccgggacccccaggtttttgcgaaccccagaagagaccaaaggagtcgtcccaggctcctcgcgcctcaggtggaatcctgccctgtgcctcacagaagaggtggggaccgcagtcagggtcacctggaccatggtgaacatgtgacctgcagatctggcatcagaggccagagttcaaatgtgactccacctcttaaaagccgtgatttctagcagttgacttcacctctgtgtcggcctttaacaaaatcatagccatacagcagctcaggcctgtaatctcagcactttgggaggccgaggcggaaggaaggcttgaggccaggagttcaagaccagccagggcaacatggtgagacctcatctctacaaaaactgaaaaataaaaaacttttaaaaaatgttaaaaaaaaaaaaaaaaaaaaaaaaaaaaaatgttccttgcggggggggggtttttaaaaatggggaccccccggcccgggggaattttttttccaatttttttaacccccccaccctannnnnnnn

SEQ ID NO: 13361 - DNA, 3773 bp, Homo sapiens
ggagatgcttctgggtcgcggtgtgctaagcgaggagtccgagtgtgtgagcttgagagccgcgcgctagagcgacccggcgagggatggcggccaccgggaccgcggccgccgcagccacgggcaggctcctgcttctgctgctggtggggctcacggcgcctgccttggcgctggccggctacatcgaggctcttgcagccaatgccggaacaggatttgctgttgctgagcctcaaatcgcaatgttttgtgggaagttaaatatgcatgtgaacattcagactgggaaatgggaacctgatccaacaggcaccaagagctgctttgaaacaaaagaagaagttcttcagtactgtcaggagatgtatccagagctacagatcacaaatgtgatggaggcaaaccagcgggttagtattgacaactggtgccggagggacaaaaagcaatgcaagagtcgctttgttacacctttcaagtgtctcgtgggtgaatttgtaagtgatgtcctgctagttccagaaaagtgccagtttttccacaaagagcggatggaggtgtgtgagaatcaccagcactggcacacggtagtcaaagaggcatgtctgactcagggaatgaccttatatagctacggcatgctgctcccatgtggggtagaccagttccatggcactgaatatgtgtgctgccctcagacaaagattattggatctgtgtcaaaagaagaggaagaggaagatgaagaggaagaggaagaggaagatgaagaggaagactatgatgtttataaaagtgaatttcctactgaagcagatctggaagacttcacagaagcagctgtggatgaggatgatgaggatgaggaagaaggggaggaagtggtggaggaccgagattactactatgacaccttcaaaggagatgactacaatgaggagaatcctactgaacccggcagcgacggcaccatgtcagacaaggaaattactcatgatgtcaaagctgtctgctcccaggaggcgatgacggggccctgccgggccgtgatgcctcgttggtacttcgacctctccaagggaaagtgcgtgcgctttatatatggtggctgcggcggcaacaggaacaattttgagtctgaggattattgtatggctgtgtgtaaagcgatgattcctccaactcctctgccaaccaatgatgttgatgtgtatttcgagacctctgcagatgataatgagcatgctcgcttccagaaggctaaggagcagctggagattcggcaccgcaaccgaatggacagggtaaagaaggaatgggaagaggcagagcttcaagctaagaacctccccaaagcagagaggcagactctgattcagcacttccaagccatggttaaagctttagagaaggaagcagccagtgagaagcagcagctggtggagacccacctggcccgagtggaagctatgctgaatgaccgccgtcggatggctctggagaactacctggctgccttgcagtctgacccgccacggcctcatcgcattctccaggccttacggcgttatgtccgtgctgagaacaaagatcgcttacataccatccgtcattaccagcatgtgttggctgttgacccagaaaaggcggcccagatgaaatcccaggtgatgacacatctccacgtgattgaagaaaggaggaaccaaagcctctctctgctctacaaagtaccttatgtagcccaagaaattcaagaggaaattgatgagctccttcaggagcagcgtgcagatatggaccagttcactgcctcaatctcagagacccctgtggacgtccgggtgagctctgaggagagtgaggagatcccaccgttccaccccttccaccccttcccagccctacctgagaacgaagacactcagccggagttgtaccacccaatgaaaaaaggatctggagtgggagagcaggatgggggactgatcggtgccgaagagaaagtgattaacagtaagaataaagtggatgaaaacatggtcattgacgagactctggatgttaaggaaatgattttcaatgccgagagagttggaggcctcgaggaagagcgggaatccgtgggcccactgcgggaggacttcagtctgagtagcagtgctctcattggcctgctggtcatcgcagtggccattgccacggtcatcgtcatcagcctggtgatgctgaggaagaggcagtatggcaccatcagccacgggatcgtggaggttgatccaatgctcaccccagaagagcgtcacctgaacaagatgcagaaccatggctatgagaaccccacctacaaatacctggagcagatgcagatttaggtggcagggagcgcggcagccctggcggagggatgcaggtgggccggaagatcccacgattccgatcgactgccaagcagcagccgctgccaggggctgcgtctgacatcctgacctcctggactgtaggactatataaagtactactgtagaactgcaatttccattcttttaaatgggtgaaaaatggtaatataacaatatatgatatataaaccttaaatgaaaaaaaatgatctattgcagatatttgatgtagttttcttttttaaattaatcagaaaccccacttccattgtattgtctgacacatgctctcaatatataataaatgggaaatgtcgattttcaataatagacttatatgcaggctgtcgttccggttatgttgtgtaagtcaactcttcagcctcattcactgtcctggcttttatttaaagaaaaaaaaggcagtattccctttttaaatgagctttcaggaagttgctgagaaatggggtggaatagggaactgtaatggccactgaagcacgtgagagaccctcgcaaaatgatgtgaaaggaccagtttcttgaagtccagtgtttccacggctggatacctgtgtgtctccataaaagtcctgtcaccaaggacgttaaaggcattttattccagcgtcttctagagagcttagtgtatacagatgagggtgtccgctgctgctttccttcggaatccagtgcttccacagagattagcctgtagcttatatttgacattcttcactgtctgttgtttacctaccgtagctttttaccgttcacttccccttccaactatgtccagatgtgcaggctcctcctctctggactttctccaaaggcactgaccctcggcctctactttgtcccctcacctccaccccctcctgtcaccggccttgtgacattcactcagagaagaccacaccaaggaggcggccgctggcccaggagagaacacggggaggtttgtttgtgtgaaagttaaagtagtccaggctgtccctgaaactgagtctgtgtacactgtggaaagctgtgtacaattgtgttttcgtcacaggagtctttgtaatgcttgtacagttgatgtcgatgctcactgcttctgctttttctttctttttattttaaaaaatctgaaggttctggtaacctgtggtgtatttttattttcctgtgactgtttttgttttgtttttttcctttttcctcccctttagccctattcatgtctctacccactatgcacagattaaacttcacctacaaactccttaatatgatctgtggagaatgtacacagtttaaacacatcaataaatactttaacttccaaaacaaaccctcgtgccgaattcttggcctcga

SEQ ID NO: 13362 - DNA, 926 bp, Homo sapiens
agggagtcgaccctcgcgtacggcgtggacgtggctggtgatgggcatgatcctggtatccgctaacaagtcaaaatgcacatcttcctgaaaacccttaccggcatgaccatcacccttgaggtggaacccaccgacaccatcgagcatgtgaaagccagcatccatgataaggaaggcattcctcccgaccaacagaggctcatttttggcggcaagcagctggaaagatggccgcactctttttgactacatcatccagaaggagtcgaccctgcacctggtcctgcgtctgagaggtggtatgcagatcttcgtgaagaccctgaccggcaagaccatcaccctggaagtggagcccagtgacaccatcgaaaatgtgaaggccaagatccaggataaagaaggcatccctcccgaccagcagaggctcatctttgcaggcaagcagctggaagatggccgcactctttctgactacaacatccagaaggagtcgaccctgcacctggtcccgcgtctgagaggtggtatgcagatcttcgtgaagaccctgaccggcaagaccatcactctggaggtggagcccagtgacaccatcgaaaatgtgaaggccaagatccaagataaagaaggcatcccccccgaccagcagaggttcatttttgcaggcaagcagctggaaaatggccgcactctttttgactacaacatccaaaaaaagtcgcccctgcacctggtcctgcgcctaaggggtggctgttaattcttcagtcatggcattcgcagtgcccagtgatggcattactctgcactatagccatttgccccaacttaagtttagaaattacaagtttcagtaatagctgaacctgttcaaaatgttaataaaggtttcgttgcatggtaaaaaaaaaaaaaaaaaa

SEQ ID NO: 13363 - DNA, 672 bp, Homo sapiens
  misc_feature 1, 8, 37, 672: n = A,T,C or G
naatattnaggaagctagggtgctataatctgaatgnaacgtggaaataaaactgtcttttgccttggaccttcttggttagattaattaaataccaattatcagtataagaaaatggcaataaattgtcaaagtggaattggaaagtgtttttaggatttggatatgaagcaggcttcccatgtgaccattctcacttcttattctgaagtctaacactctgcttttctttctctccctctcttcattgattcttctagtggctggtgtttgggtattgtgggaactgagctttcatctcctatgttagccatagagatgaaggctttgagggcaccatggaatccgattgctggaaataaatcaatcttaaaggaaaggaaaatttaaaaatcaggtgcaacaaaagcaaaatgagaaaactgctaaactctacaattctataaagaagaattgcataaaaaggaaataacaggaaaaggtaagaaaatttaaaaggatatcagaaaatatagcatacagggtcagaaagatttgagaatatgacgagatggttttagaaagcaagatggggccgggcacggtggctcatgcctataatcccagcgctttgggaggctgaggcagacggatcacgaggtcaggagatcgagaccatcctggctaaagccn

SEQ ID NO: 13364 - DNA, 718 bp, Homo sapiens
  misc_feature 519, 712, 713, 714, 715, 716, 717, 718: n = A,T,C or G
actgttaatgtcactgtatatactctttattttacgctttgtctcatatccaaaatcaaacaaaaaaggatgtcttcagaaatgtagaattgtgcagtttggtgctgtgcccacaccactctaaaattaatgattaattgaatcatttgaggtcgctcaaattaaactaatttggcattgtgtgggtgacaaccagttgaaatgttttctttttatcagctatgtggccatatttttggagacagccagagtcttctgtctcttttctacctgtaatctattccaggtgctaagaactgtgaaagtccagcttgggtaatgtagtgagaccctgtctctacaaaaagtaaaaaattagccaggtgcagtggcacacgcctgaggccccagctacttgggaggctgaggttggaggatcacttgagcctgggagtttgaggctgtagtgagctgtgattgcacccctgcacttcagcctgggcactggagggagaccgtatctcttaaaaaaaaaaaaanagccaagttattccttccggcgcaattccaggttacatgggccaattcgcctattagggagccgattaccatttaatggcccgtggtttaacaccgcggaacttgccctgcggtacccacctaattggcttggaagcaacgtttggcaaccttaatggccaaggaaatttgaagcttaatttttgtactccgnnnnnnn

SEQ ID NO: 13365 - DNA, 1079 bp, Homo sapiens
gcgtccggctttgtggcctagggctggatgtagtggtgcgatcttggctcactggaacctccgcctcctgggttccagtgattctcctgcctaagcctcccaagtagctgggattacaggtgcccaccagaacgcccagctcatttttgtgcttctagaagagacagggtttcaccatgttggccaggctggtctccaactcctgacctcaagtgatctgcctgcctggcctcccaaagtgctgggattacaggcgtatgccactgtgcccagcctgagtttctgtttagaaacaacagtctatgatagtataatcctctcttttttgtacacagagtaaagaggacaaataggtgaaagaataaatgaaaggctggaatcccacttcccccgctgtcccagggcattggatattgacggataggaggcagcaaaccactcacagagccaggaagaaatgaatgcgttggtattgtcaggaggggaagccggcccggctgaaatacgctatgaccatagccaggagatactgatggagagaaaggaacacagagagggagaggtcacatcttggaagaggaagattgtggagagggggaatgagggtctggggaggggctgcccatcagagaagggacctcagtgttggggtgactactcatttggaaattgcgggatggaggggtattcgaaggtcggatgcaaatccgagaagccagaggaagggttttgggtgatgctcccaggatggtgggctccgatgggatctttggagggggtgtgtctaggtcggctggtgtcaggagggtcttttgtgtgccaggcagagaactgtcccgaagagctgagagtagaggggccaggagcttcagggctgcggccagactgtggcccagagctcagatcccaaaggacccataggagaggcaggggccactcattcactctgcaagagaccagcagaatcctgagggagatgctgacaaatcataaaaagaccaagaatagcccggagtggcggctcaagcctgtgatcccagtacttttttaagaggttgaagacaggaggatcatgttaa

SEQ ID NO: 13366 - DNA, 2850 bp, Homo sapiens
  misc_feature 1, 18, 2849, 2850: n = A,T,C or G
natatgagagccatgtgnggatctgtacggcagggtgacaaggagaagacaaagcaggaatgggggctgggttaagaaagacttgagagacactaacttgcttatcttgagtttctgtgttcatcttaaagaacagaaaaaggcatttgcttcatggtgatgaaaaaatcagagctagctgatattggaaactagcactcatttcatataaacagaatagagctgtacccttcaaactaagtcacagttactttcaaagattggcacaagggtctcaacacatcaagtgtatgttaggggctgggctccgttggagtcaaatcttcctggtaaacaaagctacactgcagtcatatttggcatatgtgacatataggcccactgcatttccttccaaaggcaagatgccaagggaaggtgccagtaattttatgaccaatatgacaccattttgtggtgtttgtaagttgaaacaatatatttccctgcattacacaagtttataaaaaacaaacaaaaaaaagaggccccagctgtggttgatcgatgatgaattgaatagagcctaaccttccaggcttctcacttgcacaggcccttccaaggtcctgggagggcccctggaaatttttgtagtcataatttttttaatgtttttactagataaggctcaggccccacaaaatcctgaaatcatccctgggttccaatagttacaacccagtaaatctcttgaatgaagcctctatgttattgacaaatactgactggccaagttagcagggtgatagggtcagtctattttgaatctgaaatccatctcaaagacaggccaagagcttattagtggacttaactggattctgctggcccaagcgcagtaaagtcaaacaaccatatcgaggttttgcactggggaaaggaggacatttatttgcagggcatccaagcaagaaggaccaggcggctaactatcaaagtccctcactgaatgggggcaataatcatatctcttacagatgaaatcatgaatgaaatggtttatggaaaagcagcaatggttgataatcctaaatgttaagtatgtttatattttttccctgactttaaagtgcttctccttcattcctatacacaggtccagactgatggcttattttttaaaatcttttagcacttcatgggtctaacattaatttagaaactggatgactttgcaatgtagaaaggctatactttattcagatagagtacactcacatattggcttgtctatggcacatcgatatcatgccaagaatgtaagcactaagagagaataagaggaaaatccaggctttatccctattgaattatttatcccactattagaatattagtgaggtaggtgtggccacactgtgatggcaaattgagcttcggtcacaaacatgccttactgttccccccagtctactgacatcagcttcctttacatagcggtagatgcacaaaagtttgcacagttgagggtattgtcatcatgttttggtatgtactggaatcctggcagcttcttctctgattcggagaggcgcaaacattaaagacaaaaagaacaactcgagtctgtcctttggggtgatttagggtggctgtttaaatttgtagtggttgaaaagtcttgagattgtcacacctagcaactcttatacttttcttctctcagctgcagcttgttcttttcacctgtgtaacaagctgtcttctcttctcacagaagcttagcatttcttcctctgccccatagcattttttcaatacttaatttaccaggtgctgtttatgttgtaggcacctaagtacttatacaagtgagataacatgtccgaagttcttagaacagtgcttggcctatggtaaatgctccatacatgttacctcctatgatacctcattttcatttttccaacaactcttgcgatgcggttattattatcatttctattttgcagatgaggaagttgaaactcagagacgctaggtaatttgctaaggttcacacggctaataagtggcagaaccacttacaagctttgcaagtaattttcaatgcagctcttagttctcctgtaataggagctgaatgatgacaatttggctttgtgtgcattgtatcttactttctaacttgaacaggacctgtagagcagtgagctccacttccctctgagaatcccacgcttctggagctcctggctgtaccagctctgggcatccccagggtttatgctcaccggtcagtgctggtgtgacatgatggctgagcaccggcactgtgtccagcgcattgctaggcactagacacgtgctctttcatttattcctcaaattgctttgtgctgtaaacgctacccagaaaggctcatgttcattactcaagtcacttcaccagaaagtgacagagccagaattcaaacccaggtctgccagattccaggtcccttgcttcttctgttgttgctcattgcaagggagtcttcttcaaggttattctcaggactttgattaagatacaggctcacagctgggcatggtgtctcatgctgtaatctcagcactttgggaggccaaggtgggtggatcacttgagctcagaagttcgagaccagcctggccaacatggtgaaaccctgtctctactaaaaatacaaaaattaaccaggcatggggacgggcatctatgatcccagctactctgaaggctgaggcaggagaatcacttgactccaggaggtggagtttgcagtgagccaagatcacaccactgcactgcactccagcctgggcaacagagtgagacttcatcnn

SEQ ID NO: 13367 - DNA, 573 bp, Homo sapiens
  misc_feature 573: n = A,T,C or G
actttttttttttttttttttttttttttttattttctgcaaatgctgatgtttaatgacctattctacttgaggaacctggacaatgaggattttctaaaatgccaagtcataaaacctcagacacttgcaaaataagagaacaaatatgcacggagctgctcagccactgatatgtcaactcctgggaacagctggtgtccacgggggagggggcagcatgtggccaggcatgtgagtggcttccactcaggagagcccctctgagcaggtcttgttcaggagttcaaaatatgtcttccagggcatggtttcaacagtgaagaagcaggttgttcagctccaggctttcttgaaaagggcagttgtcaatgtcatcttcaaatttcctacatacggtttggcgcagttgcagattcatggagaacaccatcttaccccgccactttctgtccatgctatcctccctccatgaactcaggacgcgcaacagcctgtaggcatgctcctccttgctctgcacgttgaaagtgttcaaggcaaactccactgtggcgaaaaacataggatccn

SEQ ID NO: 13368 - DNA, 478 bp, Homo sapiens
  misc_feature 474, 475, 476, 477, 478: n = A,T,C or G
actttttttttttttttttttttttttttttgagatagagtcttgctgttgcccaggctggagtgcagtggcatgatctcggctgactgcaacctccgcctcccaggttcaagtgattctctggcctcagcctcccaggtagctgggactacaggtgcacaccaccacacccagctaatttttgtatttgtagtaaatacagggtttcaccacgtgggccaaatggtctcaatctcttgtccttgtgatccacccacctctgcctcccaaagtgctgggattacaggtatgagccactgcgcccagcctataaatcattaaagctagacaggcaaaatttaccaatcttaaaaaaatgctatatagcatttatttagttaatagtctgggtcaaacattctgctaactgatatgcttatattacctcattaaatcctcacaacaattctatggaataattactattattccccnnnnn

SEQ ID NO: 13369 - DNA, 1876 bp, Homo sapiens
  misc_feature 1, 1869, 1870, 1871, 1872, 1873, 1874, 1875, 1876: n = A,T,C or G
ncctgggcgtgtatacccgcccttgcgcacagtagtggtttcccaccacgccatgtgttgtcgccagcctttcgtgtgtgtgtcgcccttcacacccaggggggctttccacaagcaccagaacctggttttcgctcacgctgttgttaagcgccggcgtcgcgttatatagattcactcttgggggccgcctgtcataaaaggcggggctgtctgctcctctgccccccgcgtagggattatttattgtgccccgccccccgttgcttttgtgctgcattctgctaggtgcttcgtcgttcatttatcgtcggtggggtgtcgtggtggtgttttttttttttttttttttcaggagtctcaccagtagaactttatagtattgcgtttcgattacatgtgtgtgaattttaaaaactgattaccctccagtaaaaatgtggaaccaatttgcatttggattaaaacattaggtttggggacaaaagtggaccccatgctgcctgagatgaagagagagagcaggatggcagaggaatcaccagctcaagaaaccccaagacttggacagtcttccagcagaagaggccagggtctctcagtgtactactccaaacaggcctctcctagagatgtagtctgggaaggtccaaaacccaccagacaggcacatccagtggggaaaagacttcccattccagtgtggcctgcatccctcacctctgcttcccagtcttctgctgacctcagaggagcagggtggccattgctgatctgggttagggagatgccagaaacacacccaggtttgaaccacaggttagtggtacaaagtcacagtccttgtgccttcagaaaacccagaggccccaaatacgagtgggaagagagttgggaaaaactgaaccagactcttccaatggccattaaagagaaaattcagcaacgcttgcctttgtctttgaccctgagaagttaagggacacagattgtggcgccgtgatggaacatggagggaaggcatggtgtgcttcctgcagagatgcctctggagtccctgtggccacgggatctcactggccccctcttcaggcaccttgatggggctcagtggggccaggccgaagggtggaagtagaaaagcatcaacaggctgtccagatcaattggcaccatccaaggccctgctgcacccacacatggaggtcaccagctcagccccaggggttctttcacacacaagctccttccctaaggagtcctgtggggttccacactcagtgtgctgcccaagtcagagatttaccacagatctgtctccccctcaacctggactcaagttactgtggtgagaaacctcactgtccatggttaactgaagaaatccctccttcagaaagaacttgagtagtagatgaggtggttagacaggatctttttccctcaagctgtttggacgccacagccaggaccaactctgacagctgcgagagagagagcccctccaatgtggaacctcctacacagccccccttttgggtccctggatatgagcccccagcaggaccaccactctagggggaagtctccctcccatccctcagatccccacattgttcctcctgtaggagaaaagtcagccctgcccctggagcttctccaagatggcactggactcgccgttatcttgaggagccaggagctgaaatggctccggcttagcaacccagtatggccaaagtggaaaggttctctgtcctttgcagtcaccaaaaaaaaaaaaaaaaaaaaaaaaaaaaaaaaaaagtatggtctcacaggcacagcatcttcttttaaaaaataaatatttataaacttaaggaagannnnnnnn

SEQ ID NO: 13370 - DNA, 439 bp, Homo sapiens
gcgtccgctcaaagaggctaaagacctctcctagtcactcagctatgaagcacagagctggggtttggaccctctgtgtttccaaagttcaggctcttgtttcccttacaacatgcagctgaaactggggctctgttttgtacagaagaacttcccaggatcctccatgccgtgactttcatcctggcccccacctgtgtgtgtgtttcctgcctgtccctgcaccacatacggaccccttacagggcgctgtggaagcaggaattcctgggctggaatgccagttctccacttggagctgtgtgacctcaggctggtgacttgacctctctgatacacatctatattgaatgtgtatctattgaatgtgtgtcacctgtaaaatggaaatctgacccacatttcagggctatgtgaaggataaacagttatgtgaagt

SEQ ID NO: 13371 - DNA, 467 bp, Homo sapiens
  misc_feature 1, 2, 3, 4, 5, 6, 7: n = A,T,C or G
nnnnnnncccccttttcagtttccagccaggagacaagggacgtcctgtgtgaactgtcagaccaccacaaccacactttggaggaggaatgccaatggggaccctgtctgcaatgcctgtgggctttactacaagcttcacaatgtaagtggactgggatcagcaagaacagggctcgcttcctgatggtgaccagcaaacagggtcaccaccaccctctccaagtgaatcgctcaccatgggggcagatgacaggttccaaataattgatgcaataggacctagcttggaaaactactttgtctagcataaccgtgctgaggccgagggggctcacagcctggcagccacacaacccccttggtatgcattggacactccacataccatgcagcaatccgatgtgctgagtgggcctgtgtggtttataaggaaaaaaaaaaaaaaaaaaaaaaaaaaaaaaagt

SEQ ID NO: 13372 - DNA, 473 bp, Homo sapiens
  misc_feature 464, 465, 466, 467, 468, 469, 470, 471, 472, 473: n = A,T,C or G
acttttttttttttttttttttttttttttctttttttttttttttttttttttttttttttttttttttttttttttttttttcttctccacacagaaacattaaaggggttcttttattttgaaaacagcaggaaaagacccctttcccttcaaaggaaaaaaaaaactttttttgttgcttaacccaaaccccaggggggaagggggggccctttggggaaagtaaagggatggggatttttgggggaaaatggcccccccttaataaccccttcagggggaaggaattgcaggaggttcctgggggacagtcacacagtttcccgaaccttgcccctttcctaactgaacactggtcaccggggtaacacatggggacttggccatactttttttaataaaggggaacccgtttactttggggctttttaaaaactttttgcagccctttaaacagctcnnnnnnnnnn

SEQ ID NO: 13373 - DNA, 498 bp, Homo sapiens
  misc_feature 497, 498: n = A,T,C or G
actgcggctgaactggcactcaaaccacaagactacagtccttcccatacttccctcccctttccataggaagaggagcctcaccctgtggtaaccaccaccacagacccatagggactactgccaggctactgccaatgttctcttgaagcccaagggctgcctgtaatcccaacactttgagaggtcaaggtgggcagaacccttgaagccaggagttcaagaccagcctggccaacatggtgaaactccgtctctactaaaaatataaaaattagccaggtgtggttgcacatgcctgtaatcccagctactcaggaggctgagacagaatcacttgaacctgggagacggaggttgcagtgcaccaagaccgcgccactgcactccagcctgggccacaagagcaaaaactccgtctcaaagataataaaaataatgacattggttttcaacttttagaatcaccctatagacaaagcatagaatgatataann

SEQ ID NO: 13374 - DNA, 410 bp, Homo sapiens
  misc_feature 409, 410: n = A,T,C or G
actttttttttttttttttttttttttttttttaggtttgctctttaacctcattactttcctttgctcacagaacctggaagcaacgttgacatttttttggacagctttgaccgggttttaatcccaaaaagaatcccttaacactgtggcacatgaggcacagggcacagtcacaggtcttagggactcatgatcctacttcagggagagctcaaaagggtaacatcatctgagaaggaacactggttccgaggggcaaaaatcacagtggctggggcagtccagaaagacagccgggaggaggtggacttgaactgactctgaaggagagggtaaaatctgaattggcagaaagcaggcaggaggccaatgggggtaaccaacaaggacaggtgccctgagacann

SEQ ID NO: 13375 - DNA, 7326 bp, Homo sapiens
  misc_feature 1, 2, 3, 4, 5, 213, 222, 418, 7325, 7326: n = A,T,C or G
nnnnnagagggagttgtacaacaaaatgaactttagatctcgaccaaattttgggagatcagggattctctggagggggtgctcctagaccttagcaaattgtcctgttggtttgagccatggagttagctcatgttggtaccaagcatggataggagatttgtcaaagatcagaggtatctccactcacaatccctccgtggttaccatccntcattcagnaaatatttacggactgattaccatacactaggcactattccagacattggagatacaatgatgagcataaaaaacggtctagataagaactgaggtctccagacatactttatgcccactcagttttgtcttttgccctagttgctaaacaaaacttaactttgctgtgcggtgcgacttcgttaacttaaaattnaaggctgtcagctatgaccgctagactctaagaaagtccagtggaatcccttcaatgaaaagaatctgttcttgggtggaagccccgctcatgcaggaggaacagagggcttccattctcgcgtcacacaactgagggtcaaccccttgctccctgcagtaagcctgattagtgggcggagcttccttcaggatcgcaagaaagaaaggaggaaggggaccccgcttcttacgtgctcgcgggggggggcggggtcggtggactgggcgtgagttaattggctggggggcggggcaccacgggttggctccgcccaggcgctcgcgcggatcccgggtggaatggcgggagggagtcccggccgctcctacctcccagcgatggcgtcgctgtgccgcgcccagtccccagcctgccggccggtactcaccgctacccggagttcgctcagacggtgagatttggggcgggtccgaggcagcggcgggacgtacctgcgaccgggaccatgaggagctgccagacccgtggggccggtaacgagagcagtcgcggcacctgctgagaggaaagagggagcggtcccgcgcggctggggcgcggcagaggcttgcccgatcctcggccatgtcactgctctgcgtgcgcgttaaaagggccaaattccagggttcaccagataaatttaacacatatgtgaccctgaaagtacagaatgtgaagagcacaactgtagcagttcgtggtgatcagccttcctgggaacaggatttcatgtttgagattagtcgcctggacctgggtctaagtgtggaggtatggaacaaaggactgatctgggacaccatggtggggactgtgtggattgcgctgaagactattcgtcagtcggatgaggaagggcctggggaatggtccacattagaggcagagacgttaatgaaagacgatgagatctgtggaactagaaacccaactcctcataaaattttgcttgatacaagatttgagttgccttttgatatcccagaggaggaagccagatattggacctacaaatgggagcaaatcaatgccttgggagctgacaatgagtattctagtcaagaagaaagccagaggaagccattgcccactgctgccgcccagtgttcttttgaagaccctgatagtgccgtcgatgaccgagatagtgactatcgcagtgagaccagcaacagcttcccacctccttaccatacagcttcccagcccaacgcttctgtgcaccagttccctgtgccggtgcgatcgccacagcagctgctacttcaaggcagttcccgggactcttgtaatgactctatgcaaagttatgaccttgattatccagagcggcgggctatcagccccaccagcagcagtaggtatggctcctcctgtaatgtgagtcaaggaagctctcagctaagtgaactagaccagtatcacgaacaagatgacgaccatcgggagacggactcgattcattcttgccacagctctcacagcctgtccagagatggccaagcaggttttggagaacaagagaaacccttggaggtgacaggtcaagcagagaaggaggcagcatgtgaacccaaggagatgaaagaagatgccacaacccaccctcccccagatctggtgctgcaaaaagaccacttcctaggtccccaggagagttttcctgaggagaatgcatcttcaccatttacccaagccagagcacattggatccgagcagttaccaaggttcgactccagctgcaggagattccagatgatggtgacccctctctgcctcagtggctcccggaagggccagccggagggctctatggcattgacagcatgccagatttacgcagaaagaagccactgccacttgtcagtgatctgtcactggtccagtctcggaaggcaggaatcacttctgcaatggctacacgcacttctcttaaggacgaagagctgaaatcccacgtgtataagaaaaccctgcaggccttaatctaccccatttcgtgcaccactcctcataactttgaggtctggacggccactaccccaacctactgctatgagtgtgaaggcctgctctggggcattgcccggcagggcatgcgctgcagcgaatgtggagtcaagtgccatgagaagtgccaggatctgctcaatgctgactgcctgcagcgggctgcagaaaagagctgtaaacatggagctgaggaccggacccagaacattatcatggccatgaaggaccgcatgaagatccgagagcgaaataagccagagatctttgaagttatccgggacgtcttcacagtgaacaaagctgcccatgtgcagcagatgaaaacagtgaagcagagtgtactggatggcacctccaagtggtcagccaagatcaccattactgtggtgtgtgcccagggcctacaagccaaggacaaaacaggatccagtgacccttacgtgactgtgcaagtcagcaaaactaagaagcgtaccaagaccatttttggaaacttgaatcctgtttgggaggagaagttccattttgagtgccacaactcctctgaccgcattaaggtgcgtgtatgggatgaggatgatgacatcaagtcaagagtaaagcaacgcctaaagcgagagtctgatgatttccttggccaaaccatcattgaggttcggaccctaagtggcgagatggacgtctggtacaacttggagaagaggacagacaaatcagccgtctcaggggctatccgactacaaatcagtgtggagatcaagggggaggagaaagtagccccataccacgtgcagtatacatgtctccatgagaatcttttccattacctcacagacattcagggcagtggaggagtccgcatccctgaagctcgaggagacgatgcctggaaggtgtactttgatgagacagcccaagaaattgtggatgaatttgccatgcgttatggcattgagtccatatatcaggccatgacgcactttgcatgtttatcatccaagtacatgtgtcctggtgtgccagcagtgatgagcaccttactggccaacatcaacgcctactatgcccacacaactgcctctaccaatgtctctgcatctgatcgctttgcagcctccaactttgggaaagagagatttgtaaaactgctggaccagctacacaactcactgaggatcgacctctctacatacaggaataatttccctgctgggagtcctgaacggcttcaggacttaaaatccacagtggatttgctgaccagcattactttcttcagaatgaaggtacaagaactgcaaagccctccaagagccagccaggtggtaaaggattgtgtgaaggcctgtttgaactccacatatgaatatatcttcaacaactgccacgacttatacagccgccagtaccagctgaagcggagctacctccagaggaacaagggcccagcattcggaacctggatttctggcccaagctcatcacactcatcgtgtcaatcatagaggaagataagaattcctacacacctgttctgaaccagtttcctcaggagttgaatgtgggaaaagtcagcgcagaagtgatgtggcatttgtttgcccaagacatgaaatatgcattggaggagcatgagaaagaccacctgtgtaaaagtgctgactacatgaacctgcacttcaaggtgaagtggctccacaatgaatacgtgcgggatctgcctgtcctccaggggcaggtgcctgagtacccagcgtggtttgagcagttcgtgctacaatggctggatgagaatgaggatgtatccctggaattcctgcgtggggccctggaacgagataagaaggatggattccagcagacatcagagcatgcactcttttcctgctctgtggtggatgtcttcacacaactcaatcagagctttgagatcatccggaagctggaatgcccagaccccagcatccttgcccactacatgaggaggtttgctaagaccatcgggaaggtgctgatgcagtatgcagacatcttgtcaaaggacttcccagcctattgcacaaaggagaaactgccctgcatcctgatgaacaacgtgcagcaactgagggtccagctggagaaaatgtttgaggccatgggaggcaaggagctggaccttgaagctgcagacagtctgaaggagctgcaggtgaaactgaatacggttctggatgagctcagcatggtgtttggaaacagtttccaggtacggattgatgagtgtgttcgacaaatggccgacatcctgggccaggttcggggcacagggaatgcatctccagacgccagggcctcagcggctcaggatgcagatagcgtactccggcctctcatggacttcctggatggcaacctcaccctctttgccactgtgtgtgagaagacggttctgaagcgtgtactgaaggagctctggcgcgtggtgatgaacacaatggagaggatgattgttctgcccccactcactgaccagacgggcacccagctgatcttcactgctgccaaggagctgagccatctttccaaactcaaggatcacatggtacgagaggaaacacggaatctcactccaaagcagtgtgcagtccttgacctcgccctggacaccatcaagcaatacttccatgcaggaggcaatgggctgaagaaaaccttcctggagaagagcccagatctgcagtctctacgctatgccctgtctctgtacacacagactactgacactctcatcaagacctttgtgcgctcgcagaccacccaagggtctggtgtggacgatcctgtgggagaagtctctattcaggtggacttgtttacacaccctggtactggggagcacaaggtcacagtgaaagtggtggctgccaatgacctcaagtggcagacagcgggtatgttccggcctttcgtggaggtgactatggttggcccacaccaaagtgataagaagaggaagttcacaaccaaatccaaaagcaacaactgggcccccaagtacaatgagacattccacttcctcctgggaaatgaggaggggcccgagtcctatgagttgcagatatgcgtgaaggattactgctttgcccgggaagatcgcgtgctagggctggctgtgatgcctctgagggatgtcacagccaagggcagctgtgcctgctggtgccccttgggccggaagatccatatggatgagacaggcctgaccattctccggattttatctcagaggagcaatgacgaggtggcccgagaatttgtgaaactcaaatcagagtctcgttccacggaggaggggagctgaacaccttcgactcctgtgccaatcaggcagcagcaatttcacaaatcagggccagtgggagttagctgtgtaaccggcttagggtctttgcagtcaagaggctgaccccttcagttaaagatatttaaggaaaaatttggggtggtgataatatggcttttcacagaaagggtcatgaagccctggcccaacaggactgtggtactaggggctgggatgtggggttaccacatggagagattttccattaagagagaaggacaaacatttctgagagtgtcagccattcttggtagacacctctccactcctcatcccacctctacccatctccatgccacaccttatccagttagacacatacataccaatcattagaagaacaagtttagaaggtgtggaacttgtgcctggctggctgggtagtcagctgagcctgttgctgagcccggtggtctggattggagtatggccagggcaggagtacacagaatagaatttagactgtcccttgagtagaatccactgattttctgtggctccagtgagaacaaggctttgaaactgaacaagataacttctagaaatgaactgtactaatccctttccccagattgtatcatgagtagaatcaggttcacgtggtgcttcaaagccctgagaagaatatttctttggaccccaggcactaggggccacctgcctgggagtctccctgcctcactcctctaggcaggggagtgatgcttcaggacgtgacaggctgttctaacatgtgtctacctgagggctagttgaaggatccaggagtattttcttcttgggtgggccctgaacaaagccaaaaattgtagaaaccagtctagaaaaagtcctgctcatctgtggccactgccttctagccgtcctccaccttgcagaaagaatctagcctttggtctctctctctctcatcggggtcatttgctattcccctctgatattcaaccctatagaaggagcctggactctgatccctctgtacaggctggatggaaggggccctccacacttcctgggaggtcagagacaaactgtttcagagagtcagatggacttcccaagacttgttgagagatgtgacatggttcttggatttcctctgtagcagcctcctggacttcctgaggactcgacattgtccacagatgtactggccattacatgaaacaagaaaccaagcatctttgctgttgttaattattatatgtgccattgttacaggagattataggctagtctgtaataaattatcttatagcaacaaaaaaaaaacctaaaaaaaaaaagccaaaaacacagggccaaaagaaccccttttgaaaactatagtgagtcgtattacaattcactggccgtcgttttacaacgtcgtgactgggaaaaccctggcgttacccaacttaatcgccttgcagcacatccccctttcgccagctggcgtaatagcgaaaaggcccgcaccnn

SEQ ID NO: 13376 - DNA, 672 bp, Homo sapiens
  misc_feature 670, 671, 672: n = A,T,C or G
actggatttctctccagttccagcccaccctccacaaaatggtatactatttgaaagcagagactgttgatcttattcactgaagtatttctatgtctagaattgtgccctgcacttagttgctactcaataaatgtttgcagagggacagattgacacatagtagatgtaaatgttaccagctctctgcaatgcagcacattgaccttccctagtcctatccaagaagtagattctagacatatcatgtcatgttatactttgcatatctctgttacccaggtaacagcaggtttctttgtatttgacatccctgcaaacttgggtgggcagcagagaaccatagcatagagggctgaggaagaagacgtctcgcagaaggcactgggaccaggggactgctgttgtcttttgctcactgtgtggcttagaaagcaaaagaggatcccagacactgtgcacagttatggtgtgagctcagccaagggggattggagcagatgatgaccaaatctgaaggccagccagtggggagggggttccagccatggggcttctgtcccaggaagggcgctcgtcctggatccagtaggaacaagcaagagagccaggctacaaaaagaaaccatgtaggttttcaaaaagaaaaaccatgtaggctttgaaccannn

SEQ ID NO: 13377 - DNA, 302 bp, Homo sapiens
  misc_feature 1, 2, 3, 4, 5, 6, 7, 297, 298, 299, 300, 301, 302: n = A,T,C or G
nnnnnnnacagacctcagcttgacattgccttggccaaagcccttgagtgggcccctcagtcctgttggttctggccttacattctactttgtccttccctgcacccgggccttgggtctatgaactgcttatttctccctgagcgatgattccactctttgtcccactggctgcctctcacactgcccattgtgctgcctggcatttatttccctccttcttaccatagggtagtcacaaatcagtcttaaaacataaggttttaaaacgggtattaagcctttgggaagccaagnnnnnn

SEQ ID NO: 13378 - DNA, 807 bp, Homo sapiens
cgggcaggtacgcgggatcctatgtatgcagtgtgctttttcttgccagcttgggccattcttgcttagacagtcagcatttgtctcctcctttaactgagtcatcatcttagtccaactaatgcagtcgatacaatgcgtagatagaagaagccccacgggagccaggatgggactggtcgtgtttgtgcttttctccaagtcagcacccaaaggtcaatgcacagagaccccgggtgggtgagcgctggcttctcaaacggccgaggtacgcggggattccccagaccttctgcagattctgtggttatactcactcctcatcccaaagaatgaaatttaccactctcctcttcttggcagctgtagcaggggccctggtctatgctgaagatgcctcctctgactcgacgggtgctgatcctgcccaggaagctgggacctctaagcctaatgaagagatctcaggtccagcagaaccagcttcacccccagagacaaccacaacagcccaggagacttcggcggcagcagttcaggggacagccaaggtcacctcaagcaggcaggaactaaaccccctgaaatccatagtggagaaaagtatcttactaacagaacaagcccttacaaaagcaggaaaaggaatgcacggaggcgtgccaagtgggaaaaaacatttaattgaaaatgggaagtgaaatttgcacaaaaaattactgaagaaatttcaggctatttaaaaccatgggccatgagaaggcttgaaaagaatgggatcaatttgggacttaaaagccttaaata

SEQ ID NO: 13379 - DNA, 722 bp, Homo sapiens
  misc_feature 1, 722: n = A,T,C or G
ngtggctgaacaccacagcctcagctgctcagagcctggggcccatgatcggctgtgactctggtcctgcacagcagggggaaccagtccccactgcccacactcaagtaagaggaaaagtctggcagtcctccccagggcaaacctgcccttgagccagccaaactgctgtgtaccttcccctgagcaggagagatccttgaaccactgagtggcttacataccctcaggctggtagagtggctatgtgtctgtgcccaggtcccgagaaacagcccactgggtgacttctggcagacacagccccaggctgaccgagcatctgtgtgtctgcatcccctgcctgagaaacagctccataggctgcccctggcaaatacatccccaggctgacctagcaactgtgcatccttgtcttaggtctgagaaacagccccatgggctgcccctaccaaatatcctcctaggctagccatcaatattctgggtctgagaaacaaccctgcaagccacctctggcagaaatgcccctaggccagctgagcagctgtgtgcacctgtcccaggcctgagaaatagccctgtgggctacctccagcagacacacccaggccagctgagaagctgtgtagccgtgtactggaccttagaaacagtccttggcaggtactcccccaggctggactagcagctgtgcacctatgcccccagcctgaataacn

SEQ ID NO: 13380 - DNA, 987 bp, Homo sapiens
  misc_feature 985, 986, 987: n = A,T,C or G
gctttgagaatgcaatgaaagctacagcaatatcaccagaaaaatacacattcccaaagcaaacatggacacatttgcaggggattcaatgattcccgggttaagattttctggtttaggtccaagagggtaaaaaatacatgacaatccagacggaatggttattggctttgtaaaaggatttattgtaggattcccattgcaactttcccagtatcattaaaatcggattccatttacaaaaactgactttatttagcacatttcaagaacacattttatttcattaaagcaagcctcttttaacaaaacatatttatcaaatgcccattatgtgcctaataaggtggtgggtgctgcgaggaacaaaagaagcttaacatgtggtccctgccctctgcgtttctttctaattggaaaggcaagtgaacaaggcagcatgagatgtattagcgctatatgctgatataatcaagtactaaattgtgtatgcttgtgtgggtgggcgcacaagcctcacatatcattctctgaccttgaattgtacacaaatcattagcgtcaaactggaattgccgactgctcccccacccttcgtcttcgcttggctgacttccatcacagcctctccctctatgtctgaaacatactttagaaaagaggggtgaaacaagacagtgaggaagagagaagaatcaataaagaaaaaaataggtcacctgtctgtggttactgccgcaaatagattccatcttgggcggggtctgacccaggagcccccaagctccgtgaaaacctctctgggggacacacagcagcttatcttccttgtttacaaattaactgccttctgttggtgactgaatctgaagaggcagagggatggtgcaaagaaggcctggctaccaggaataggcactcagccacaccgaaggtccaaactttgttctggattcactgcctaaatccatgtgcattttacacnnn

SEQ ID NO: 13381 - DNA, 417 bp, Homo sapiens
  misc_feature 415, 416, 417: n = A,T,C or G
actttttttttttttttttttttttttttttgcgggaggataaagatttttagaataaagatgataatttatgtttccctgctttttactctgaattgttcactttgaactgaaaactataaacccataaaaaatattttattttaactgatttttctcacatggacaatgctatgttagacatagaactccacaaatcatccattcccaaccccttgttttatacataaaattgatacaggaagggggcagggaagtgctgtgtagagaaagatggggtccctggctagggctccacccctgggcctgtgcccatggacctagtgaggacaggcatttttgttttcatgcccaaatgttgcattgtctaagaccaccctggcccaccaccttcccattctttgcctataaaaannn

SEQ ID NO: 13382 - DNA, 417 bp, Homo sapiens
acgcggggaattcgcagtgatgtgaaactggcctcccaagccctgataagtaagttaaattagagtaggagccaggagggaggttctttactcttgaattaagagaaggggagctggaggtggctcaggtagagtgcgtaggtttgcagaactgggcctgtgtgtgtaaagtggctaaggcaaaggagtggaagtttgggagaagtttaagagaagaaatggacatgattgcctaaatcagccaaatacagggtctctacaggagaagacgagatcgccccgatagtttgagagtaaatgggttaccagaggaagagctaagcaacatggccaacgccctggccagcgccacttgcgagcgctgcaagggcggctttgcgcccgctgagaagatcgtgaacagtaatggggagctgt

SEQ ID NO: 13383 - DNA, 3563 bp, Homo sapiens
ggcaaacggcagccaagaagctgtgcaagtagacacttaatgggacatgttagccaaatctgtaagagcaaaatattggccagttattaattctacacaataaataactggccaatatttattgtgtagaattaataattttaataataatggaaattgggtaatggatgggactgcagcaataaggttgtagtaatccaccatgaggcacacttttttttttccaggtttaaggataggaaagattgggctgttcaatggagaaacaagggtataatcacccctttattaattagtaagttttaatccttgaatacctcatattaactgttttaactggaggtccatggggcatcattttatcaagctagtttataactgccaaagactgactttaattttaatttattatttgttttattagagtgtctgtgttcaatatgggatattagggcgttgggtactatgaccacaggaaatttagacaggctacagttaaagtgaagcataccttacccatccaccccccattttatatttagttgcctttttaaaaagattataggggtacaatgtttagatttagtgggatctccaggtataactgtaatttgagccccagtgttaagactatgaagctttgtcaatgggtacattttagcaaatgttacaattaatttagaacctaagttatggagacacaaaagccaataggcacccttttatgttttggttaaatgtttcagtatatacatcttatttatttgtaatattagtatataatttgttgtatacatttttagtgtataagcattggatttctaattggatcagattagggaccttccgtttagctgcatatgtacatatacatgtacaatttattatatatttgcgttaaaatagcctatctgcatgtgtatatatgtgtgtatgtgtatgtatatgcactcacacgcataaatacacagtctatttagttacctttaatgttttttcccttgtacctaggctttttctcgctttttcctttttttctgattttgtggcaatttagttggaaggaggcggtcccagcatgttgacaggcagggtgttcagagtgcccaggcacactggtggggggtggttacaggctcacgtagctcaggggcttctgcaggtctcaggggagtgggaacaaagtgtcccaccccttccccttttcctcaaacctcaagccactggtctctatggatagatcctttgcatcccacctgattgaggaatgagtcacaacagctgcaaggctcttaaagcaacatttaaactttttggcggctgtcatttctgtgaggagggtgcctctcaccagccgcatggccggaggatccctgcagcgctttggagaccaacacccagatcctttgcccaggagtgcgattaattcctcactggatgctgggggagggcccctcaggtgagcagcccaccactgacttcagcgttgctggctcggttatcagactctcatccaacacaagctcacagggaaagccgttccttgctccttgtggagggagctaccgtcattgccctgagaccaccagccaagaaagtaggtatgtccaggtagggaattcagagggacccagtgcatccaattatacaattatacccagaaggtcctgtgtaggggactgcgattgacatcaccctagtctgcagcaccaaggactgaatgagctcagtcctcttataatttaggctggactgtcacagacactggcagacacagcatacgtggtgcagccaaagtgcaaacatgccagcagcggccatgctccccagggtgggggtccagttagtaagccacgcgcagccaagaggcgaggcatgccctgtgccacacacggactcaccctgctcactgtgcccgtggtatcgaaatgtacccacgtttaattcataaaggagaggctgctgtcattgaaagaaaagtttgttacttgcatttctggagaaaaggagcgcaccaggccacgcagggccacaggaggaggacgcaccagagtggtcaggaggcagaactaggcgagcagctttccactgtgtctccatggcaaaggcgaagatgggcgggggcagagtgtaggattggcaggtttgaatgtcttgggcagtagctacaggggtggtctccagctgcctggtgcctggccctgggtgatcagggtgaggggatactgccttctgcagtggaagagtcaaatcgaggagatggactctgagttggttagtgtgcaaaggtgcactcccaagggacccctttgctatctctaagaattggcctgccctgggaagggcagtctctccccagtcagtgaggtccccaagatgtgaaaacattatacattataaaaaagcatgattaatataagctcattctagcatttcaggttacagcttctagaagaggtttgtagtctcaaatgagtaggtttttcctctagagaggggcgggcctggaccttcaagcaccccttggtgtgtttaggagctcaggagcagaagcacctgcctgcagccctgcagctaaggaagttctctcagtcactcagagcagggaggggctgagagagtcatgtgaggctcccggggtactacgacagccctcgaggtgaaggattggccctgatcataatagagaaccctgaggaagtttactgtcatgagtctcggctggttggcgcatgtgacctttgaaggatgaagatggagtttgcaacatgagtatctctaaccttttgcttttcagggatcattttcaaaaattgcattggggccttcgttatttaccatagtattttcactttcatagttttgtcacctttttgtactgtgaacagttcaaccagtgaccgacttctctctcatgctgtttaccccacacacaatttcccactcaattctgaaaataagaacctgttaataggttggaaagctgtgtactctattcatatattgttctttcatgctagtggagagtggtgtcattagcatcttaattttagagttgtgaaatgattttaccaattaggaattgaatgtgtattttttttctgtttaataagaagagcaaatttgaataaataagctggtgtagataaacttaataatcatgctttttcttgtttggagataggtgatgtgttgtcatatcctgtgatacaggtcactcatctggccttctgtttctgaagtttaagtctggtttgaatatgtaataatactactcagcatttcttgttgcctaagtgagacgaaacttaaatgttatgatatttacttcatgtattcttgtactgttcatttcaattaattggtattgtatatctaatatgtgatatttgaactgaataaaacttacagtgttgtaaatgttctttaataaataatcacacctaagtaataggctagactgatgagaaattagatcaaatcagtgcctaggcctttgtgtttgtgtcgtagggatgtactaacacatcaccacagactgacggcttttcacaataaatcag

SEQ ID NO: 13384 - DNA, 863 bp, Homo sapiens
  misc_feature 1, 2, 3, 4, 861, 862, 863: n = A,T,C or G
nnnnagcgtccgcgcgacgggggttcagggaatatttactgggcctctccgctccctctgctcttggaggggccgtgaggtcagttagctacgtgcagcgcgtggcgctggagttcagcgggagcctcttcccgcacgcaatctgcctcggagacgttgataacgatacgttaaatgaactggtggtgggagacaccagcgggaaggtgtctgtgtataaaaatgatgacagtcggccatggctcacctgttcctgccagggaatgctgacttgcgttggggttggagacgtgtgtaataaaggaaagaacctgttggtggcagtgagtgctgaaggctggtttcatttgtttgacctgacacctgccaaggtgttggatgcttctgggcaccacgagacactaatcggagaggagcagcgtccagtcttcaagcagcacatccctgccaacaccaaggtcatgctgatcagcgacatcggtgggcatgcctacctttgcaggcagccaggagagtaggagtcagtggatactagagcatatcccaagggattggggtgagagggagaatccgtattcatgtatgcatttgttatgtgctgagctcccatgataagccaggcatcactcaaggcactggaattgccatagtgaataaatagtcaaaaataaaaaaaaacctgggccttattatgaagaaacagaaaagaaacaatataggctaggtgtgctgcctctcgcctgtgataccaacgctttgggaggctgagatgggaggatcacttgaggccaggagttccaggctgtagtgagctatgatctcaccactgcactccactccagcgtgggaccctgtctctannn

SEQ ID NO: 13385 - DNA, 612 bp, Homo sapiens
  misc_feature 607, 608, 609, 610, 611, 612: n = A,T,C or G
accttcccattttggctggaaagaattttataaacaagttagtctcaaacactgttaataagaaaaagctggccgggtgcgatggctcgcacctgtaatcgcagcactttgggaggctgagatgggtgaattacttgaggccagaggttcgagatcaacctggccaacaagacaaaaccccatctctactaaaaatacaaaaattagctgggcatgatggcatgcttgtgatcccagctacacaggaggctgaggcatgaagatcgcttggacctgggaggctgagattgcagtgagccaagatcgtgccactgcactccagcctaggtgacatagcgagactgtctcaaaaaaaaaaaaagaaagaaaaagaaaaaagaaaagaaaaaggtaagatgtcttggtatttaggaaaaactttatgggcatgagatttcttagctaaactgaatgctgttaacataaaattatatacccacgtgtattacagatttaatatggtagcttattagtaacattaattaaatggcagatatgggtgatagggaaatttttaacaggctccttttttttttttcccacaatagtggtgaattataagttaaannnnnn

SEQ ID NO: 13386 - DNA, 1067 bp, Homo sapiens
  misc_feature 1066, 1067: n = A,T,C or G
acgcggggagggacccgcagctcagctacagcacagatcaggtgaggagcacaccaaggagtgatttttaaaacttactctgttttctctttcccaacaagattatcatttcctttaaaaaaaatagttatcctggggcatacagccataccattctgaccgtctgctagctcagctacagcacagatcagcaccatgaagcttctcacgggcctggttttctgctccttggtcctgggtgtcagcagccgaagcttcttttcgttccttggcgaggcttttgatggggctcgggacatgtggagagcctactctgacatgagagaagccaattacatcggctcagacaaatacttccatgctcgggggaactatgatgctgccaaaaggggacctgggggtgtctgggctgcagaagcgatcagcgatgccagagagaatatccagagattctttggccatggtgcggaggactcgctggccgatcaggctgccaatgaatggggcaggagtggcaaagaccccaatcacttccgacctgctggcctgcctgagaaatactgagcttcctcttcactctgctctcaggagatctggctgtgaggccctcagggcagggatacaaagcggggagagggtacacaatgggtaccagagaagctgagatatggcatataataggcatctaataaatgcttaagaggtggaatttggtcaagaaaatatacaacaccctcctgctgcgacgctccgtccaccatgcgctaagagtaaccgtgtactagctgctacaacgaaaccctaggggcaagtccagtagcgagggaactcccacacaaaacaggcagggcggacaacagcggcaactgacccaacacacagtgtctggagcaaccggctagccaaggacgtcagaacagaccaagaaaccccagcaggaaaaacgaaacacaaagcgaggagcgccacaagccaaacacagcaagcagcagccgagcaagacaaccaagcagcactaaccacactatcaacacgcgacaagcagatcaggcgcgaagacgccagnn

SEQ ID NO: 13387 - DNA, 1006 bp, Homo sapiens
  misc_feature 1, 2, 3, 4, 5, 6, 7, 8, 9, 10, 11, 12, 13, 14, 15, 16, 17,18, 19, 20, 21, 22, 23, 24, 25, 26, 27, 28, 29, 30, 1006: n = A,T,C or G
nnnnnnnnnnnnnnnnnnnnnnnnnnnnnnaaaacagtgacccttttgcataagccagaagagcagtgccttgcttcctgtgaaaaatgcttggcagttagcctgtgtaattatttagcaatcatgttaatagatgtttaagaataatggaactggagctgtactgagccaaggatggaaatgaagacatgtgagactatttttccttcatccaccgatactcttcagttacaaggatttaatttaaaagggttttaattaaatggaatccagaagctttggacgctccagtttttcttcttagagacaaaccctagctcagtttcctggagcttgactcagaatgcagcatggtactccggactgacagtgtgccagctttattcacttatctctctaccttttggcttgcatttatttcagggctggctgacattttgaccttatgtacaaagatggccgatacgattatttttcatcatatattacagaaaatactactcttgaaaaatactctgagaaatatgttctatggtcagataagtttgggaaacagtgaattattgttcctcctttgcagaatcacaatgcactgttagctaattaaagactctcagatgtcccactggaaagaatcatgtttagctttgtttaacctagcatttcccaaacttattagagcataaaactttgtttttgtttttttttaataagataggtagctatttccttagaacacagtttgggaaactttttgttcatttgttttaataagataccttaggtagctatttccttagaacacgagccgggtgcagtggctcacgcctgtaatcccagcactttgggaggcccaggcgggcggatcacctgaggtcaggagatcgagatcatccggcccaacatggtgaaaccccgtctctactaaaaagacaaaaattagccagccatggtggcaggcacttgtagtcctagctactgtggaggctgaggcaggagaatcacn

SEQ ID NO: 13388 - DNA, 1593 bp, Homo sapiens
  misc_feature 1, 2, 3, 4, 5, 6, 7, 8, 9, 10, 11, 12, 13, 14, 15, 16, 17,18, 19, 20, 21, 22, 23, 24, 25, 26, 27, 28: n = A,T,C or G
nnnnnnnnnnnnnnnnnnnnnnnnnnnnatgaattaaattcttgatgtcatctccaagaactctgcctaattgtaggtcacgaagattttacctatattttattttaaaagtttaaaagtttttatgttttacatttaggtctatgattctttttgaattaattttttgtataaaatgaacatataggtcaaacatttttttcctgcatatggatgtctaattgtttcagcatcatttattgaaaattctgtcctttctccattgaattattttttcatctttgccaaaattcaattgatcttattttgtggatctatttctgaactctttattatatttcacatagatatatagacagatagatacatagaatgtgtctctccttttgccagtacttttttttttttttttttttttttttttcagcacagaaaacattgctttattaactgcgtttgccaacacacgaggagtgcaaagggctccctatgacacaagccctggtggggccggggtctggaagcccccatgagtgagcaggacaggatggggctgggaactatgcagcagcggcaacacagaatcatgcagggcacagcgggcactggccacacccaggtgaccatacattctattgctcgttaagggttgcgcacatggacaatgtacaaaaaggagaaataggtctttgcgttaatgaaaaatacattttttctctacaaaggaatcttttctaatacaagaaaataaatattgcaacataagccaaaaataatttaaaattgctcttttcaatatattttcaatatttctcttgtatattaacaaatggcacatcactttctttgaaacaaagacagaaggtgtctcctcctgtgacattcatatcatccccccaccgtcccctcaaactgacgtggaacacaaagtgtttgtgcctctgagggagaaagtggcaggaggtgccttaaagaacaaccaaaggtctcagactccagccctggctcattggccaatgtggccagcgaggccaagggcatgggagagtgccctccccaagggccttgctatagaaatccagatcatttttcagtggtttgcatatggacaaaggttggccacatctggcagttagcaaggaaatgccaagttcagccgctgccaatgttggttagaattgggcagttgaatctctaggaattgtcccagctagtcccacagtgtgcccatactcagtatacacaggcatgcttgcatacggacacacgagacgtggcctggcacaccccccacaaacaattcaacatctatgtctggaaacctggggtggcttctccaaggaagctgaggcccttacattgcaaatgctcacacactgtcactaagtcaggctcatttaataaaataaacccttctacctttcttcttctcatttgtttcaaaatacatttatgatacataaaaatacttttcttgcaccccacgcgtccgatgtggagaaagttgctgaataaccatcatgatgatgcctctaaatcctcctgttctagagagctgcagttgggctttgctagaagacagatgaatttaga

SEQ ID NO: 13389 - DNA, 677 bp, Homo sapiens
  misc_feature 1: n = A,T,C or G
ngcactaatcatggggaaatggatggcacagaaaatggtgagcttgtcccccctccttccctgtctggtcaccgcccacccgttcctttcctcttcctcgtttcttttttttcttaatcccataaacacagtaaagccatttcttagtacctgttttgtttcctgattattccaggattctctcactagaccctaagcctctcattctgctgtaggtcagattctctattccttctccctagcccagagccttgccagcacttgcgaaagttacggttagaacgttcccttgcctagtcacctctttgaaaaaaacactgtgatgttacatgactgcgattcaaatcagacactgtctgcttcccacatgtatctcagacaggttttatttaatgtttcttgtcagaatattgtaaattcaaaaggatgactttaaataaatgtaaacaaagacaaacttgtggtctttttgtctggaattactttcacaagagatggagcttgcaggggaatttactgtctgaccagttactaatgtgagcccttgccccaccctctccttttcttaatttcttctgtaggcctcttctcggttattagtccgccccaccagctccgaaacaccgagtgcagccgagctcgtcagtgcaattgaggaactcgtgaaaagcaagatg

SEQ ID NO: 13390 - DNA, 441 bp, Homo sapiens
  misc_feature 433, 434, 435, 436, 437, 438, 439, 440, 441: n = A,T,C or G
actttttttttttttttttttatttttttttttttttttttttttttttttttttttttttttttttttttttttttttttttttttttttttttttttttttgggaattttcccccaaaattaaggggggggtttaaaaaaacaagaaaaaggggtgtttaaaaacatcgctttgggaaaaggtttttaaaaaacctacgaaatttccccccaaaaagccggatggcccaccttgggggaacaaaaaaagggttttttaaaacagaaaagttaaaaaattttttttacggaaccctattgcgcaaaaaaatgggggggggaaccaaaatatttttcaaaaccccttaaaaatttttggaaaaaaatggggtggaaagactttaaaaccccctccccaaaaggggtttttggcccctcaaaaaccccaattannnnnnnnn

SEQ ID NO: 13391 - DNA, 464 bp, Homo sapiens
  misc_feature 1, 2, 3, 4, 5, 6: n = A,T,C or G
nnnnnntttttttttttttttttttttttgaagagacagggtcttgttatgccatccaggtggctagcgaattcctggcttcaagcaatcctcctgctttggcctccgaaagtgttgggactacaggtataagtaacgtcgccccagccccagcatgcatttataaagcacaaatgggacaggctcatgcaagggtcttacaagaccacgtggacagataggaagttatctagacatcaggaaacttttgaatttcactccatgtaacattctcaggaaagaaaaaaattaatattacacattgctttccaaactattttctacagaaccccagttcaaagaagcactttgtgtgtcacccagaaagcgcaggaccagttgatgtcatctcccaactcagcactctgctccattaacatggacgactctaaacacctgatataagatcagccaccaccaccacc

SEQ ID NO: 13392 - DNA, 1726 bp, Homo sapiens
  misc_feature 1: n = A,T,C or G
naagttagaaacaggcaggctggagtgcagtggtataatcacagttcactgcaaccttgaaatcctggtgtcaagtgatcctcctgtttcagccttctgagttgctgggattacagacatgcaccaccacgaccagctaatttttaaattttaacttttgtagagatggggtctctttatgttggccaggctgtctcaaactcctggcctcaagcaattccccctcttgggcctcccaaagcactgggattataggcatgagccactgcacccggcctattctgttctttaccttttatttttaaaaaatcattccctagttctactatctctatattcaaaatcctctttcccactataaatccactatctgaactccaaatatcaccaagaaccagaattccataaagtacaggcaatgtagatacgcaaacatggctctgagaatcttactgcctgtatttctcactctctatggttttcagctacacccctcttgccataattgtgtgcccttaattaaatctaagtttccagccattttttttaatgtgaaaactcataacaatgtccttgggtttatagcaccactattgtcatagcatgttattcaacctcagctagtgcttgacttaacagaaaattctgagtttcatattcattgtagtaacatcagttgtggaaacaaatattgtgctatttgcctttcccctgctgttcctcgatctcttttcagcctcaaaggctgtctggtacacttggttcttgtgccaggatggaagacacaagatgagtcctcagagacgtggtgtcaaggagtccatgttttctttcctctaagtgcagacagaatgactctctggaaggagcatacatgagctggcagttagagacagcacagctcagaaacaactgtgctggagggacatgaagaaaggcaatgatttctctttcccaatatgtggcaattttcagatgtcaaaggaataacagacagatataccctatgaaaggatttgatttgtggcaactgcttttcttttcctgattccattaatgccaggtttcttggccttaagcagagagccaggtattttctttttatttagtgctccctgggcagttattatctgtatcaattttcctttatccaggttaattctcttaaaaatacatgcctttcagtcactgtattgtatttaaccaaaatatctgttggtacaacatgctcttgtagttcatctaaggcacctttaagtcacagagttatttttaaagtatatgagttacttctgattataaaagtaattcaggttcactgtaacaattggaaaagagcaaaaagaaatgaatagctcataatgccaccaatcaagataagctctagtaacagactgcatatttataaaattgggatcatcctctatatattgtttttatatacttgtttttcagttaacatatgaaaattttcttatgacattaactcctcttcagaactatgtggttttttgttttgttttgtttgagacggagtttcactcttgttgcccaggctggagtgcaatggcgtgatctcggctcactgctgcaacctccacctcccaggttcaagcgattctcctgcctcagcctcccaagtagctgggattacaggcatgcaccaccatgcccggctaattttgtatttttagtagagatagggtttctccatgttggggaggct

SEQ ID NO: 13393 - DNA, 1927 bp, Homo sapiens
acgcggggtgttcattgagggaaaccttattttttaactgtgctatggagtagaagcaggaggttttcaacctagtcacagagcagcacctaccccctcctcctttccacacctgcaaactcttttacttgggctgaatatttagtgtaattacatctcagctttgagggctcctgtggcaaattcccggattaaaaggttccctggttgtgaaaatacatgagataaatcatgaaggccactatcatcctccttctgcttgcacaagtttcctgagctggaccgtttcaacagagaggcttatttgactttatgctagaagatgaggcttctgggataggcccagaagttcctgatgaccgcgacttcgagccctccctaggcccagtgtgccccttccgctgtcaatgccatcttcgagtggtccagtgttctgatttgggtctggacaaagtgccaaaggatcttccccctgacacaactctgctagacctgcaaaacaacaaaataaccgaaatcaaagatggagactttaagaacctgaagaaccttcacgcattgattcttgtcaacaataaaattagcaaagttagtcctggagcatttacaccttggtgaagttggaacgactttatctgtccaagaatcagctgaaggaattgccagaaaaaatgcccaaaactcttcaggagctgcgtgcccatgagaatgagatcaccaaagtgcgaaaagttactttcaatggactgaaccagatgattgtcatagaactgggcaccaatccgctgaagagctcaggaattgaaaatggggctttccagggaatgaagaagctctcctacatccgcattgctgataccaatatcaccagcattcctcaaggtcttcctccttcccttacggaattacatcttgatggcaacaaaatcagcagagttgatgcagctagcctgaaaggactgaataatttggctaagttgggattgagtttcaacagcatctctgctgttgacaatggctctctggccaacacgcctcatctgagggagcttcacttggacaacaacaagcttaccagagtacctggtgggctggcagagcataagtacatccaggttgtctaccttcataacaacaatatctctgtagttggatcaagtgacttctgcccacctggacacaacaccaaaaaggcttcttattcgggtgtgagtcttttcagcaacccggtccagtactgggagatacagccatccaccttcagatgtgtctacgtgcgctctgccattcaactcggaaactataagtaattctcaagaaagccctcatttttataacctggcaaaatcttgttaatgtcattgctaaaaaataaataaaagctagatactggaaacctaactgcaatgtggatgttttacccacatgacttattatgcataaagccaaatttccagtttaagtaattgcctacaataaaaagaaattttgcctgccattttcagaatcatcttttgaagctttctgttgatgttaactgagctactagagatattcttatttcactaaatgtaaaatttggagtaaatatatatgtcaatatttagtaaagcttttcttttttaatttccaggaaaaaaataaaaagagtatgagtcttctgtaattcattgagcagttagctcatttgagataaagtcaaatgccaaacactagctctgtattaatccccatcattactggtaaagcctcatttgaatgtgtgaattcaatacaggctatgtaaaatttttactaatgtcattattttgaaaaaataaatttaaaaatacattcaaaattactattgtatacaagcttaattgttaatattccctagacacaattttatgaagggagaagacattggtttgttgacaataacagt

SEQ ID NO: 13394 - DNA, 2008 bp, Homo sapiens
aagaacattttattgctaagcatatccttgaacgaaaatgcaaatatgaactaagaaaagaaaaaagaaaaagcagtaatgtcacaacatcattaaataaattcctttaggttctgctaataaaacaggaatatgatagaagctcacatagagaatgcacatgttcccataaaattgtccaaatagaaacttacactgaaaggaatataacaaatgtattattacttaaattgaaaaaaatgaaagaaagcaggaaatcaattcacaagacctcaagactccaagaacagcaatcttttacagacatcgagatataatcaacttcgtataggctgggccgtttaggttatctaaaatcgtgctttgatatctctttataatcctgtcttttttaatgataacaaaaaaattaattaaactcttaacacattgaaatattagataatgaggaacacctctttccacacacattagtaaaggctaccatttagattgcactttttgccccatgtcgttaagatattttttcaaagtcaaatattcatgcaacttacaaagaccagcaagagtagatttctaaatctaagcagctgattgattttcatctgtacaaaagaaattgtatatatgaccctccagaggacacacttcatttttgtgtgaatatttgtcttgctttgtctcttgcttttcggatagctatggccatacaaccagtttattgtttttctgtacattgtttcctctttacaaaaagaaaaagacaaccagaatataaaccaaacagaaataaacaggaaaaaaacatttcttaaagcagtatgtacataggtggctaaggaattataccagcaaaaatgtagtaaaatatgtaaacaaaatctgaagtttttttttttaattctctttgacacagttaactgtgacaaaactaaaattcacactttcttcacattttaaggtttgcttttttgttgttttgctattttcttttaaaacaacattctcattccattttaagactttaacagatttcctgtgtcagtcatcccatcaaacataccatgataaatatatctgtatatatatttatttatatatatattacactattaaattccttttgtgtgtgtgtcacagcagctttattcatttatttgtttttaaaaaagatgggtgaagagagaagtgagcaaatggaaggacagagttatccataaatgtcaggctacaaaattaaaccactatgaaaaccattgtcacattcggggcggggaaagaactatgtgttttgtactctggcatgacatggttggcttgtgtgaccttttgtggttccatcacgagttgaactcccctactgtctggtttgataacagactttaatattgtcttttttatttgcatgcatttcaatcagtcacagatccagcccacctccccttcctcttccctaggaaaggctgttttagtttgtggggctttcctctttaacacaatttggctgggtgaatggacaggaacaatattgttacgtaaagccaatagctctgataacaccagccctaaacccatctgttccgggtttgggtggtaaattctgaaattagatcctgggggaccagcttttcgaatcaatttatcatccgtcacatgaattttgctatgtgttcagcaaagcatcttataggaaacaaacaacagattctagagacaccataacctgatatgtagagtgaacaccatgatagcttttgagttcatatggcaatagtctctctcgcttttgttttgagtttttttcctcttctgatgtccagtcattatcaaaaaaataaacaaaaacccaaaagccatttttcccctcagatcataaagttacacgcacactggtcagaaccagataagggttgtgggttttttttttttgtttgtttttgttttttggtgtttttttcttttttaacttttttctttttttgttgttgtagttttgttttttacataa

SEQ ID NO: 13395 - DNA, 326 bp, Homo sapiens
actgccgtagccgctcctcccgcagctgtgccgcctccttgtcctcctcctcattgtcactgccaaacaggtcaatgtcatcatcctcgtcatcctctgctggtgtggctggcttcttggctgggggctccacttggcgcatgggagatacgtgctgggtctgtggggccgtgggctacggtatccggaagctacagattcagtgtgtggtggaggacgacaaggtggggacagacttgctggaggaggagatcaccaagtttgaggagcacgtgcagagtgtcgatatcgcagctttcaacaagatctgaagcctgagtgtgtgt

SEQ ID NO: 13396 - DNA, 557 bp, Homo sapiens
  misc_feature 1, 2, 3, 4, 556, 557: n = A,T,C or G
nnnngtgatgtgacatggagaagtgaccaacacaactttgccaactatactccattcttagtaactgccgattaggaaggatttctttctaagtctgtcactaattcaactgttattcacaagagaagtagaggcaaatgatagcagcttgatcgttgatttttgatttagatgatcaatgatgttcagaatagtgtttgtatgtgtgagcatggatgtgtatgtcgtgtgtgtgtctgtgtatgtggtgtgtgtgtctgtgtatattgtgtgtgtgtgtgtgcatgcgtgtgtgcagggtaggtatcaccacattccctgtggtggtgtgtctcttctctgggattggttcttctagaatctcccaccttttagaaccactttaagatatttatttattctctccaaccatcctggcaatctttttatccttaaacaggaataaattcctacagctgaatctattcaggatttctgtgtgtatgtgtgaaaatttatatgatgctcaatcctttaaaaatcttttattcaagtaactttaaaagtaaaacacaann

SEQ ID NO: 13397 - DNA, 275 bp, Homo sapiens
atgcttttcataatttgtcaggccaaccttgacaccatattttggcagttcgtgtgcatacgctgcgcagactatcatatccccctctatcccgcgtacccaggctttggcattattggatgtcaatagcattgtttttgtcatgtagctgttttaagaaatctggcccagggtgtttgcagctgtgagaagtcactcacactggccacaaggacgctggctactgtctattaaaattctgatgtttctgtgaaattctcagagtgtttaattgt

SEQ ID NO: 13398 - DNA, 1128 bp, Homo sapiens
  misc_feature 1122, 1123, 1124, 1125, 1126, 1127, 1128: n = A,T,C or G
acctgactcctgactcagaacacgctcttgaagatgttgatctaaacaaagtttacatcctcggtgggcttgtggatgaaagcattcagaagaaggtgacatttcaaaaggcccgggaatactctgtcaagaccgcacgcttgccaatccaggaatacatggtcagaaaccagaatgggaaaaactatcattcagagatactggccatcaatcaagagactcacaactggcctgaagcattgaagaaaggagtttcttcaggaaaaggctatattcttcggaactcagtggaatgatgggcctaaaattgcagctgcgtggccaggtgctcacgccgtaatgccaacactttggtagaccgaagtgggcagatcacctgaggtcaggagttcacgaccagcctggccaacaatggtgaaacccttctctactgaaaatacaaaaattagcagggcatggtggcaggcgcccgcaatcccagctaatctggaggctgaggcaagagaattgcttgaatctgggaggtgcaggttgcggtgagctgagatcgtgccatcgcaccccagcctgagcaacaagagtgcaactccgcctcaaaaaaaaaaaaaaaaaaaatcgccccctgcgtctagaatgcccagcttttaacctctcaccactgaattcctgtttgatcttcagggttcagttcaggagcatcttggcccttccccatcccaggccacagcagagcccttctgtttcccattttactgtgttcctttctgttgcaccctatccattcataggcctgtatctttcagggtaggctgaggtccttgagagcaagcagagcctgtgtccttgcctctccccgcaagaccttagtaccacatatggtgcagaataggtttgttgaacgaaagattacagaacatccttttcatttactcgttctttttttccctctgtggtcactgtgttttctgtttactctctaacagtgtttgatatcctgtccacttacttagagactcacaactggcctgaagcattgaagaaaggagtttcttcaggaaaaggctatattacttcggaactcagtggaatgatgggcctaagattgcagctgcgtggcagaannnnnnn

SEQ ID NO: 13399 - DNA, 423 bp, Homo sapiens
  misc_feature 419, 420, 421, 422, 423: n = A,T,C or G
acttttttttttttttttttttttggagaaggagttttgctctgtcgccaggctgcagtgcagtggtgtgatcttggctcactgcgggctccacctccaggttcaagtgattctcctgcctcagcctcccgagtagctgggattacaggcacccgccaccacgcccagctaatttttgcatttttagtagagacggggtttcgccatgctggcctcgacctcccaaagtgctgggattacaggcgtgagccaccggacccggcctcattttgttttttctactttggtaaactttgggaagaagaaaaccccaaaattattttagtagtcagcaaacatgatgatgggaaccccatttaggcacgttcaccattgggaagctcaggctgtcacctggtgacagactggtcaaggaaaannnnn

SEQ ID NO: 13400 - DNA, 351 bp, Homo sapiens
  misc_feature 1, 341, 342, 343, 344, 345, 346, 347, 348, 349, 350, 351: n = A,T,C or G
nctttttttttttttttttttttttttggcaggattttaatcatttattcattccttcagcgagcggcacttcctgagcagccactgtatgctaggagctggcaggaggcccttgaacactctggactcagtctagtgctagattgatgatcaggccatgacgatgccaggtgtgcatgctgtggagcctggaacaagtgccaagcctggtgggccttctggaggaggtgcctgctacacccagcctggcaggaggcagacgatcaggtgttattaaaaaaaaatttttaggctgggtgtgggggttcatgcctgtaatcccagcacttttggaggctgannnnnnnnnnn

SEQ ID NO: 13401 - DNA, 427 bp, Homo sapiens
  misc_feature 419, 420, 421, 422, 423, 424, 425, 426, 427: n = A,T,C or G
actttttttttttttttttttttttttctttttttttttttttttttttttttttttttttttttttttttttttttttttttttttttttttttcttttttttttaggccggggggaccgggggttttattaaagcaggacgtgaaaccctttactttttgaaggaaaaaaaggggggtttttaaaaaacgggggaacccaggaaaaaagtttttgcttgtaaaaccctaattttttaaaaaatttcccccaacactccccaaagggggcttttttttgaaggggacatttgacccgggccttttttccccccaaactgggcccaaaaagtttgggggggggcataaaattgggcaagccttactttgaacaggggttcattaataaaaaaaaagtttaacctttaaaaaacaaaagnnnnnnnnn

SEQ ID NO: 13402 - DNA, 597 bp, Homo sapiens
  misc_feature 1, 2, 597: n = A,T,C or G
nnccgtccatctcctgacctcgtgagggccccgccttggcctccaaaagtgctgggaattcaggtgtgttctactgcgcccagtcaggatcccactgtgggttggctaattagcaacagctccaatcatcatgctctctcaagacaatatttaaaggctggaagggctgctttgttcacatttttcttttaaatagagagaaaacttggaagcttgcagtaatcttcctgtaacattttgttggctggattacaccacatgcccatttctaagccagtcactaggaaagcaaatgtaattactgtgattagcttagaagaatgatttctctttttgagatgggatgggggtaatggaatactgaatacctaaagaaacttgtgtttctgcagcaagaaagaaaaaataatgcttatgcataggaagccagcaatgttttctgcagggattcattggaaaattttgagcaggggagtcacaagattagatttgagtatcagggcatactggttatggtataaggcagagattggcaaacttttcctgtgaagtgacagatagggaatatgttaagccgctgggcatggtggctcacan

SEQ ID NO: 13403 - DNA, 347 bp, Homo sapiens
  misc_feature 1, 2, 3, 4, 5, 6, 7, 8, 9, 345, 346, 347: n = A,T,C or G
nnnnnnnnnccgcgagaggctcaagtgttatgagcaggaactgtagaggtccagccagttcatcaaagaggtaatcaaaggcggcaacgcgcttatcagcgctatgagaaattattcttcagctgttcagaaattttcccagacgctgcagtcatttcagtctgaattcattggagacactctgactgacgatgaaattaacgtggctgaatccttcaaggtaatttgttgaattgctcatcgaggtagaaaatgagagaatgatgatggtacctgcccgggcggcgtaccacagcgcgtgtagcgtccggagtcgcacaaaacacgtacttacggcgtcgaacnnn

SEQ ID NO: 13404 - DNA, 1812 bp, Homo sapiens
  misc_feature 1, 2, 3, 4, 5, 55, 56, 57, 58, 59, 60, 61, 62, 63, 64, 65,66, 67, 68, 69, 70, 71, 72, 73, 74, 75, 76, 77, 78, 79,80, 81, 90, 1812: n = A,T,C or G
nnnnncctgtgtgtaaaacgaacggaccagtagcctggcgcctacggtcttcctnnnnnnnnnnnnnnnnnnnnnnnnnnngccaaaaantgtttgtacctctgggccatattgcagaaccctgcccttctttgttgactgaggaaagctcgctccctgcccaggtttttcattgttgatcgaaattaacaccaggtggtgaatagagcccctcctaaggttgctcaggataaatcatttattaaataggtctgcttatcaggaggggcgtgaaggctcccaaaaggaaatgctggcacctgggcccagaagccagggcctctaactcctggggttgatttcttcagtgaagttgcaccctacaaagggaatatggccaaagcggcactcaactgaaggctgatatcaggcgattagacagccatgcattctgcgtttgtctggaatggattgtagagagatggacttatatgaggactaccagtccccgtttgattttgatgcaggagtgaacaaaagctatctctacttgtctcctagtggaaattcatctccacccggatcacctactcttcagaaatttggtctgctgagaacagacccagtccctgaggaaggagaagatgttgctgccacgatcagtgccacagagaccctctcggaagaggagcaggaagagctaagaagagaacttgcaaaggtagaagaagaaatccagactctgtctcaagtgttagcagcaaaagagaagcatctagcagagatcaagcggaaacttggaatcaattctctacaggaactaaaacagaacattgccaaagggtggcaagacgtgacagcaacatctgcttacaagaagacatctgaaaccttatcccaggctggacagaaggcctcagctgctttttcgtctgttggctcagtcatcaccaaaaagctggaagatgtaaaaaactccccaaccttttaaatcatttgaagaaaaggtcgaaaacttaaagtctaaagtagggggaaccaagcctgctggtggtgatttggagaagtcttgaattcggctgcaaatgctagtgccaccaccacggagcctcttccagaaaagacacaggagagcctgtgagattcctaccttgtggtctgctacccactgccagatgcttgcaagcgaggtccaagcccatcttgtcagcatgccattgccttgaatttctaccagatgtgcttttatttagctttacatattcctttgaccaaatagtttgtgggttaaacaaaatgaaaatatcttcacctctattctgtgggaaacaccctttagctgtacatttatgttcctttatttaggaaacaccattataaaaacacttatagtaaatggggacattcactataatgatctaagaagctacagatgtcatagtggttttcctgctttacaaaattggctcagatctggaatgccagtttgaccttggtcttctataatatttccttttttcccctctttgaatctctgtatttttgattcttaactaaaatggtctcttaatttcctgatcctggtcattcacagtggcgttgtttctttacccccaggggagaactcttactccacacaatttgggtagcctgtgtgggctacaggcgcatttggtgcgaccccccgggaaagcgggtcccattagttggggcaaaacttttcaacccgggggggggcgcaatatattaacgcgggggcgcgccggtggtttcctaactaccgcggggaccaacccgcctggggacggccggcgacggaacaattggtgctan

SEQ ID NO: 13405 - DNA, 239 bp, Homo sapiens
tatgtgatcgagaggatacacgctcatcacagagctctagccgctcccgggcctttacacatttctccaactgctcgcattgctctctcactgttgttaggggatccactaattcctcctcttcctcttcctcctcctcaggatctccggattcggtaagcatcttttgctcgtcccccagtcccatgtctggctacggttctagattcaacacgagcagcaacagcggcacctaaccc

SEQ ID NO: 13406 - DNA, 2426 bp, Homo sapiens
  misc_feature 1, 2425, 2426: n = A,T,C or G
natagcgccgggcagagggacccggctaccctggacagcgcatcgccgcccgcccgggtcgccgcgccacagccgctgcggatcatggaacatctaaaggcctttgatgatgaaatcaatgcttttttggacaatatgtttggaccgcgagattctcgagtcagagggtggttcacgttggactcttaccttcctaccttttttcttactgtcatgtatctgctctcaatatggctgggtaacaagtatatgaagaacagacctgctctttctctcaggggtatcctcaccttgtataatcttggaatcacacttctctccgcgtacatgctggcagagctcattctctccacttgggaaggaggctacaacttacagtgtcaagatcttaccagcgcaggggaagctgacatccgggtagccaaggtgctttggtggtactatttctccaaatcagtagagttcctggacacaattttcttcgttttgcggaaaaaaacgagtcagattacttttcttcatgtatatcatcatgcttctatgtttaacatctggtggtgtgtcttgaactggataccttgtggacaaagtttctttggaccaacactgaacagttttatccacattcttatgtactcctactatggactttctgtgtttccatctatgcacaagtatctttggtggaagaaatatctcacacaggctcagctggtgcagttcgtgctcaccatcacgcacaccatgagcgccgtcgtgaaaccgtgtggcttccccttcggttgtctcatcttccagtcatcttatatgctaacgttagtcatcctcttcttaaatttttatgttcagacataccgaaaaaagccaatgaagaaagatatgcaagagccacctgcagggaaagaagtgaagaatggtttttccaaagcctacttcactgcagcaaatggagtgatgaacaagaaagcacaataaaaatgagtaacagaaaaagcacatatactagcctaacagattggcttgttttaaagcaaagactgaattgaaggttacatgttttaggataaactaatttcttttgagttcataaatcatttgtacccagaatgtattaatatattgctattaggttaatctgttaactgaatgctttgatcagcattgaggtgatgctcacctccgaggacctcagaactggtgcagcttctctctccctccctcccacagactgaacctttcgccagaagctgtccttataacgccttatacgcatacacagccaggaaacgtggagcattgtttctcacagagagtctccaaataaaaagggttttgttcagattaaaatgtttacaacaaaatgttaattatattctaaatacagggtatgttctaatctatattaagcaataatgccagtgcataatcattccatttgttcctttagcaatcaaccccagaaaatattaaaatgggatcatacacagaagatagaaaaatctagcaaaacttctctttctgtaagccagagtcttgtctatcagattcccacaaccactcctgattctaaatttagtgatatggtaatgaaattggtatttattttaaatattagttattctaaggagaaaaaaatgcttctgcaagattttcataattcaggggctgtggataggattgttcctctgtttccctaatcattcatctgttcatgtctccctcttgtgccagtcagcctaggttatacagatgccatgctccacaccacgagcagtgtacaaatctggctgcccgtttactttctgagcaagcactggagtccactccgacctttttctttgaacatgcatgctgctggaatatgtataaatcagaactagcagaagtagcagagtgatgggagcaaaataggcactgaattcgtcaactcttttttgtgagcctacttgtgaatattacctcagatacctgttgtcactcttcacaggttatttaagtttttgaagctgggaggaaaaagatggagtagcttggaaagattccagcactgagccgtgggccggtcatgagccacgataaaaaatgccagtttggcaaactcagcactcctgttccctgctcaggtatatgcgatctctactgagaagcaagcacaaaagtagaccaaagtattaatgagtatttcctttctccataagtgcaggactgttactcactactaaactctaccaagaatggaaaccaagaatattttctgaagatttttttgaagattaatttataccctataaaataaaacttgttagcttcgatgtagctgcacttctccgccctattaataagtttgggccgaccggctttatcatgcccaaggtttcccggccaaaaagaaggctactcggttcccgagccgttaacgcgaagnn

SEQ ID NO: 13407 - DNA, 514 bp, Homo sapiens
  misc_feature 311, 312, 313, 314, 315, 316, 317, 318, 319, 320, 321, 322,323, 324, 325, 326, 327, 328, 329, 330, 331, 332, 333, 334,335, 336, 337, 338, 339, 340, 341, 342, 343, 344, 345, 346,347, 348, 349, 350, 351, 352, 353, 354, 355, 356, 357: n = A,T,C or G
  misc_feature 358, 359, 360, 361, 362, 363, 364, 365, 366, 367, 368, 369,370, 371, 372, 373, 374, 375, 376, 514: n = A,T,C or G
acgcggggatcttaaaagaggttctttctctgggatgtggcatgagcaaaactgacaagtcaaggcaggaagatgttgccatcacaactcattgggtttctgctgctctgggttccagcctccaggggtgaaattgtgctgactcagtctccagactttcagtctgtgactccaaaggagaaagtcaccatcacctgccgggccagtcagagcattggtagtagcttacactggtaccagcacaaaccagatcagtctccaaagctcctcatcaagtatgcttcccagtccttctcaggggtcccctcgannnnnnnnnnnnnnnnnnnnnnnnnnnnnnnnnnnnnnnnnnnnnnnnnnnnnnnnnnnnnnnnnnctgcaacctatttctgtcatcagagtagtagtttaccgcacatgacctttggccaggggaccaagctggagatcaaacgaactgtggctgcaccatctgtcttcatcttcccgccatctgatgagcagttgaaatctn

SEQ ID NO: 13408 - DNA, 538 bp, Homo sapiens
  misc_feature 1, 2, 3, 4, 5, 6, 538: n = A,T,C or G
nnnnnngcaaaaaacttaattttcgtgtttagtaatcaaaatatataatactcaacttttttgattaattatatacaatgaatcattgtaattataactaactttgtacagtatgttaatatccttatggttacaagaaattaaaaaaagttttaatttacacatattttagagtgaccaattttagacttttaagcctaagattacatttggataaaatttggaagctgaggtataaataaagatataattttaagggaaaaaagaattaatgtgaaatgtccaagcatcaaaaaggaacttgttcatgtatttttatgtcaatattggaggacataaaatcactaatagttttggccaggtgcagtggcccactcctgtaatcccagcactttgggaggccgaggtgaacggatcacttgaggccaggagtttgagacagcctggccaacatggtgaaatccccttttttactaaaaatacaaaaattaaccaagcatggtggtgggtgcctgtaatcccagcttctcgggagacn

SEQ ID NO: 13409 - DNA, 1150 bp, Homo sapiens
  misc_feature 1149, 1150: n = A,T,C or G
acgcgggggtctgcaggttgtgcttccggtgcggaggtcagggacaagatggtgccaccggtgcaggtctctccgctcatcaagctcggccgcccgggcaggtacgcggggctgagcagtcggctgtgactctcgacaatgtaactctgcaaatcgatggagtcctttacctgcgcatcatggacccttacaaggcaagctacggtgtggaggaccctgagtatgccgtcacccagctagctcaaacaaccatgagatcagagctcggcaaactctctctggacaaagtcttccgggaacgggagtccctgaatgccagcattgtggatgccatcaaccaagctgctgactgctggggtatccgctgcctccgttatgagatcaaggatatccatgtgccaccccgggtgaaagagtctatgcagatgcaggtggaggcagagcggcggaaacgggccacagttctagagtctgaggggacccgagagtcggccatcaatgtggcagaagggaagaaacaggcccagatcctggcctccgaagcagaaaaggctgaacagataaatcaggcagcaggagaggccagtgcagttctggcgaaggccaaggctaaagctgaagctattcgaatcctggctgcagctctgacacaacataatggagatgcagcagcttcactgactgtggccgagcagtatgtcagcgcgttctccaaactggccaaggactccaacactatcctactgccctccaaccctggcgatgtcaccagcatggtggctcaggccatgggtgtatatggagccctcaccaaagccccagtgccaggactccagactcactctccagtgggagcagcagagatgtccaggtacagatgcaagtcttgatgaggaacttgatcgagtcaagatgagttagtggacgctggagcttggcccagggagtctggggacaaggaagcagattttcctgattctggctctagcttccctgccaagatctggtttccatttctttatttgaactttagtcgtgtataaactcaccagtggaaaccaaaaaaaataaataacaaaaaaacctggggccaaatcgcgggggcgcacaaaggttcgacacgggccctggccaaggggtcccggaccnn

SEQ ID NO: 13410 - DNA, 1547 bp, Homo sapiens
ccgggccggtacgcggggggagtgctcccaaccagaagatgagggaaatggagataatgaagcacgtccctcctaccaaacacgataaattctacaggcactgtaagatcaagaatttaagattatttttgtcccaccctattttacagagtaatcaagtcagaggattatatgacttttatctgcctagagaagaactatggatctacaacatggagactggaagatggaaaaaaatcaacactgaaggtgatgttcctccttctatgtcaggaagctgtgctgtgtgtgtagacagggtgctgtacttgtttggaggacaccattcaagaggcaataccgataagttctacatgctggattcaaggtctacagacagagtgttacagtgggaaagaattgattgccaaggaatcctccatcatcaaaggacaaacttggtgtctggtatataaaaacaagttaatattttttggagggtatggatatttgcctgaagataaagtattgggaacttttgaattcgatgaaacatctttttggaattcaagtcatccaagaggatggaatgatcatgtacatattttagatactgaaacatttacctggagccagcctataactactggtaaagcaccttcacctcgtgctgcccatgcctgtgcaactgtcggaaatagaggcttcgtgtttggaggcagatatcgagtaagtattcaaacgacttcaatgacttgcttttgaattcttcaaaatgataacttaattatccttttttaggatgctagaatgaatgatcttcactatcttaatctggatacatgggagtggaatgaattaattccacaaggcatatgcccagttggtcgatcttggcactcactaacaccagtttcttcagatcatctttttctctttggaggatttaccactgataaacagccactaagtgatgcctggacttactgcatcagtaaaaatgaatggatacaatttaatcatccatataccgaaaaaccaaggttatggcacacagcttgtgccagcgatgaaggagaagtaattgtttttggtggatgtgccaaccacttgcttgtccatcacagagctgcacacagtaatgaaatactaatattttcagttcacccaaaatctcttgtacggctaagcttagaagcagtcatttgctttaaagaaatgttagccaactcatggaactgccttccaaaacacttacttcacagtgttaatcagaggtttggtagtaacaacacttctggatcttaaggcttcataaataatgcctatgatcaccttgcatggacagcaatcctgtaaacatcacagagtggcatcatttgtataattatatgcattgttgtagttgcacctttcgtttaattcaatccatcaatctctactatttgggttaagttacataatgtttacccgtcaaaaaaaaaaaaaaaaaaaatgtggggggcgaaatttaaactcttggggggccaagaaaaagggaggcaaaaggagaaggggttccaaaacgg

SEQ ID NO: 13411 - DNA, 689 bp, Homo sapiens
  misc_feature 679, 680, 681, 682, 683, 684, 685, 686, 687, 688, 689: n = A,T,C or G
acgcgtccgcctgcttccagccttctggtggaccaggccctgccacaagtgagagttggccggttgggtatctggtttagtcactcgcctccacactttcacatcctctatcaacacctgcacacttgggttgtgaccacacgtgctcctccccctgccacagaaagtgccattcagaaagctcgccagcgagaagagagctccacgctcagcctcagaagaaagacgttcaacgacttactggggagagaaagaaaaggaacgggagctgagagctgggagtggagtatgaagaccaaggaattctcttaaagacctgagcagttatctggaactcctcacaaaatcacagtaatggatattatttcccagttcctactctacactgggcatagatgttatggacatcttctgagtcccacaacacccctgcaaggcagatatgatacactcctttcacctatggagaacggaggctcaaagaggctaggtgaccctcaggaaacacagatgagaggtccccgcccagtctgcccagctctgaaatcttccatgccaactcccttagggcgatcctgagtctagcctgtacaggcagttcatgtggttgtatttgaataaaatccctttcctccagaataaaaaaaaaaaaataaaaaaaaaaatgaaaaattgaaannnnnnnnnnn

SEQ ID NO: 13412 - DNA, 3088 bp, Homo sapiens
  misc_feature 2879, 2880, 2881, 2882, 2883, 2884, 2885, 2886, 2887, 2888,2889, 2890, 2891, 2892, 2893, 2894, 2895, 2896, 2897, 2898,2899, 2900, 2901, 2902, 2903, 2904, 2905, 2906, 2907, 2908,2909, 2910, 2911, 2912, 2913, 2914, 2915, 2916, 2917: n = A,T,C or G
  misc_feature 2918, 2919, 2920, 2921, 2922, 2923, 2924, 3083, 3084, 3085,3086, 3087, 3088: n = A,T,C or G
cgaagagaaggcgccaagacgccttccctccaatacactacaatacccaggacgctttgctacaatacctctccggggttggctggggggcgcctccagctgcgcaagcgcatagggatgcgcccttcgtggactccattgcgcagggtgcattgccctgaagagcgctactccttccggtgaaagtcgtcgggttcccagccgggagtctgcggagttctcatactctgttacccagcttcctttgtatgagggctgtgcgcacttccggtggaagcgctgaagcgagtgggtggagtttacggagccggtgggcggtaggcggtgctacgggtagctgggtgctgtccaaaggcgacagggcgtcgttaggggagcgagtcgtgaccggttgggccacactcaacgtgggacgaagcttcgcctactgtttgactacgtgcgtgcagcctcccctcgatgtcggccctcgaaaagagcatgcacctcggccgccttccctctcgcccacctctacccggcagcgggggcagtcagagcggagccaagatgcgaatgggccctggaagaaagcgggacttttcccctgttccttggagtcagtattttgagtccatggaagatgtagaagtagagaatgaaactggcaaggatacttttcgagtctacaagagtggttcagagggtccagtcctgctccttctgcatggaggaggtcattctgccctttcttgggctgtgttcacggcagcgattattagtagagttcagtgtaggattgtagctttggatctgcgaagtcatggtgaaacaaaggtcaagaatcctgaagatctgtctgcagaaacaatggcaaaagacgttggcaatgtggttgaagccatgtatggggaccttcctcctccaattatgctgattggacatagcatgggtggtgctattgcagtccacacagcatcatccaacctggtaccaagcctcttgggtctgtgcatgattgatgttgtagaaggtacagctatggatgcacttaatagcatgcagaatttcttacggggtcgtcctaaaaccttcaagtctctggagaatgctattgaatggagtgtgaagagtggccagattcgaaatctggagtctgcccgtgtctcaatggttggccaagtcaaacagtgtgaaggaattacaagtccagaaggctcaaaatctatagtggaaggaatcatagaggaagaagaagaagatgaggaaggaagtgagtctataagcaagaggaaaaaggaagatgacatggagaccaagaaagaccatccatacacctggagaattgaactggcaaaaacagaaaaatactgggacggctggttccgaggcttatccaatctctttcttagttgtcccattcctaaattgctgctcttggctggtgttgatagattggataaagatctgaccattggccagatgcaagggaagttccagatgcaggtcctaccccagtgtggccatgcagtccatgaggatgcccctgacaaggtagctgaagctgttgccactttcctgatccggcacaggtttgcagaacccatcggtggattccagtgtgtgtttcctggctgttagtgacctgctgtccacccctcctcaacatcgagctctgttgtaaatacgtcgcaccagaggccactgtgatgccactgtctcctctccatcccgcccagccatgtgacactggctcccggtagacgggcaccccgagatgtaccaaccttttcatgtattctgccaaaagcattgttttccagggcccttgaccaacatcggcttccccagtccagggctcccctgctcctttcccttccctgtactggggtagctcctgcctgctctccctgcgttgcctagggtaaagcctccagatttgccatactgagcccctcttcctagcatcaggcgatacatctgagttcaaatgtcttcccaggctcagggacctccattccttgagattgtcttggcatggcccagccctgcctcatgggatggacaatgcatggggtggtctttatttttccctttcaaataaaacactagtcaggtaccgttttatcccagtcgtactcttccaggtttggaagacccagagaggccaagatcccatccttagccatagcgagcggtggtggtggatagcatcacaagaaacgagcctgaaaatcaggtccagccggtccaagcacatggcctcccatctgggagagcccactgtcccactcccacatgtctgggcacctgccctgggctgaggccaggctgctccaggggcctcctgcgccctcacctgccacagagcaacccaggttaaatacagcccatgcacaaagccacaggccaaagcctatggaattgtttttaatcatcaaatttaaccattttcataactggttcctggaggtgtgcagtgcccccttgcctcttcaaacctacagcttctctttgccatttgtggatttcacatcactccacacagaaacattacagcctggcatccccagtctttgccttcttccagctgcctcgacacagcactgtggcctgtccctattgcccaggcacgccatttccaagggcaggaaggggcagtgtcctgaagcccatcttttctgtgactgtcttaggtgatgtgtagccccctccacctttccactcaacaacctcccacccctgtcctgctgcatggtccggagtctgggacctactttgttttttgttatttatgaccttgtttaaagaaaataaatatctcccaacctttaaaaaaaaaaaaaaaaaagggggggccgttgaattagcttaaaaaaaaaccttccaaaccttccccnnnnnnnnnnnnnnnnnnnnnnnnnnnnnnnnnnnnnnnnnnnnnntgggggggggcgttaacattttttataaaaaaaaacttccccccctccccctgaaccgggaaaaaaaaaggaacgccactggggggggaaaacttgtttttggggctttaaatgggtccaaaaaaaaggagtggctccaaaatttcccaaaaaaaagcnnnnnn

SEQ ID NO: 13413 - DNA, 1128 bp, Homo sapiens
  misc_feature 1, 2, 3, 1125, 1126, 1127, 1128: n = A,T,C or G
nnncaggaaagctcaggcaagcccaccctcaggcattacagctagactccgagcttactgggcagtcatctgattcgaccaacatcagttcgcagggcttaagcccagtcccttacggcggctggggagggaccaggcccaagtatataaagctccctgagggtccgcgttggctttgcgcctgtgagtgtgattcaagaacgtcccagtgcccttggctcctttcggagtgtgaccccgtgcttgcacgggacacgttacccagctcgggtgagaagggtatcttccgggaacctcgcctttaatagcacaacgagcgcagagtccactggatctgcgagaagaaaccgcgctaactagtttgtccctacggccgcctcgtagtcactgccgcggcgccttgagtctccgggccgccttgccatggctgcccgtggtgtcatcgctccagttggcgagagtttgcgctacgctgagtacttgcagccctcggccaaacggccagacgccgacgtcgaccagcagagactggtaagaagtttgatagctgtaggactgggtgttgcagctcttgcatttgcaggtcgctacgcatttcggatctggaaacctctagaacaagttatcacagaaactgcaaagaagatttcaactcctagcttttcatcctactataaaggaggatttgaacagaaaatgagtaggcgagaagctggtcttattttaggtgtaagcccatctgctggcaaggctaagattagaacagctcataggagagtcatgattttgaatcacccagataaaggtggatctccttacgtagcagccaaaataaatgaagcaaaagacttgctagaaacaaccaccaaacattgatgcttaaggaccacactgaaggaaaaaaaaagaggggacttcgaaaaaaaaaaaagccctgcaaaatattctaaaacatggtcttcttaattttctatatggattgaccacagtcttatcttccaccattaagctgtataacaataaaatgttaatagtcttgctttttattatcttttccccaaaaaaacaaaaaaaaaatttggggcgcccgcccggaaatttaaaacacggtggggcggccaagannnn

SEQ ID NO: 13414 - DNA, 2139 bp, Homo sapiens
  misc_feature 1, 2, 2139: n = A,T,C or G
nncacccacgcgtccgccgagccctgagcgccggcgcgggaccgagctggcggcgggcggcgcgcgccttccgaggcttcctgctgcttctgcccgagcccgcggccctcacgcgcgccctctcccgtgccatggcctgcaggcaggagccgcagccgcagggcccgccgcccgctgctggcgccgtggcctcctatgactacctggtgatcgggggcggctcgggcgggctggccagcgcgcgcagggcggccgagctgggtgccagggccgccgtggtggagagccacaagctgggtggcacttgcgtgaatgttggatgtgtacccaaaaaggtaatgtggaacacagctgtccactctgaattcatgcatgatcatgctgattatggctttccaagttgtgagggtaaattcaattggcgtgttattaaggaaaagcgggatgcctatgtgagccgcctgaatgccatctatcaaaacaatctcaccaagtcccatatagaaatcatccgtggccatgcagccttcacgagtgatcccaagcccacaatagaggtcagtgggaaaaagtacaccgccccacacatcctgatcgccacaggtggtatgccctccacccctcatgagagccagatccccggtgccagcttaggaataaccagcgatggattttttcagctggaagaattgcccggccgcagcgtcattgttggtgcaggttacattgctgtggagatggcagggatcctgtcagccctgggttctaagacatcactgatgatacggcatgataaggtacttagaagttttgattcaatgatcagcaccaactgcacggaggagctggagaacgctggcgtggaggtgctgaagttctcccaggtcaaggaggttaaaaagactttgtcgggcttggaagtcagcatggttactgcagttcccggtaggctaccagtcatgaccatgattccagatgttgactgcctgctctgggccattgggcgggtcccgaataccaaggacctgagtttaaacaaactggggattcaaaccgatgacaagggtcatatcatcgtagacgaattccagaataccaacgtcaaaggcatctatgcagttggggatgtatgtggaaaagctcttcttactccagttgcaatagctgctggccgaaaacttgcccatcgactttttgaatataaggaagattccaaattagattataacaacatcccaactgtggtcttcagccacccccctattgggacagtgggactcacggaagatgaagccattcataaatatggaatagaaaatgtgaagacctattcaacgagctttaccccgatgtatcacgcagttaccaaaaggaaaacaaaatgtgtgatgaaaatggtctgtgctaacaaggaagaaaaggtggttgggatccatatgcagggacttgggtgtgatgaaatgctgcagggttttgctgttgcagtgaagatgggagcaacgaaggcagactttgacaacacagtcgccattcaccctacctcttcagaagagctggtcacacttcgttgagaaccaggagacacgtgtggcgggcagtgggacccatagatcttctgaaatgaaacaaataatcacattgacttactgtttgagttttatgtatttctttattttaatcaggatcttctgatagtggaaatttttagtacataatagaacttatttatggagttagaaatttgtagtgttatccaggattgattttcatttgatcacatctcacagtaattaatattttcaagttttttttttattaacagctctgtgctagttttttttttctgttttagcctcatcccaaatataaagctttgtgaagtacaattaacttaatgtacttgaatgaatagaacttgctactttttgttttttattagaaaacaagtttggctcctaaggaccagggggatcgggggggcattcaggtgcccacactcggcccgcggatgaagggattcacgcataaccgcgatatgtgggatagtgggcgcaccacgagccgagatagtttacacgagagggtccccgtgaggggggttaaaccattggagtctcccgtgcctggattatagtatcn

SEQ ID NO: 13415 - DNA, 898 bp, Homo sapiens
acgcggggtaatcttaaaagcccaggttacccgcggaaatttatgctgtccggtcaccgtgacaatgcagctgagaaacccagaactacatctgggccgcgcgcttgcgcttcgcttcctggccctcgtttcctgggacatccctggggctagagcactggacaatggattggcaaggacgcctaccatgggctggctgcactgggagcgcttcatgtgcaaccttgactgccaggaagagccagattcctgcatcagtgagaagctcttcatggagatggcagagctcatggtctcagaaggctggaaggatgcaggttatgagtacctcggccgcccgggcaggtacgcgggagccaagaggcggataagtgccccaccttagaacagtatgccatgagagcgtttgccgacgcactggaggtcatccccatggccctctctgaaaacagtggcatgaatcccatccagactatgaccgaagtccgagccagacaggtgaaggagatgaaccctgctcttggcatcgactgtttgcacaaggggacaaatgatatgaagcaacagcatgtcatagaaaccttgattggcaaaaagcaacagatatctcttgcaacacaaatggttagaatgattttgaagattgatgacattcgtaagcctggagaatctgaagaatgaagacattgagaaaactatgtagcaagatccacttctgtgattaagtaaatggatgtctcgtgatgcgtctacagttatttattgttacatccttttccagacactgtagatgctataataaaaatagctgtttggtaaccatagtttcacttgttcaaagctgtgtaatcgtgggggtacctcggccgcgaccacgctaagccgaattccagcacac

SEQ ID NO: 13416 - DNA, 3969 bp, Homo sapiens
cgtccggagtagtctaactcgcggctgtcaccgccactgcagcggagccggccggccgggcgctgcgggacgggcgggcggctgccggcaggaggcgccgagccgggtgactgccgcggcgggcacagtccggggccacagcgccgagcccgggcgggagtggccccgcgcaggcagggagcggcgccgcgcactccaacccggcgggcacctcgggggcgggcgcggggcgcagccttctcgtcccggcctctgtgacaagcgccccggagccgggagcccgattgccgggctcggggtgggcgcggacgcaggcactgggctcgtgcggggccccgggcgtcgcgatgaacatcgtggtggagttcttcgtggtcactttcaaagtgctctgggcgttcgtgctggccgcggcgcgctggctggtgcggcccaaggagaagagcgtggcgggccaggtgtgcctcatcaccggcgccggcagcggcctgggccgcctcttcgcgctggagttcgcccggcgtcgggcgctgctggtgctgtgggacatcaacacgcaaagcaacgaggagacggctggcatggtgcgccacatctaccgcgacctggaggcggccgacgccgctgcgctgcaagctgggaatggtgaggaagaaattctgccccactgtaacttgcaggtttttacctacacctgtgacgtggggaagagggagaacgtctacctgacggctgaaagagtccgcaaggaggttggcgaagtctcagtcctggtcaataatgctggtgtggtctctgggcatcaccttctggaatgtcctgatgagctcattgagagaaccatgatggtcaattgccatgcacacttctggaccactaaggcttttcttcctacgatgctggagattaatcatggtcatattgtgacagttgcaagttccttgggattgttcagtactgccggagttgaggattactgtgccagtaaatttggagttgtgggttttcatgaatccctgagccatgaactaaaggctgctgaaaaggatggaattaaaacaaccttggtttgcccttatcttgtagacactggcatgttcagaggctgccgaatcaggaaagaaattgagccttttctgccacctctgaagcctgattactgtgtgaagcaggccatgaaggccatcctcactgaccagcccatgatctgcactccccgcctcatgtacatcgtgaccttcatgaagagcatcctaccatttgaagcagttgtgtgcatgtatcggttcctaggagcggacaagtgtatgtacccctttattgctcaaagaaagcaagccacaaacaataatgaagcaaaaaatggaatctaagaatctttttgtatggaatattacttctatcagaagatgatcaagatgtttcagtccagtgcacatcagcattgctgacattttatggattctaaacttgtgttgtttcttttttaaatcaactttttaaaaaaataaagtgtaaattaaccgactagagtacttggaaaatgtgatcagtacaagtgaacttaggttgttgccaacagggtccttttaggcagaacccagaaaccagtcaaatctgtagagaagcagtgtgacatcttcaggttaccattattttttaatgagcaggaagtctagaaatgataactagactgtatgtttcatgtgtgtgatttttcagaattcccagagtttactcattcttgttattaaactctagccagttgacatcttcgcaatttcaaggactgatagtgctgtattttctcacgttttctaagtttccgttttgcaaggcctaggtgactttttcatggtgtttgtatgtttagctcttttgaaaaggaattttgaaatctccatcaactgaagtaaatgatgtctgagtgttacagtaaaggtgaccaagtctctttcttaaagtcacaatgactaaagtattagttgaatttttttttttttttttgatggagtctcgctctgtcaccaggctggagtgcagtagcacaatcacggctcactgcaatctctgcctcccggtttcaagtgattctgctgtctcagcctcccaagtagctgggactacaggcatgcgccaccacgcccagctaatttttgtatttttagtagagacggggtttcaccatgttggtcaggatggtctccatctcttgacattgtgatccacctgcctcggcctcccaaagtgctgggattacaggcatgagccactgcacccagccttgaatttttaattttatctctgatatacttcattaagtgtctggagacctaattatcctaaaagatcatacattttctacctatgaattttgctgcatacagaaagtgccctttcctcaggaagttgctgtgtttcatttctttggatggactcttatctagaatacatagcagctctgcaaagaaacagtttttaaaaatgggaacttctacattgaaaagtccccatttttgtgccaactatgattagtgagaggaagaaatcttattctatggcatatgtatggaagggtgtaaagattcttttgaaaggtttattcacattgtagaacagcaaatgacatttttacagtatttttttgtaaagcaaactattttgtgccttgaatttggtatatgtgtattagtgaaacattgtaaaggtgaacttctacctctgtatctaaatgtataccatccacttgtaaatgactataaactattatgtgattgcttttttttttagaatgtcttgtttaaatagtggccaatgtttaaggctgttaaaataagccaacttttactaattggggagttttataaatgactgattaaatttaaagaattaacttacatgcaattgtgtgattattagttatcagcagtgttgtaaggaaaattattgtgtttttttttatgatcattatcccactttaggtaaagaaaaatattggaatggaatagtgttgggaaacagacattaacaacctagggtgcctgcactcaaatagccgatgttactgtccctagattagagacttgattaagggcttgtttgtaccaaaagtggggaaacaatgccatgacctgtgttttagtttggctgcaccacagatcaaatctgcactgtgtctacatataggaaaggtcctggtgtgtgctaatgttcccaatgcaggacttgaggaagagctctgttatatgtttccatttctctttatcaaagataaccaaaccttatggcccttataacaatggaggcactggctgcctcttaattttcaatcatggacctaaagaagtactctgaagggtctcaacaatgccaggtggggacagatatactcagagattatccaggtctgcctcccagcgagcctggagtacaccagaccctcctagagaaatctgttataatttaacaacccacttatccaccttaaaactgaggaaagtcgtctttacatctaattttattcttgtgtgttataacttaaacctatttctatttttgtttgttattgcccttataagggtgtccatctccaagttcaataaactaattcatttaacttttttgtagaagtctttcattcccatgtcccagcccagttcaatcacttctgtggctcttccttgaatgttgtccatattctccctcccatctttagctgtggagtttggaaagggatacagttaatgcaggtttagaactatggaattcctacaagttgcatttcttcatcccaatgtcacgttcttattaatgctacattgctgattgtgtgcattattgtttctaaacatgaaatctcttctagacaagtctgcctgtttgtgttgatcacttatgtaattgccaaagttgcttttttggctgggtatttatctacacctgcccccaccccctaacatgaatgctgac

SEQ ID NO: 13417 - DNA, 496 bp, Homo sapiens
  misc_feature 1, 495, 496: n = A,T,C or G
nacgtgcacacgggtatcaaagacacaagcaggagctgatgatacatctgaagttataccttttgtattccattgacctatttcactgccggaataactagctatttgctctccaagcacacttttgactattgactccagacacaaacttatttgtatattctacacattattattacaaaacatataaacattcttggtaagtatgcatacagtatcatataaaatatttttcatttatattgagcttttcacgtttttgcttcattgtgagccttggtggcagaaggttgcgcaagcagtaagttccatgtaactgatcactctatcagggtgttcctctggctctaccactcgggagatcatccataactctttgaaatgaaacccactgtcatattttccactgtggcagagtctccatataagcattttgtttcccatttaaatatatattgcttttaaattttaaatggtgatctgagtgataacccnn

SEQ ID NO: 13418 - DNA, 338 bp, Homo sapiens
  misc_feature 329, 330, 331, 332, 333, 334, 335, 336, 337, 338: n = A,T,C or G
actttttttttttttttttttttttttttttttactttttttttttttttttttttttttttttttccaagggttggctcaaaaatctttttactgataggcatggctccccaatcattgacttttaaaggccaaaggaaaatgaggcctgccctgggacccctgtccctactaaaacccctttaaattttcctttcccgaacaaaacgggtttttttggggccctttttccccaccaaaatatactggcagccctcctttttaaaaattcttgggcagttgtctttgtcataacccacaggtgtaaaaacaagggggcaacatgaaannnnnnnnnn

SEQ ID NO: 13419 - DNA, 599 bp, Homo sapiens
  misc_feature 595, 596, 597, 598, 599: n = A,T,C or G
acgcggggccccttccatgctgtggaagctttgttcttttgctcttcacaataaatcttgctgctgctcactctttgggttcgcactacctttatgagctgtaacaatcaccgcaaaggtctgcagcttcactcctgaagctagcaagagcacgaacccactgggaggaatgaacaactctggacacgctgcctttaagagctgtaacactgactgcgaaggtctgcaacttcactcctgaagtcagtgacaccatgaacccaccagaaggaagaaactctggacacatctgaacatctgaaggaacaaattccagacacaccatctttaaaaactttaacacccactgtgagggtgcgtagcttcattcttgaagtcagtgagaccaagaacccactggaaggaaccaattctggacacattttggtgactacgaagggactatcacctattgccaagcagtgagactatcacctatcaccaaacatctaggaggacaggcaagggtgcaggttttcgagaatgcgtcagtgcacacaaaacagatcatacgctagatcactaagaaacatcaacaaccgcgatgattgtaagnnnnn

SEQ ID NO: 13420 - DNA, 1162 bp, Homo sapiens
  misc_feature 1160, 1161, 1162: n = A,T,C or G
caccgcggtggcggccgaggtacgcggggtcaccaacatggccgcgggctggaagtgcgcatgagcagctgtctatggagatacctaggccgggagagggagaacacagttggagaaaatcggcagctgagacggccttggccggacttagcactcaggcctgtgaatcaggaaatacaaagacctccaaaaaaggaccagttcctcggatgtgccccctcacagagagatgaaggggcagcagaaaacagctgaaacggaagaggggacagtgcagattcaggaaggtgcagtggctactggggaagacccaaccagtgtggctattgccagcatccagtcagctgccaccttccctgaccccaacgtcaagtacgtcttccgaactgagaatgggggccaggtgatgtacagggtgatccaggtgtctgaggggcagctggatggccaaactgagggaactggcgccatcagtggctaccctgccactcaatccatgacccaggcggtgatccagggtgctttcaccagtgatgatgcagttgacacggaggggacagctgctgagacgcactatacttacttccccagcacggcagtgggagatggggcagggggtaccacatcggggagtacagctgctgttgttactacccagggctcagaggcactgctggggcaggcgacccctcctggcactggtcaattctttgtgatgatgtcaccacaagaagtactgcagggaggaagccagcgctcaattgcccctaggactcacccttattccccgaagtcagaagctccccggacgactcgggatgagaaacgcagggctcagcataatgaagtggagcgtcgccgccgagacaagatcaacaactggatcgtgcagctctccaagataatcccagactgctctatggagagcaccaagtctggccagagtaaaggtgggattctatccaaagcttgtgattatatccaggagcttcggcagagtaaccaccgcttgtctgaagaactgcagggacttgaccaactgcagctggacaatgacgtgcttcgacaacaggtggaagatcttaaaaacaagaatctgctgcttcgagctcagttgcggcaccacggattagaggtcgtcatcaagaatgacagcaacnnn

SEQ ID NO: 13421 - DNA, 510 bp, Homo sapiens
acttttttttttttttttttttttttttttgagatggagtctggctctgtcgcctaagctggagtgctggagtgcagtggcatgatcttggctcactgcaacctccgcctcccgggttcaagtaattctcctgcttcaacctcctgcatagctgggattacaggtgctcgccatgatgcccggctaatttttgtatttttagtagagacggggtttcgccatgttggccaggctggtcttgagttcctgacctcaggtgatctgcctgcctcggcctcccaaagtgctgggattacaggcgtgagccatcatgccgtcctgtctgccctttagcagtatttcttgagcattttcctggcttggttttagggagttggaaccatcatctgtctttcaaggcccatctcatctgcacgctgtccatgactaaaatgtggggcgagactctcagctcatccttcctcgagaatggctatttttagcctgagtttacactcttcatcctttttt

SEQ ID NO: 13422 - DNA, 289 bp, Homo sapiens
acgcggggatttccaacaagagcactggccaagtcagcttcttctgagagagtctctagaagacatgatgctacactcagctttgggtctctgcctcttactcgtcacagtttcttccaaccttgccattgcaataaaaaaggaaaagaggcctcctcagacactctcaagaggatggggagatgacatcacttgggtacctcggccgcccgggcaggtacgcggggcacttggcttcaaagctggctcttggaaattgagcggagagcgacgcggttgttgtagctgc

SEQ ID NO: 13423 - DNA, 475 bp, Homo sapiens
  misc_feature 1, 2, 472, 473, 474, 475: n = A,T,C or G
nnccgcccgggcaggtacaaaaaactcgagaaattttctcaaagcttgtcaagatgtgggaactgaacttcattgctctacaatgttggctcaagcaatggctaatttattagtggacaaatctaaaaacggccaaggagcaaatcctaaaatgggaaaatgttataattgtggaaaaatcggacacttcaaaaaagaataccgtcagacctttgggcagaagggatcttataatgcagccccccaccccagaaaaaatgccaggactttgccctcattgcaatataggaaataactgggctagtcaatgccactcaaaatttcatcagaatggcacccccctgtcgggaaacgagaagggggcctggacccgggccctataaacaatggaggcattccctgtccagcccacagccccatctcaaggataggttcccggaggcacattgattccctctccccaagaacaccnnnn

SEQ ID NO: 13424 - DNA, 1691 bp, Homo sapiens
cacacaacccaacccacacacacacacacacaaaacacgaccagaccatacagcgacctattgtcacacagcaggctgtttaatgacggacagtaactatcacggtccgttatggtagcgaggcctgggtggcgccgaggctaaatcggctgcgttccgctcggaacgcgccgcagaaggggtcctggtgacgagtcccgcgttctctccttgaatccactcgccagcccgccgccctctgccgccgcaccctgcacacccgcccctctcctgtgccaggaacttgctactaccagcaccatgccctaccaatatccagcactgaccccggagcagaagaaggagctgtctgacatcgctcaccgcatcgtggcacctggcaagggcatcctggctgcagatgagtccactgggagcattgccaagcggctgcagtccattggcaccgagaacaccgaggagaaccggcgcttctaccgccagctgctgctgacagctgacgaccgcgtgaacccctgcattgggggtgtcatcctcttccatgagacactctaccagaaggcggatgatgggcgtcccttcccccaagttatcaaatccagggcggtgttgtgggcatcaaggtagacaagggcgtggtccccctggcagggacaaatggcgagactaccacccaagggttggatgggctgtctgagcgctgtgcccagtacaagaaggacggagctgacttcgccaagtggcgttgtgtgctgaagattggggaacacaccccctcagccctcgccatcatggaaaatgccaatgttctggcccgttatgccagtatctgccagcagaatggcattgtgcccatcgtggagcctgagatcctccctgatggggaccatgacttgaagcgctgccagtatgtgaccgagaaggtgctggctgctgtctacaaggctctgagtgaccaccacatctacctggaaggcaccttgctgaagcccaacatggtcaccccaggccatgcttgcactcagaagttttctcatgaggagattgccatggcgaccgtcacagcgctgcgccgcacagtgccccccgctgtcactgggatcaccttcctgtctggaggccagagtgaggaggaggcgtccatcaacctcaatgccattaacaagtgccccctgctgaagccctgggccctgaccttctcctacggccgagccctgcaggcctctgccctgaaggcctggggcgggaagaaggagaacctgaaggctgcgcaggaggagtatgtcaagcgagccctggccaacagccttgcctgtcaaggaaagtacactccgagcggtcaggctggggctgctgccagcgagtccctcttcgtctctaaccacgcctattaagcggaggtgttcccaggctgcccccaacactccaggccctgccccctcccactcttgaagaggaggccgcctcctcggggctccaggctggcttgcccgcgctctttcttccctcgtgacagtggtgtgtggtgtcgtctgtgaatgctaagtccatcaccctttccggcacactgccaaataaacagctatttaagggggagtcggcaaaaaaaaaaaaaaaaaaaaaaaaaaaaagaaaaaaaaaaaaaaaagcggccgcgggcccatcgattttcccacccgggtggggtacca

SEQ ID NO: 13425 - DNA, 2132 bp, Homo sapiens
  misc_feature 1, 2, 3, 2128, 2129, 2130, 2131, 2132: n = A,T,C or G
nnnacgcagggtttgtcatcattttcagaggcagagtgccaaatatcacccaaagctcttgtgtcttttttttacccccttatttgatttttatttatgaattttttgtgcaaacatcaaatgtcactggtgttcacagaaggcttttttgactagcctgaaattcctgagtcaaaagattaatcagattttcaggcagtgtttaatcaggtgctttgtcctgtatgttgttcttgtctgtcttagctccctgtctttcctgtatatgccatctgtctccatgaagcacagaaatgcctctgtaagatgtttatgattttaatatttactccctccaaacccgactccataccattttttgctatttggagcagcctctctgctttgtgtataaattaatgatgctctgtagactacctaagttaatcggcactgtgaatctttttgataagcagggtttaagcagcaatttcaccattgcacttggttgcctgctgcagtgtcagtttctactacctagcaaccagcattcattactacactccaacaaaatccttagggagtcatattcagtctgagtggaagaaagtctatttatgcattcctatgaattcaacagcaatagcgtgtctcatgtattgagcatgtgagggaagaaaaagaccgtaatataaatagagggataaataatatcactaaggcatttgggagccttgagactgctgattaattcctatttctcatgtttattttttgttaggaagacaattgtcacttttattattggccacgaaacatgtattactctatatccccaagtcctagagcatgacctgcatgttggagatgttgtacagcaatgtatttatccagacatacatatatgatatttagagacacagtgattcttttgataacaccacacatagaacattataattacacacaaatttatggtaaaagaattaatatgctgtctggtgctgctgttattgactacagtgttgtacagaatttatcatggattattgactgctgagaaagggacagtggaatttagccataccaaggactatactggaaacagacttctgctgctgaatgtgccctgatgtgaccaggttgcacttggaagagatcctcgcgtcttcatgaggcacttaaagcttataaaagaactgcggctggaactcatctggtgctccccatgagagtgctctgcttgtagactggccagtgtccatgaaacaactgtaaataccaacatgtgtgcatgggtcaacagtcttggccatttctcatcaaaagaagccaaattcatgatcaacatctctgaagtttcaagtaaggcccacacttctttgaattactcttcatgggcccacattaggttgtgctgtgaattacttaaggcagtgatactgatgtagtatagttttgtcttaatttcccttatttctacttctttggttgaatctatgaacttgattgtataattttcttataaattactgatgtaatcagcttgtcaattatgttgtgaaattgttagtattcatttatcaaaaatgacctatgtttagtcacatatttgtttagttctgggaaattgttatagcttaaatggaactcaccaacattattcatagtttaagtcttttatcattattacctcaattataaatattacaaaaacataattctggcaatgagagtatttttttattcaatgatcaaggagcaatgtcagtatatagtagaatatcaattaaattatatcctaaaatgtatattttgcataaaagagatattctttaatcaattacttttttgtgagttttgtggcaaatgaagcttgtacgtgtctttaaaactgttgtagatgaaactgtataagatttttacatcttgcttaatcaatattttcagagtctattagttcccctgggattctgaatataacatatagcctattataaatccctgtatcgtggaccttttgtgaacatttcaaggcgcatgcacaaccttgatgataaccagtggaaatgtaactaactgaaatgaagaataaaaggcaaatgagctggggataaacttgaatgttatctgattaaattactcaaannnnn

SEQ ID NO: 13426 - DNA, 6633 bp, Homo sapiens
aaattgaaccggagccatcttgggcccggcgcgcagacccgcggagtttcccgtgccgacgccccggggccacttccagtgcggagtagcggaggcgtgggggcctcgaggggctggcgcggtccagcggtcgggccagggtcgtgccgccggcgggtcgggccgggcaatgcctcgcgggcgcaatgaatccgcggcaggggtattccctcagcggatactacacccatccatttcaaggctatgagcacagacagctcagataccagcagcctgggccaggatcttcccccagtagtttcctgcttaagcaaatagaatttctcaaggggcagctcccagaagcaccggtgattggaaagcagacaccgtcactgccaccttccctcccaggactccggccaaggtttccagtactacttgcctccagtaccagaggcaggcaagtggacatcaggggtgtccccaggggcgtgcatctcggaagtcaggggctccagagagggttccagcatccttcaccacgtggcaggagtctgccacagagaggtgttgattgcctttcctcacatttccaggaactgagtatctaccaagatcaggaacaaaggatcttaaagttcctggaagagcttggggaagggaaggccaccacagcacatgatctgtctgggaaacttgggactccgaagaaagaaatcaatcgagttttatactccctggcaaagaagggcaagctacagaaagaggcaggaacaccccctttgtggaaaatcgcggtctccactcaggcttggaaccagcacagcggagtggtaagaccagacggtcatagccaaggagccccaaactcagacccgagtttggaaccggaagacagaaactccacatctgtctcagaagatcttcttgagccttttattgcagtctcagctcaggcttggaaccagcacagcggagtggtaagaccagacagtcatagccaaggatccccaaactcagacccaggtttggaacctgaagacagcaactccacatctgccttggaagatcctcttgagtttttagacatggccgagatcaaggagaaaatctgcgactatctcttcaatgtgtctgactcctctgccctgaatttggctaaaaatattggccttaccaaggcccgagatataaatgctgtgctaattgacatggaaaggcagggggatgtctatagacaagggacaacccctcccatatggcatttgacagacaagaagcgagagaggatgcaaatcaagagaaatacgaacagtgttcctgaaaccgctccagctgcaatccctgagaccagaagaaacgcagagttcctcacctgtaatatacccacatcaaatgcctcaaataacatggtaaccacagaaaaagtggagaatgggcaggaacctgtcataaagttagaaaacaggcaagaggccagaccagaaccagcaagactgaaaccacctgttcattacaatggcccctcaaaagcagggtatgttgactttgaaaatggccagtgggccacagatgacatcccagatgacttgaatagtatccgcgcagcaccaggtgagtttcgagccatcatggagatgccctccttctacagtcatggcttgccacggtgttcaccctacaagaaactgacagagtgccagctgaagaaccccatcagcgggctgttagaatatgcccagttcgctagtcaaacctgtgagttcaacatgatagagcagagtggaccaccccatgaacctcgatttaaattccaggttgtcatcaatggccgagagtttcccccagctgaagctggaagcaagaaagtggccaagcaggatgcagctatgaaagccatgacaattctgctagaggaagccaaagccaaggacagtggaaaatcagaagaatcatcccactattccacagagaaagaatcagagaagactgcagagtcccagacccccaccccttcagccacatccttcttttctgggaagagccccgtcaccacactgcttgagtgtatgcacaaattggggaactcctgcgaattccgtctcctgtccaaagaaggccctgcccatgaacccaagttccaatactgtgttgcagtgggagcccaaactttccccagtgtgagtgctcccagcaagaaagtggcaaagcagatggccgcagaggaagccatgaaggccctgcatggggaggcgaccaactccatggcttctgataaccagcctgaaggtatgatctcagagtcacttgataacttggaatccatgatgcccaacaaggtcaggaagattggcgagctcgtgagatacctgaacaccaaccctgtgggtggccttttggagtacgcccgctcccatggctttgctgctgaattcaagttggtcgaccagtccggacctcctcacgagcccaagttcgtttaccaagcaaaagttgggggtcgctggttcccagccgtctgcgcacacagcaagaagcaaggcaagcaggaagcagcagatgcggctctccgtgtcttgattggggagaacgagaaggcagaacgcatgggtttcacagaggtaaccccagtgacaggggccagtctcagaagaactatgctcctcctctcaaggtccccagaagcacagccaaagacactccctctcactggcagcaccttccatgaccagatagccatgctgagccaccggtgcttcaacactctgactaacagcttccagccctccttgctcggccgcaagattctggccgccatcattatgaaaaaagactctgaggacatgggtgtcgtcgtcagcttgggaacagggaatcgctgtgtaaaaggagattctctcagcctaaaaggagaaactgtcaatgactgccatgcagaaataatctcccggagaggcttcatcaggtttctctacagtgagttaatgaaatacaactcccagactgcgaaggatagtatatttgaacctgctaagggaggagaaaagctccaaataaaaaagactgtgtcattccatctgtatatcagcactgctccgtgtggagatggcgccctctttgacaagtcctgcagcgaccgtgctatggaaagcacagaatcccgccactaccctgtcttcgagaatcccaaacaaggaaagctccgcaccaaggtggagaacggagaaggcacaatccctgtggaatccagtgacattgtgcctacgtgggatggcattcggctcggggagagactccgtaccatgtcctgtagtgacaaaatcctacgctggaacgtgctgggcctgcaaggggcactgttgacccacttcctgcagcccatttatctcaaatctgtcacattgggttaccttttcagccaagggcatctgacccgtgctatttgctgtcgtgtgacaagagatgggagtgcatttgaggatggactacgacatccctttattgtcaaccaccccaaggttggcagagtcagcatatatgattccaaaaggcaatccgggaagactaaggagacaagcgtcaactggtgtctggctgatggctatgacctggagatcctggacggtaccagaggcactgtggatgggccacggaatgaattgtcccgggtctccaaaaagaacatttttcttctatttaagaagctctgctccttccgttaccgcagggatctactgagactctcctatggtgaggccaagaaagctgcccgtgactacgagacggccaagaactacttcaaaaaaggcctgaaggatatgggctatgggaactggattagcaaaccccaggaggaaaagaacttttatctctgcccagtatagtatgctccagtgacagatggattagggtgtgtcatactagggtgtgagagaggtaggtcgtagcattcctcatcacatggtcaggggatttttttttctcctttttttttctttttaagccataattggtgatactgaaaactttgggttcccatttatcctgctttctttgggattgctaggcaaggtctggccaggcccccccttttttcccccaagtgaagaggcagaaacctaagaagttatcttttctttctacccaaagcatacatagtcactgagcacctgcggtccatttcctcttaaaagttttgttttgatttgtttccatttcctttccctttgtgtttgctacactgacctcttgcggtcttgattaggtttcagtcaactctggatcatgtcagggactgataatttcatttgtggattacgcagacccctctacttcccctctttcccttctgagattctttccttgtgatctgaatgtctccttttccccctcagagggcaaagaggtgaacataaaggatttggtgaaacatttgtaagggtaggagttgaaaactgcagttcccagtgccacggaagtgtgattggagcctgcagataatgctcagccatcctcccatcctgcactttagccagctgcagggcgggcaaggcaaggaaagctgcttccctggaagtgtatcactttctccggcagctgggaagtctagaaccagccagactgggttaagggagctgctcaagcaatagcagaggtttcacccggcaggatgacacagaccacttcccagggagcacgggcatgccttggaatattgccaagcttccagctgcctcttctcttaaagcattcctaggaatattttccccgccaatgctgggcgtacaccctagccaacgggacaaatcctagagggtataaaatcatctctgctcagataatcatgacttagcaagaataagggcaaaaaatcctgttggcttaacgtcactgttccacccggtgtaatatctctcatgacagtgacaccaagggaagttgactaagtcacatgtaaattaggagtgttttaaagaatgccatagatgttgattcttaactgctacagataacctgtaattgagcagatttaaaattcaggcatacttttccatttatccaagtgctttcatttttccagatggcttcagaagtaggctcgtgggcagggcgcagacctgatctttatagggttgacatagaaagcagtagttgtgggtgaaagggcaggttgtcttcaaactctgtgaggtagaatcctttgtctatacctccatgaacattgactcgtgtgttcagagcctttggcctctctgtggagtctggctctctggctcctgtgcattctttgaatagtcactcgtaaaaactgtcagtgcttgaaactgtttcctttactcatgttgaagggactttgttggcttttagagtgttggtcatgactccaagagcagagcagggaagagcccaagcatagacttggtgccgtggtgaaggctgcagtccagttttgtgatgctgcttttacgtgtccctcgataacagtcagctagacacactcaggaggactactgaggctctgcgaccttcaggagctgagcctgcctctctcctttagatgacagaccttcatctgggaacgtgctgagccagcaccctcagatgatttccctccaaactgctgactaggtcatcctctgtctggtagagacattcacatctttgcttttattctgtgctctctgtacttttgaccaaaaattgaccaaagtaagaaaatgcaagttctaaaaatagactaaggatgcctttgcagaacaccaaagcatcccaaggaactggtagggaagtggcgcctgtctcctggagtggaagaggcctgctccctggctctgggtctgctgggggcacagtaaatcagtcttggcacccacatccagggcagagaggtctgtggttctcagcatcagaaggcagcgcagcccctctcctcttcaggctacagggttgtcacctgctgagtcctcaggttgtttggcctctctggtccatcttgggcattaggttctccagcagagctctggccagctgcctcttctttaactgggaacacaggctctcacaagatcagaacccccactcacccccaagatcttatctagcaagcctgtagtattcagtttctgttgtaggaagagagcgaggcatccctgaattccacgcatctgctggaaacgagccgtgtcagatcgcacatccctgcgcccccatgcccccatgcccctctgagtcacacaggacagaggaggcagagcttctgcccactgttatcttcactttctttgtccagtcttttgtttttaataagcagtgaccctccctactcttctttttaatgatttttgtagttgatttgtctgaactgtggctactgtgcattccttgaataatcacttgtaaaaattgtcagtgcttgaagctgtttcctttactcacattgaagggacttcgttggttttttggagtcttggttgtgactccaagagcagagtgaggaagacccccaagcatagactcgggtactgtgatgatggctgcagtccagttttatgattctgcttttatgtgtcccttgataacagtgacttaacaatatacattcctcataaataaaaaaaaaacaagaatctgaattcttaaaaaaaaaaacac

SEQ ID NO: 13427 - DNA, 902 bp, Homo sapiens
  misc_feature 899, 900, 901, 902: n = A,T,C or G
tggcgtggatttgctcccgacccgctttggggcgtgcctgcttcctcctctcgtgttagatgagccccagagaggcgaagccacttgagctcgtgagtgacagtcagatgtcaagccctgctctttctaaagcgtgctgccttcagaaaagaagagccagaaggatggaaattacttcagaaagatgaataccagctttgaaggaataaaagctgacgaggaattgaaggagttgaggcacgagcttgaacagggttgcatgttggcccttgattgtaaatgcccattgctgcacctgttcctgttacttggggagttgcagcagaaggaacagcggcctgggactccagagaactgggttccctctcatccctccaggccaccacttcttgtgggcccttgggcaagtcactgtactttctgagtctcagtttccccatttgcagaatggaaataactaccccggtctaccaacttagaagaattgctttgaggatctgataaggtggtgtggatgatgctgccttgggggctttacagtctggagctcaagggaccccttaagttgggcttacttagtaactccaggggtgggcagaacaggactccaatgagggtttttttctttttccctttttttcttttcctatctcttaacttttatctttattattttacaatgcccttgtaagatgaaacaagtgatgctgaaatatctttttcttttttaacctttattttagaattggggtcctgtgccggtttgtccataggtacgggtggctgggaagttggaatagaatgaattacacccagggtgagcttgggcgaaaggtttcaacctatccacccccattgggtcccgggtgggccattgtacagggcaggggcctagaaannnn

SEQ ID NO: 13428 - DNA, 1387 bp, Homo sapiens
  misc_feature 1386, 1387: n = A,T,C or G
actatctggatactaaaatgttacggaagtagctctttgttctccctcactctgcccttagttaatagaaattcagactcgccaagtaaggcttcgtgcatagtgtcttcatgtcgcgtatagttgagcgcgttcttagcagttggcttcatggacaactcattagtgttttgacttttcttacccagcgttaattgaattcttgcttttagacaacttcctttcttgtagtgcgtctcctggctgccgtcacttccggttctctgtcagtcgcgagcgaacgaccaagagggtgttcgactgctagagccgagcgaagcgatgcctaaatcaaaggaacttgtttcttcaagctcttctggcagtgattctgacagtgaggttgacaaaaagttaaagaggaaaaagcaagttgctccagaaaaacctgtaaagaaacaaaagacaggtgagacttcgagagccctgtcatcttctaaacagagcagcagcagcagagatgataacatgtttcagattgggaaaatgaggtacgttagtgttcgcgattttaaaggcaaagtgctaattgatattagagaatattggatggatcctgaaggtgaaatgaaaccaggaagaaaaggtatttctttaaatccagaacaatggagccagctgaaggaacagatttctgacattgatgatgcagtaagaaaactgtaaaattcgagccatataaataaaacctgtactgttctagttgttttaatctgtctttttacattggcttttgttttctaaatgttctccaagctattgtatgtttggattgcagaagaatttgtaagatgaatacttttttttaatgtgcattattaaaaatattgagtgaagctaattgtcaactttattaaggattactttgtctgcccaccacctagtgtaaaataaaatcaagtaatacaatcttaactgttgtggccttttttgatcataagagttggtactgtttaaggccaaaagtaacagtttttatagatcttttagtttcaactcagcttttacaataaaaaggatttgtattgcattgagtttataaacttttggtttgtgaacttcatatttgatcttttctcttccaatcaaatgtctaggcttgtttgacttccacccccaatggtttttcactctttttatttacttcattttcctttaataacttaatctcttcatgttcagtttttacttcactctttattcttttctttgattatggtatgctgatttggaaacgacaaggtagagcgtatcagacaatatatgaaagcacggtccacatagaagagagtcgatgcgatcacactataaacaaagatactaacatggctatcaacgtctgatccnn

SEQ ID NO: 13429 - DNA, 183 bp, Homo sapiens
ccctttcgagcggccgcccgggcaggtacactcggaaatggaaggcgatgtctgagtcttccttcatctcggtatggaaatccacctgcagctgtgggtccatgacgaaagggatgatcggtgtccctgtgattatcacacaagaaccagtagacaaggacacaggccgtgtgtgtggtacct

SEQ ID NO: 13430 - DNA, 1087 bp, Homo sapiens
  misc_feature 1, 2, 3, 1084, 1085, 1086, 1087: n = A,T,C or G
nnncgaactcctgacctcaagtgatccacctgcctcccaaagtgggattacagatacatgaagttatgaatttaagatgtgaagatttacagcttgataaaccagcttcaggagacatgatcttatgaattcaacacatgaagatttacaacttgataaaccagcttcaggagatcagaacttcttataatacaactgacgttactcagcctagaacaaatacaacagggattgtgctgcattctgacttggattctgccatcgaacacagaatgccctgatccttagatgcagaggcagctcttcagcctatgggggctgctgtaaaatattacaggcatactttggagatgttacgggtttggttccacatcactgcaataaagccttccagatatacagtcatatttcttatattacacgactccagcgggaggaagaagaggcctttgccagcagtcagagcagccaaggggcccaatccctcacattctccaagtttgaaggaaagaaaaccaacgagaagacccgcaagattaccacagtgaagaaatcttcagtacgtcttccagggtcggatcaaagaaggtgcctccagaatgagttgagaagataaatgggatcagattgaaaagtacatcatgactcatctctataaatatgtgttctgtccagaaactactgatgatgagatgagagatcttgccattcaaaagaggatcagagtggaagctgctctgtggtgtcagaaagacgaggaatgtggtgacctcacctatccatctccctacaaggcagcttttgagcccttcactgggttacacctcagatgcggcgtgtccctgttaatgaagacatcccagaagtgtctgatacggtgttgaaggcaatcacagggattgtgctgcattctgactcagattctgccatcaaaaacagaatgccctgatccttagaggcagaggcagctcttcagcctatgggcttaagctcttggactcactgaggcagtaaaagaaccatatcctgtgtttgaatcaaaccccgagttcctgtatgtttagaaggtttgccagacaggaannnn

SEQ ID NO: 13431 - DNA, 2858 bp, Homo sapiens
  misc_feature 1, 2, 2718, 2719, 2720, 2721, 2722, 2723, 2846, 2847, 2848,2849, 2850, 2851, 2852, 2853, 2854, 2855, 2856, 2857, 2858: n = A,T,C or G
nncccggtggctggctgctctgattggctgaacaaatagtccgagggtggtgggcatccgccctcccgacaaggcagaccaggccccctgcaggtcccctatccgcaccccggcccctgagagctggcactgcgactcgagacagcggcccggcaggacagctccagaatgaaaatgcggttcttggggttggtggtctgtttggttctctggaccctgcattctgaggggtctggagggaaactgacagctgtggatcctgaaacaaacatgaatgtgagtgaaattatctcttactggggattccctagtgaggaatacctagttgagacagaagatggatatattctgtgccttaaccgaattcctcatgggaggaagaaccattctgacaaaggtcccaaaccagttgtcttcctgcaacatggcttgctggcagattctagtaactgggtcacaaaccttgccaacagcagcctgggcttcattcttgctgatgctggttttgacgtgtggatgggcaacagcagaggaaatacctggtctcggaaacataagacactctcagtttctcaggatgaattctgggctttcagttatgatgagatggcaaaatatgacctaccagcttccattaacttcattctgaataaaactggccaagaacaagtgtattatgtgggtcattctcaaggcaccactataggttttatagcattttcacagatccctgagctggctaaaaggattaaaatgttttttgccctgggtcctgtggcttccgtcgccttctgtactagccctatggccaaattaggacgattaccagatcatctcattaaggacttatttggagacaaagaatttcttccccagagtgcgtttttgaagtggctgggtacccacgtttgcactcatgtcatactgaaggagctctgtggaaatctctgttttcttctgtgtggatttaatgagagaaatttaaatatgtctagagtggatgtatatacaacacattctcctgctggaacttctgtgcaaaacatgttacactggagccaggctgttaaattccaaaagtttcaagcctttgactggggaagcagtgccaagaattattttcattacaaccagagttatcctcccacatacaatgtgaaggacatgcttgtgccgactgcagtctggagcgggggtcacgactggcttgcagatgtctacgacgtcaatatcttactgactcagatcaccaacttggtgttccatgagagcattccggaatgggagcatcttgacttcatttggggcctggatgccccttggaggctttataataaaattattaatctaatgaggaaatatcagtgaaagctggacttgagctgtgtaccaccaagtcaatgattatgtcatgtgaaaatgtgtttgcttcatttctgtaaaacacttgtttttctttcccaggtcttttgtttttttatatccaagaaaatgataactttgaagatgcccagttcactctagtttcaattagaaacatactagctattttttctttaattagggctggaataggaagccagtgtctcaaccatagtattgtctctttaagtcttttaaatatcactgatgtgtaaaaaggtcattatatccattctgtttttaaaatttaaaatatattgactttttgcccttcataggacaaagtaatatatgtgttggaattttaaaattgtgttgtcattggtaaatctgtcactgacttaagcgaggtataaaagtacgcagttttcatgtccttgccttaaagagctctctagtctaacggtcttgtagttagagatctaaatgacattttatcatgttttcctgcagcaggtgcatagtcaaatccagaaatatcacagctgtgccagtaataaggatgctaacaattaattttatcaaacctaactgtgacagctgtgatttgacacgttttaattgctcaggttaaatgaaatagttttccggcgtcttcaaaaacaaattgcactgataaaacaaaaacaaaagtatgttttaaatgctttgaagactgatacactcaaccatctatattcatgagctctcaatttcatggcaggccatagttctacttatctgagaagcaaatccctgtggagactataccactattttttctgagattaatgtactcttggagcccgctactgtcgttattgatcacatctgtgtgaagccaaagccccgtggttgcccatgagaagtgtccttgttcattttcacccaaatgaagtgtgaacgtgatgttttcggatgcaaactcagctcagggattcattttgtgtcttagttttatatgcatccttatttttaatacacctgcttcacgtccctatgttgggaagtccatatttgtctgcttttcttgcagcatcatttccttacaatactgtccggtggacaaaatgacaattgatatgtttttctgatataattactttagctgcactaacagtacaatgcttgttaatggttaatataggcagggcgaatactactttgtaacttttaaagtcttaaacttttcaataaaattgagtgagacttataggcccaaaaaaaaaaaaaaaagcggccccggcaagaagactacgtccctgaacgggaccgggggcccgtctcttttttaaaaaaaccagcagcaacagtgannnnnnaagtaaaaaaaaaaaaaaaaaaccccgggggggggaaaacctttttttcccccctttagggggggaaaaaaaaaagaagttccccccaaaattttccaaaaaaaaggtttttttccccccccnnnnnnnnnnnnn

SEQ ID NO: 13432 - DNA, 1160 bp, Homo sapiens
  misc_feature 1, 2, 3, 1160: n = A,T,C or G
nnncatggctctgctaagaccttattaaaagcatggattaattttacttccaagtttatttttactgcaccatcccatttgtggaaacaactagcttactcagcttttttttccttttataaaggaaagaacagaaaagtaaaaggaggaaagaaaacaagaggtgagtgaggcaactgaaaactgttcttggacctgcggtgctatagagcaggctcttctaggttggcagttgccatggaatctggacccaaaatgttggcccccgtttgcctggtggaaaataacaatgagcagctattggtgaaccagcaagctatacagattcttgaaaagatttctcagccagtggtggtggtggccattgtaggactgtaccgtacagggaaatcctacttgatgaaccatctggcaggacagaatcatggcttccctctgggctccacggtgcagtctgaaaccaagggcatctggatgtggtgcgtgccccacccatccaagccaaaccacaccctggtccttctggacaccgaaggtctgggcgatgtggaaaagggtgaccctaagaatgactcctggatctttgccctggctgtgctcctgtgcagcacctttgtctacaacagcatgagcaccatcaaccaccaggccctggagcagctgcattatgtgactgagctagcagagctaatcagggcaaaatcctgccccagacctgatgaagctgaggactccagcgagtttgcgagtttctttccagactttatttggactgttcgggattttaccctggagctaaagttagatggaaaccccatcacagaagatgagtacctggagaatgccttgaagctgattccaggcaagaatcccaaaattcaaaattcaaacatgcctagagagtgtatcaggcatttcttccgaaaacggaagtgctttgtctttgaccggcctacaaatgacaagcaatatttaaatcatatggacgaagtgccagaagaaaatctggaaaggcatttccttatgcaatcagacaacttctgttcttatatcttcacccatgcaaagaccaagaccctgagagagggaatcattgtcactggaaagcggctggggtctctggtggtctcttacgtagatgccatcaacagtggagcagn

SEQ ID NO: 13433 - DNA, 2162 bp, Homo sapiens
  misc_feature 1, 2, 3, 4, 5, 6, 7, 8, 2159, 2160, 2161, 2162: n = A,T,C or G
nnnnnnnnccttccgggccaatcgttagtcagagtgggcggagccgcccgcgggcacctgcgcgttaagagtgggccgcgtcgctgaggggtagcgatgcgggctccggggatgaggtcgcggccggcgggtcccgcgctgttgctgctgctgctcttcctcggagcggccgagtcggtgcgtcgggcccagcctccgcgccgctacaccccagactggccgagcctggattctcggccgctgccggcctggttcgacgaagccaagttcggggtgttcatccactggggcgtgttctcggtgcccgcctggggcagcgagtggttctggtggcactggcagggcgaggggcggccgcagtaccagcgcttcatgcgcgacaactacccgcccggcttcagctacgccgacttcggaccgcagttcactgcgcgcttcttccacccggaggagtgggccgacctcttccaggccgcgggcgccaagtatgtagttttgacgacaaagcatcacgaaggcttcacaaactggccgagtcctgtgtcttggaactggaactccaaagacgtggggcctcatcgggatttggttggtgaattgggaacagctctccggaagaggaacatccgctatggactataccactcactcttagagtggttccatccactctatctacttgataagaaaaatggcttcaaaacacagcattttgtcagtgcaaaaacaatgccagagctgtacgaccttgttaacagctataaacctgatctgatctggtctgatggggagtgggaatgtcctgatacttactggaactccacaaattttctttcatggctctacaatgacagccctgtcaaggatgaggtggtagtaaatgaccgatggggtcagaactgttcctgtcaccatggaggatactataactgtgaagataaattcaagccacagagcttgccagatcacaagtgggagatgtgcaccagcattgacaagttttcctggggctatcgtcgtgacatggcattgtctgatgttacagaagaatctgaaatcatttcggaactggttcagacagtaagtttgggaggcaactatcttctgaacattggaccaactaaagatggactgattgttcccatcttccaagaaaggcttcttgctgttgggaaatggctgagcatcaatggggaggctatctatgcctccaaaccatggcgggtgcaatgggaaaagaacacaacatctgtatggtatacctcaaagggatcggctgtttatgccatttttctgcactggccagaaaatggagtcttaaaccttgaatcccccataactacctcaactacaaagataacaatgctgggaattcaaggagatctgaagtggtccacagatccagataaaggtctcttcatctctctaccccagttgccaccctctgctgtccccgcagagtttgcttggactataaagctgacaggagtgaagtaatcatttgagtgcaagaagaaagaggcgctgctcactgttttcctgcttcagtttttctcttatagtaccatcactataatcaacgaacttctcttctccacccagagatggcttttccaacacattttaattaaaggaactgagtacattaccctgatgtctaaatggaccaaagatctgagatccattgtgattatatctgtatcaggtcagcagaagaaggaactgagcagttgaactctgagttcatcaattgtaatatttggaaattatctacaatggaatcttccctctgttctctgataacctacttgcttactcaatgcctttaagccaagtcaccctgttgcctatgggaggaggtggaaggatttggcaagctcaaccacatgctatttagttagcatcagttgtcaccaacagtctttctgcaaagggcaggagagctttgggggaaaggaaaaggcttaccaggctgctatggtcaactcttcagaaattttcagagcaatctaaaagcgccaaaattcgctatgtttacagtgatactattaagaaaatgaatgtgattctgctctgtctttttaagtatgatcaaataaaaaatttgtacatcacaatcatttctaccaaaaagcccacgagtccgcggactccctatnnnn

SEQ ID NO: 13434 - DNA, 745 bp, Homo sapiens
gtaaaaaaaaaggtcttggtgaggtgccgccatttcatctgtcctcattctctgcgcctttcgcagagcttccagcagcggtatgttgggccagagcatccggaggttcacaacctctgtggtccgtaggagccactatgaggagggccctgggaagaatttgccattttcagtggaaaacaagtggtcgttactagctaagatgtgtttgtactttggatctgcatttgctacacccttccttgtagtaagacaccaactgcttaaaacataaggatgtttcagttcctccatttaacagatatgaagagcattttaagaggtgcagcctctggaagtgttcctagtttggacccacttgccagaggctgcacctcttaaaatgctcttcatatctgttaaatggaggaactgaaacatccttatgttttaagcagttggtgtcttactacaaggaagggtgtagcaaatgcagatccaaagtacaaacacatcttagctagtaacgaccacttgttttccactgaaaatggcaaattcttcccagggccctcctcatagtggctcctacggaccacagaggttgtgaacctccggatgctctggcccaacataccgctgctggaagctctgcgaaaggcgcagagaatgaggacagatgaaatggcggcacctcaccaagaccttttttttcacgaccttgttccccggtgcgcaaggactgaaaagaaagatgggaaatggg

SEQ ID NO: 13435 - DNA, 834 bp, Homo sapiens
cggagtacttctagaattaattaacgcggggcctcctcttcctttctccgccatcgtggtgtgttcttgactccgctgctcgccatgtcttctcacaagactttcaggattaagcgattcctggccaagaaacaaaagcaaaatcgtcccattccccagtggattcggatgaaaactggaaataaaatcaggtacaactccaaaaggagacattggagaagaaccaagctgggtctataaggaattgcacatgagatggcacacatatttatgctgtctgaaggtcacgatcatgttaccatatcaagctgaaaatgtcaccactatctggagatttcgacgtgttttcctctctgaatctgttatgaacacgttggttggctggattcagtaataaatatgtaaggcctttccttttaaaaaaaaaaaaaaaaaaaaaaaaaaaaaacatttggggggggctcagggcccggaaaaaccttttcaacccaccggtggggggccggggcccctgtaaggacatgtacgactggggacaaagaggtgctacccaaggggaaaccgtggcgcacagcgacacaggcgcgagggatttctcccaccaaattaaaaaaacgccgcggggggcacagcagggcgttttgacaacaacacccacaaggggggtcctcgggggccccagcgggagatcaaccacaggagctccaccacaggtcaataaaattagcggcgggtgggcacgagaaggagctcaccacacagagaaacaccgaaacgcgagacggcggcagagacagcgaagcacaccaaagcacaacacaccacgacacagca

SEQ ID NO: 13436 - DNA, 2109 bp, Homo sapiens
  misc_feature 1, 2, 2104, 2105, 2106, 2107, 2108, 2109: n = A,T,C or G
nngtaagaatagcaatagggacggcctgtggtattcggccgtgccgggtgtcatggcggcctgcaggtactgctgctcgtgcctccggctccggcccctgagcgatggtcctttccttctgccacggcgggatcgggcactcacccagttgcaagtgcgagcactatggagtagcgcagggtctcgagctgtggccgtggacttaggcaacaggaaattagaaatatcttctggaaagctggccagatttgcagatggctctgctgtagtacagtcaggtgacactgcagtaatggtcacagcggtcagtaaaacaaaaccttccccttcccagtttatgcctttggtggttgactacagacaaaaagctgctgcagcaggtagaattcccacaaactatctgagaagagagattggtacttctgataaagaaattctaacaagtcgaataatagatcgttcaattagaccgctctttccagctggctacttctatgatacacaggttctgtgtaatctgttagcagtagatggtgtaaatgagcctgatgtcctagcaattaatggcgcttccgtagccctctcattatcagatattccttggaatggacctgttggggcagtacgaataggaataattgatggagaatatgttgttaacccaacaagaaaagaaatgtcttctagtactttaaatttagtggttgctggagcacctaaaagtcagattgtcatgttggaagcctctgcagagaacattttacagcaggacttttgccatgctatcaaagtgggagtgaaatatacccaacaaataattcagggcattcagcagttggtaaaagaaactggtgttaccaagaggacacctcagaagttatttaccccttcgccagagattgtgaaatatactcataaacttgctatggagagactctatgcagtttttacagattacgagcatgacaaagtttccagagatgaagctgttaacaaaataagattagatacggaggaacaactaaaagaaaaatttccagaagccgatccatatgaaataatagaatccttcaatgttgttgcaaaggaagtttttagaagtattgttttgaatgaatacaaaaggtgcgatggtcgggatttgacttcacttaggaatgtaagttgtgaggtagatatgtttaaaacccttcatggatcagcattatttcaaagaggacaaacacaggtgctttgtaccgttacatttgattcattagaatctggtattaagtcagatcaagttataacagctataaatgggataaaagataaaaatttcatgctgcactacgagtttcctccttatgcaactaatgaaattggcaaagtcactggtttaaatagaagagaacttgggcatggtgctcttgctgagaaagctttgtatcctgttattccccgagattttcctttcaccataagagttacatctgaagtcctagagtcaaatgggtcatcttctatggcatctgcatgtggcggaagtttagcattaatggattcaggggttccaatttcatctgctgttgcaggcgtagcaataggattggtcaccaaaaccgatcctgagaagggtgaaatagaagattatcgtttgctgacagatattttgggaattgaagattacaatggtgacatggacttcaaaatagctggcactaataaaggaataactgcattacaggctgatattaaattacctggaataccaataaaaattgtgatggaggctattcaacaagcttcagtggcaaaaaaggagatattacagatcatgaacaaaactatttcaaaacctcgagcatctagaaaagaaaatggacctgttgtagaaactgttcaggttccattatcaaaacgagcaaaatttgttggacctggtggctataacttagccacccggcgtaacaggttattaccagagacgcaacaacgcctcgtcgcccacagcgtacgtatgagacctacacgaagaacagcaacagaagagtcctcaaaaaaaggtcacttacaaggatcaaagtcatggttgcttccatcatctcttgcacacttaccaccnnnnnn

SEQ ID NO: 13437 - DNA, 1711 bp, Homo sapiens
  misc_feature 1, 2, 1397, 1398, 1399, 1400, 1401, 1402, 1403, 1404, 1405,1406, 1407, 1408, 1409, 1410, 1411, 1412, 1413, 1414, 1415,1416, 1417, 1418, 1419, 1420, 1421, 1422, 1423, 1424, 1425,1426, 1427, 1428, 1429, 1430, 1431, 1432, 1433, 1434: n = A,T,C or G
  misc_feature 1435, 1436, 1437, 1438, 1439, 1440, 1441, 1442, 1443, 1444,1445, 1446, 1447, 1448, 1449, 1710, 1711: n = A,T,C or G
nnccggcctcctctcgccaacgcgtccgggggatataagggggagctgcgggccaggcggcgccccctgcgtcgcgcagggtcggggactgcgcggcggtgccaggccgggcgtgggcgagagcacgaacgggctgcctgcgggctgagagcgtcgagctgtcaccatgggtgatcacgcttggagcttcctaaaggacttcctggccgggggcgtcgccgctgccgtctccaagaccgcggtcgcccccatcgagagggtcaaactgctgctgcaggtccagcatgccagcaaacagatcagtgctgagaagcagtacaaagggatcattgattgtgtggtgagaatccctaaggagcagggcttcctctccttctggaggggtaacctggccaacgtgatccgttacttccccacccaagctctcaacttcgccttcaaggacaagtacaagcagctcttcttagggggtgtggatcggcataagcagttctggcgctactttgctggtaacctggcgtccggtggggccgctggggccacctccctttgctttgtctacccgctggactttgctaggaccaggttggctgctgatgtgggcaagggcgccgcccagcgtgagttccatggtctgggcgactgtatcatcaagatcttcaagtctgatggcctgagggggctctaccagggtttcaacgtctctgtccaaggcatcattatctatagagctgcctacttcggagtctatgatactgccaaggggatgctgcctgaccccaagaacgtgcacatttttgtgagctggatgattgcccagagtgtgacggcagtcgcagggctggtgtcctacccctttgacactgttcgtcgtagaatgatgatgcagtccggccggaaaggggccgatattatgtacacggggacagttgactgctggaggaagattgcaaaagacgaaggagccaaggccttcttcaaaggtgcctggtccaatgtgctgagaggcatgggcggtgcttttgtattggtgttgtatgatgagatcaaaaaatatgtctaatgtaattaaaacacaagttcacagatttacagtgaacttgatctacaagttcacagatccattgtgtggtttaatagactattcctaggggaagtaaaaagatctgggataaaaccagactgaaaggaatacctcagaagagatgcttcattgagtgttcattaaaccacacatgtattttgtatttattttacatttaaattcccacagcaaatagaaaataatttatcatacttgtacaattaactgaagaattgataataactgaatgtgaaacatcaataaagaccacttaatgcacgcgggagaggaagaaaaagaaagagaaaaagannnnnnnnnnnnnnnnnnnnnnnnnnnnnnnnnnnnnnnnnnnnnnnnnnnnngggggcccattaaattggttaaaaaaaaaaacctccaaaacccccccggaacccgaaaaaaaaaaaaaaaggcaatggggggggtaaactggttaatggaagttaaaaagggtcacaaaaaaagaaatggcttcaaaattttcaaaaaaaaagctttttttaaacggaatttaagtgggggttggccaaaaccaaaaaaggttttttataatgtgggaacccccgggtcccaacccaaaaaaaattccttttccgtttccnn

SEQ ID NO: 13438 - DNA, 1067 bp, Homo sapiens
  misc_feature 1059, 1060, 1061, 1062, 1063, 1064, 1065, 1066, 1067: n = A,T,C or G
acgcggggggagccggagccgcggaacgagccacagagaaaaaggttattggttggcagttcagccaatgagcgggcctgttactagtttgcggcatcctgtggtataggggaagcgctcgcctggaattcctacgcgtcccttgggtttagcacgatgagctcaatcggcactgggtatgacctgtcagcctctacattctctcctgacggaagagtttttcaagttgaatatgctatgaaggctgtggaaaatagtagtacagctatggaatcagatgcaaagatggtgtgtcttggggtagaaaaattagtcctttctaaactttatgaagaaggttccaacaaaagactttttaatgttgatcggcatgtggaatggcagtagcaggtttgtggcagatgctcgttctttagcagacatagcaagagaagaagcttccaacttcagatctaacttggctacaacattccactaaaacatcttgcagacagagtggccatgtatgtgcatgcatatacactctacagtgctgttagacctttggctgcagtttcatgttagggtcttacagtgtgaatgacggtgcgcaactctacatgattgacccatcaggtgtttcatacggttattggggctgtgccatcggaaagccaggcaagctgcaaagacggaaatagagaagcttcagatgaaagaaatgacctggcgtgatatcgctaaagaagtgaaaataattacatagtacatgacgaagttaggataaggcttgactagaatcagtgggtggtgaattacttatggagactgagttgtcaaagttagaggagaaggggattggagggatttgggggagagatcgggggtgttgtatttctcgttgtgttatttcagcaggaattgcggtaaacgggaatttgtttttagaaaaaaggggcgaatacggggggggaggaggagaagggatatccttggcccgaaccccccttgggggaaattcccccccctgggggggcctttttaagggatcccaccctgggaccacactgggggaaaaannnnnnnnn

SEQ ID NO: 13439 - DNA, 725 bp, Homo sapiens
  misc_feature 1, 2, 3, 4, 5, 6, 725: n = A,T,C or G
nnnnnncactggggggttgaaaagcaaacccagaagaaagcgaaaacattacctgccgaccagcagagttctgttctaggtggcaagaaccatgcacttctccagctcagccagggcagcagatgagaactttgactatttgttcaagattatcctcattggggattccaatgtggggaagacgtgtgtggtgcagcatttcaagtctggagtctacactgagacacagcagaacacgattggagtggactttaccgtgcgttcccttgatattgacggcaaaaaagtgaagatgcaggtgtgggacacagctggccaggagcgcttccgcaccatcacccaaagctactaccgcagtgcccacgcagccatcatcgcctatgacctcacccggcggtccacgttcgagtccatccctcactggattcatgagatagagaaatatggagctgcaaatgtggtcattatgctgattggaaataaatgtgacctctgggaaaagcggcacgtcctgttcgaggatgcctgcacactggctgagaagtacggcctcctgcccgttttggagacatctgccaaggagtcaaaagaacatagtaagaagtcttcgtgctcatgcacaaggagctgatcgcgcgcaacagcctgcacctatatggggagagtgccctgaacggcctcccctggactccagccccgttcttatgcccaggtccatagtgaan

SEQ ID NO: 13440 - DNA, 5969 bp, Homo sapiens
ctcccaatatatatattcttactggttctggcaaagtagtttctgaggtgcctaggaaggcttgcctgagcacattactgcagagcggccctcacacaggaaggagcgagaggttgaagagggaggcatcagctgctgcctcccttcttcatctcccaaggttacttacaaagctccagttccaacaggggaagtatattttgctgattcttttgacagaggaactctgtcagggtggattttatccaaagccaagaaagacgataccgatgatgaaattgccaaatatgatggaaagtgggaggtagaggaaatgaaggagtcaaagcttccaggtgataaaggacttgtgttgatgtctcgggccaagcattatgccatctctgctaaactgaacaagcccttcctgtttgacaccaagcctctcattgttcagtatgaggttaatttccaaaatggaatagaatgtggtggtgcctatgtgaaactgctttctaaaacaccagaactcaacctggatcagttccatgacaagaccccttatacgattatgtttggtccagataaatgtggagaggactataaactgcacttcatcttccgacacaaaaaccccaaaacgggtatctatgaagaaaaacatgctaagaggccagatgcagatctgaagacctattttactgataagaaaacacatctttacacactaagtaagaaaaagcattagtttgggggcttatggtattacatatatatcatccatttaatttaaagattgtatatctggccgggagcggtggctcacgcctgtaatcccagcactttgggaggccgagatgggcagatcacctgagatcaggaattcgagaacagtctggccaacacggtgaaaccctgtctctactttttaaaaatacaaaaaatttagccaggcgtggtggcgggaatctgtaaccccagctacttgggaggctagagcggagactggaccctagttccctgaagagaaaggggaatgtaccagaaggagaacatgcagtggttgagaaacttagcagttacagcacctattgttgaggcgagtaatccagttggagagggacagggcgttaaaagcaggaaagcccccgaaagctcatctaagtgcatctctttccacaccggaggctagagatcatggaagggaagtggttgctgtgtatgttactggtgcttggaactgctattgttgaggctcatgatggacatgatgatgatgtgattgatattgaggatgaccttgacgatgtcattgaagaggtagaagactcaaaaccagataccactgctcctccttcatctcccaaggttacttacaaagctccagttccaacaggggaagtatattttgctgattcttttgacagaggaactctgtcagggtggattttatccaaagccaagaaagacgataccgatgatgaaatttccaaatatggaatagaaagtgggaggtagaggaaatgaaggagtcaaagcttccaggtgataaaggacttgtgttgatgtctcgggccaagcatcatgccatctctgctaaactgaacaagcccttcctgtttgacaccaagcctctcattgttcagtaagtgaaatgcttgttggataaaagctttctgcaaagggtaatcttagaagacattatgtaacttttatctctatgttacacaattatgagattatataagtcgtgactgggatacccgtgtggatttaaacaccttgtaattaatagtttttcctggctggtgcattcttttgacagaaactggttacttattttcctgactctaaataacttgtagattttgcagaacgaatttaccggaaatctgcattaatgttcaatttaattttatttatttttgtggaatttgataactattcaaaaacaatagaagatggaatcctttgtaagggtaaacatttgacatatggtaaaacgtgactaagatgagggagagaggaaatacattaagagagtttcgatctttcaaaatgccatacagtgtttctgcttttctctctgatattaggtatgaggttaatttccaaaatggaatagaatgtggtggtgcctatgtgaaactgctttctaaaacaccagaactcaacctggatcagttccatgacaagaccccttatacgattatgtttggtccagataaatgtggagaggactataaactgcacttcatcttccgacacaaaaaccccaaaacgggtatctatgaagaaaaacatgctaagaggccagatgcagatctgaagacctattttactgataagaaaacacatctttacacactaatcttgaatccagataatagttttgaaatactggttgaccaatctgtggtgaatagtggaaatctgctcaatgacatgactcctcctgtaaatccttcacgtgaaattgaggacccagaagaccggaagcccgaggattgggatgaaagaccaaaaatcccagatccagaagctgtcaagccagatgactgggatgaagatgcccctgctaagattccagatgaagaggccacaaaacccgaaggctggttagatgatgagcctgagtacgtacctgatccagacgcagagaaacctgaggattgggatgaagacatggatggagaatgggaggctcctcagattgccaaccctagatgtgagtcagctcctggatgtggtgtctggcagcgacctgtgattgacaaccccaattataaaggcaaatggaagcctcctatgattgacaatcccagttaccagggaatctggaaacccaggaaaataccaaatccagatttctttgaagatctggaacctttcagaatgactccttttagtgctattggtttggagctgtggtccatgacctctgacattttttttgacaactttatcatttgtgctgatcgaagaatagttgatgattgggccaatgatggatggggcctgaagaaagctgctgatggggctgctgagccaggcgttgtggggcagatgatcgaggcagctgaagagcgcccgtggctgtgggtagtctatattctaactgtagcccttcctgtgttcctggttatcctcttctgctgttctggaaagaaacagaccagtggtatggagtataagaaaactgatgcacctcaaccggatgtgaaggaagaggaagaagagaaggaagaggaaaaggacaagggagatgaggaggaggaaggagaagagaaacttgaagagaaacagaaaagtgatgctgaagaagatggtggcactgtcagtcaagaggaggaagacagaaaacctaaagcagaggaggatgaaattttgaacagatcaccaagaaacagaaagccacgaagagagtgaaacaatcttaagagcttgatctgtgatttcttctccctcctcccctgcaagagtggtcctaggagaggacctggcacaccttaggttgacattcagaaaacttcaagacatcaccatcagcaggctccagttgaacactagtctgtgtaactttaaacatctagcagtaaatacttgcagttgtgatataaaggaccctgtttctgtagaaaagaaaacatttaacataatggttgtgaaatgtaacatgaagcaaactaactttttttttttttaacatctttgtttttaaaatagaatgatagaactttgccagtctttaagatcttggcttaatttaatgtattaatctgtttgtgcaaacataataccaccatttaaaaatgttagggagatgagttgcagtttttataatagatttttttttaaagtttggtattgtaaaacattcacacctctgtccctcaaaattgataattacgtttaaagtgcagtcatttgtggttagaatcttgttttgtttgcttccattattgagttcctcctaaggaaattgaggagagggactgaatagaagcccaaattcatataaaagttgcgtttaagttgtattaaaaatagatatataagaaaaaattctttcacttgatgtttgttagaccagaaagtgtgtgtgttctgtagctcagttcccagacagctttttaggtagtggaggaggtggcttcatgtggcacttgggcatttatattccacttgggagggtcaggctgtggccttctggagcaggtggcttgttaaggaacgctagcagggcatggcacgtgagctccggaatagatgtcttcatcacttcttccactgtgtgttgacactgttttccttacctatttcctcagatccccagctttctcctctgctatgcattttcttcacagtgcagcttgcagtccgttgctgaaaatgattataagccctgcataatgttaagctttattgtgattacgtgtatgtttcttctttcttttaagcagacccatacctttccagggtcaaagtacagaatagaatacattgatacaaagtacagaaaaatactttgatttttatccatttcttttactctgtgtaaagactttagaagtctaattcacaggcaaaccaatacagaattgactgcagttgaacagactagaagtatttgtgggaggagtgacatgaagcatgagttatctgattttttttgtagctgctatatattttaagccttcatttgcaattcatgtaacagttgtgtcataaattacacaataaagcagtcctgttcaaatttttttttaacgtggcttgtagaatttttaaaaaagtgatcttaggtttgttttttcatgcgggatgcagatgggtgctatcagagcctctcccacaccactatagtgtaataatgttattattactctacactgaaacgtattcagagttagatattattttagcttcagttgttctttagaggctttcaaatgtaccgatgatactgtttcttgcactgaatatataaacactccacagtgtttatattgggaagatattgggaaggaaatatatttgtaaaagatgaaggctgtatctatttttttttctttttaaactggttcacttaaattcttttgaggatgggatgtatttttcttgctgttcagtgctttttccttttcatctgttgttctgtggtcacagtgaccttagctacatagcagactttcccaaatgtattgattacaaataaacagttgttacttagcaagacctgaaaatatgtctgcaggtttctccttgaagcaaatgtgtgggatcattgcatttccagaaatctgcctccttcaccctccgttgacagtatatgtcatgcctcactttcttctagctgagctttaaatcattagagcttaaattgtcagatcgttcattgcctttccagggttatttagtaaagtttgttgaaaacaaaaacgccttttcttggttcttttttcagttattttgaaggtccagcatcctgattaaatgtctgacacattaatgaatgaccagcagcagctttcagctcttaaaaagacacttatattttgattttacatgctggttacctgttccattgttgtcaaatgcccactctccatcagatgtgttcctccattttcttatccacaaagtactcctcacttttcaatttgtcatgttactaaatggtgttacattaaagccctgtgttaagtgtctgcttttgactgaatttcttcatagtaaccttcagtgtgtgtgtgtgactatgttcaattagtgggttgatcttcgtataattggccactatgtgagagttcactactaggcagaaactattatggacagtgaaataatgacttttatctcaccacgtgagtttgatgcagtcttttctgtctagcccttgcctcttcctgccctgattgcggtgcagtagtttctgttgtataatagtggggacagcagctcagaaaaggagggaatgctactgataa

SEQ ID NO: 13441 - DNA, 4579 bp, Homo sapiens
  misc_feature 4578, 4579: n = A,T,C or G
gtccgggcggattggcggctgggagctctcgggctggggcgttgtatttattaatttatattccgcggcgccccgcgcgggcggctccttcgtgtccagccgccgccaccggagctcccggggcctccgcggggagcgcgtcccccgcatccgcccgacccccggggctggcacgtgctgcgcccggtccgctgagggggcggaggccccgatctccccgaccccccttctctgcttagaggaggaggagcagcggcagcggcagcaggaggcgacagctgccagccgaggaggcgcggcggagaggggactgcggtcagctgcgtccacttggggctgtgcggcggtcccgcgcccggcgatgttcccgggcactccctgagtagcggcagcttatcccccgcccgctagcccgccctggtccccggctcgctcgctggctggcgcggccccggccccgctctgcgtcggccccgccgcggtggaggcgcgcgagggggacgcggccggggatgagcggattgcgggtgaactcgccgcccgggggccccgcgaagccgtgagccgctgcttttctccgagtcgccgccctgcccttggatttgagatcatgtccatccacatcgtggcgctggggaacgagggggacacattccaccaggacaaccggccgtcggggcttatccgcacttacctggggagaagccctctggtctccggggacgagagcagcttgttgctgaacgcggccagcacggtcgcgcgtccggtgttcaccgagtatcaggccagtgcgtttgggaatgtcaagctggtggtccacgactgtcccgtctgggacatatttgacagtgattggtacacttctcgaaatctaattgggggcgctgacatcattgtgatcaaatacaacgttaatgacaagttttcattccatgaagtaaaggataattatattccagtgataaaaagagcattaaattcagttccagtaattattgctgctgttggtaccagacaaaatgaagagttaccttgtacatgcccactatgtacctcagacagagggagctgtgttagtacaactgaagggatccaacttgcaaaagaactaggagcgacctatcttgaactccacagccttgatgacttctacataggaaagtattttggaggagtgttggagtattttatgattcaagccttaaatcagaagacaagtgaaaaaatgaagaaaagaaaaatgagcaactcctttcatggaattagaccacctcaacttgaacaaccagaaaaaatgcctgtcttaaaggctgaagcgtcacattataactctgacttaaataacttgctgttctgctgccagtgtgtggacgtggtattttacaaccccaatttaaagaaagttgtagaggcccacaagatcgttctctgcgctgtaagccatgttttcatgctgcttttcaatgtgaagagtcccactgacattcaggattccagtatcatccgaactacccaggatctttttgctataaacagagatactgcatttccaggtgctagccatgaatcttcaggcaacccaccattacgagtcattgttaaagacgccctcttctgttcttgtttatcagacatccttcgcttcatttattcaggtgcttttcagtgggaagaattggaagaagatatcaggaagaagttgaaagattctggggatgtttcaaatgtaatcgagaaagttaaatgcattttaaaaacaccaggaaagattaattgcctaaggaattgcaaaacctatcaagccagaaaacctttgtggttttataacacttccctcaagtttttccttaataagccgatgcttgccgatgttgtcttcgaaattcaaggtacgacagtgccagcccacagggccatcctggtggcccgttgtgaagtgatggcagccatgtttaatggtaattacatggaagcaaagagtgtcctgattcccgtttatggtgtttccaaagagactttcttgtcatttttagaatacctgtacacagactcctgctgcccagctggcatattccaggccatgtgtctcctgatctgtgccgagatgtaccaagtgtccagactgcagcacatctgtgagctgttcatcattacccagctgcagagcatgccaagcagggaactggcatccatgaaccttgatatagttgacctgcttaaaaaggccaagtttcaccactctgattgcctttcaacctggctacttcatttcattgctactaactacctcatcttcagtcaaaagcctgaatttcaggatctttcagtggaagaacgcagttttgttgaaaagcacagatggccgtcgaatatgtacttgaagcagcttgcggaatacaggaagtatattcactcccggaaatgtcgttgcttagtaatgtaacctggagcttttatacactacatttcttttttattattatgaagaatgggatacctccaggttccagtaaaattcttctgaccgaaaccaatgtgggtgttagaaaaattaccatatagcttaatatgtttattagttctctttggaaaaaaactaccactgtggtcttaaaagggaacaaaatataccataggctaaaactaaggctttcactctagaatgcaaagctgttttgcagctgttttcccttaaagatgtcctgttgctttagtgatatttagacccctctcagttaagaaatgcttagattaaaaaaaaaaaattacgtaggattaatacagaaatttaatcatgtctgattaattgctctattaaaataaggggcatttaaagacccagcataaccatttgtataatgagaaatctaggggaaaaccaatcagtccaacatgagattttaggaatagaaatttgccggccatttggaaagtgaaatgccacttagttctcaattgatgacagtgtttgaatcatcataaaaaaaatacctgcttttcatctggacaacccaattgagccactttatctccttttggcaatctgagtaggcggggaacctaggcagggctggctttcttagcgtgtaacttgtgtagcagcacagggcccacacttagaaggaccccacacttggttcaaggctctgctatagcggaaattcttaataatgtttgaagaagggccccatgatttcattttgtgctgagccctcaaaattatgtctgtttcgtggtgggaaatatcctatgttttcttgctcaaacacctttctctctgaaagcagaaaaaggcactgatataaagggaagagaaggaggctcaccggagggaagagaacatagtgaagattcccgcctttggggaggtctggaccacccagggcctccactgccaccttggctggcaagggagaaatgtgttgtgttgtcttagctttaaaacagtcacagttcttgctctatcatagatgaacaaatactttcttgatcattctgtaagaccaggaggttggtaagagtgactaaccagcctaactttaatacacatgtataaagatgttcacagagaaagatgctctgtagagaatttgctaccgaagttggctcaagaatttgtttttagtgttatttaccaagattaggacgtcagtggcttaaattctttgaattcttttcaaggactgcaagattatttgataaagagtagcatgaatcttgtgctctaatattacacagtaagttcaaagaaaggatgtaagtcaaagacttgttacatagagggaaaatggactgggatagaggacagactgatagtttctttctttcatatcacatgtatagagaaataattatatcagaaactcacaaacctagacatggaaaaacagattactgtctattgtcagcatcattttcatctgtaagtcactactggaatatatttttcttttaatttccagtgactttagaatacacacagtttttccgacttttcaaaaatttgattaaatggttttatagtataatattgggaccccataccgttagcccttgtatgtataccaacactgccaaagtaaaacattaggtcaggcatggtggctcaggcctgtaatcccagcattttgggaggctgaggcaagtggataacttgaggtcatgagttcgaaaccagcctggccaaaacagtgaaaccccgtctctactaaaaatacaaaattagccagatgtggtggcgcacacctgtaatcccagctactcaggaagctgaggcaggaaaatcgcttgaacctgggaggtggaagttgcagtgagccgagatcgcaccactgcactccagcctgggtgacaagagcgaaactccatctcaaaaaaaacaaaaagacccagaggtgaaacattaaaatttccctatagatttatttcccaggaaaatttttcactgggctgaatttcaattaggctgtatcatggatcgatccctggaatcgattatgtcttcgtcttacatcccttggttactcacccctgggaaatccctttgcacacgattgcttgtaaaaacgatactgnn

SEQ ID NO: 13442 - DNA, 6342 bp, Homo sapiens
ggggatccttccgctgggctcagccgtttccggagtctgcgctgcgcccggttccgccattgcggctctcctggcccctggagcctccgcccccgacccgagctctttcgtctgcctgccagtttcctgcgtccccggagaggatcctgctgagcccagcctcccccctccccttctcctcctctcccttggagagcccgggcagccactgccccgcagccccagtgacaggaggagaccataacccccgacagcgccatggcccagattctgccaattcgttttcaggagcatctccagctccagaacctgggtatcaacccagcaaacattggcttcagtaccctgactatggagtctgacaaattcatctgcattagagaaaaagtaggagagcaggcccaggtggtaatcattgatatgaatgacccaagtaatccaattcgaagaccaatttcagcagacagcgccatcatgaatccagctagcaaagtaattgcactgaaagctgggaaaactcttcagatttttaacattgaaatgaaaagtaaaatgaaggctcataccatgactgatgatgtcaccttttggaaatggatctctttgaatacggttgctcttgttacggataatgcagtttatcactggagtatggaaggagagtctcagccagtgaaaatgtttgatcgccattctagccttgcagggtgccagattatcaattaccgtacagatgcaaaacaaaagtggttacttctgactggtatatctgcacagcaaaatcgtgtggtgggagctatgcagctatattctgtagataggaaagtgtctcagcccattgaaggacatgcagctagctttgcacagtttaagatggaaggaaatgcagaagaatcaacgttattttgttttgcagttcggggccaagctggagggaagttacatattattgaagttggcacaccacctacagggaaccagccctttccaaagaaggcagtggatgtcttctttcctccagaagcacaaaatgattttcctgttgcaatgcagatcagtgaaaagcatgatgtggtgttcttgataaccaagtatggttatatccacctctatgatcttgagactggtacctgcatctacatgaatagaatcagtggagaaacaatttttgttactgcacctcatgaagccacagctggaataattggagtaaacagaaagggacaagttctgtcagtgtgtgtggaagaagaaaacataattccttacatcaccaatgttctacaaaatcctgatttggctctgagaatggctgtacgtaataacttagccggtgctgaagaactctttgcccggaaatttaatgctctttttgcccagggaaattactcggaggcagcaaaggtggctgctaatgcaccaaagggaattcttcgtactccagacactatccgtcggttccagagtgtcccagcccagccaggtcaaacttctcctctacttcagtactttggtatccttttggaccagggacagctcaacaaatacgaatccttagagctttgtaggcctgtacttcagcaagggcgaaaacagcttttggagaaatggttaaaagaagataagctggaatgttctgaagaactgggtgatcttgtgaaatctgtggaccctacattggcacttagtgtgtacctaagggctaacgtcccaaataaagtcattcagtgctttgcagaaacaggtcaagtccaaaagattgttttatatgctaaaaaagttggatacactccagattggatatttctgctgagaaatgtaatgcgaatcagtccagatcagggacagcagtttgcccaaatgttagttcaagatgaagagcctcttgctgacatcacacagattgtagatgtctttatggaatacaatctaattcagcagtgtactgcattcttgcttgatgctctgaagaataatcgcccatctgaaggtcctttacagacgcggttacttgagatgaaccttatgcatgcgcctcaagttgcagatgctattctaggcaatcagatgttcacacattatgaccgggctcatattgctcaactgtgtgaaaaggctggcctactgcagcgtgcattagaacatttcactgatttatatgatataaaacgtgcagtggttcacacccatcttcttaaccctgagtggttagtcaactactttggttccttatcagtagaagactccctagaatgtctcagagccatgctgtctgccaacatccgtcagaatctgcagatttgtgttcaggtggcttctaaatatcatgaacaactgtcaactcagtctctgattgaactttttgaatctttcaagagttttgaaggtctcttttattttctgggatccattgttaactttagccaggacccagatgtgcactttaaatatattcaggcagcttgcaagactgggcaaatcaaagaagtagaaagaatctgtagagaaagcaactgctacgatcctgagcgagtcaagaattttcttaaggaagcaaaactaacagatcagctaccacttatcattgtgtgtgatcgatttgactttgtccatgatttggtgctctatttatatagaaataatcttcaaaagtatatagagatatatgtacagaaggtgaatccaagtcgacttcctgtagttattggaggattacttgatgttgactgttctgaagatgtcataaaaaacttgattcttgttgtaagaggtcaattctctactgatgagcttgttgctgaggttgaaaaaagaaacagattgaaactgcttctgccttggctagaggccagaattcatgagggctgtgaggagcctgctactcacaatgccttagccaaaatctacatagacagtaataacaacccggagagatttcttcgtgaaaatccctactatgacagtcgcgttgttggaaagtattgtgagaagagagatccacatctggcctgtgttgcttatgaacgtggccaatgtgatctggaacttattaatgtttgcaatgagaattccctcttcaaaagtctttctcgctacctggtacgtcgaaaggatccagaattgtggggcagcgtgctgctggaaagcaatccttacaggagacccctaattgaccaggttgtacaaacagctttgtctgagactcaggaccctgaagaagtgtcagtaactgtaaaggctttcatgactgcagaccttcctaatgaactcattgaactgctggagaaaattgtccttgataactctgtattcagtgaacacaggaatctgcaaaacctccttatcctcactgcaattaaggctgaccgtacacgtgttatggagtatattaaccgcctggataattatgatgccccagatattgccaatatcgccatcagcaatgagctgtttgaagaagcatttgccattttccggaaatttgatgtcaatacttcagcagttcaggtcttaattgagcatattggaaacttggatcgggcatatgagtttgctgaacgttgcaatgaacctgcggtctggagtcaacttgcaaaagcccagttgcagaaaggaatggtgaaagaagccattgattcttatatcaaagcagatgatccttcctcctacatggaagttgttcaggctgccaatactagtggaaactgggaagaactggtgaagtacttgcagatggcccgtaagaaggctcgagagtcctatgtggagacagaactgatattcgcactggctaaaacaaaccgccttgcagagttagaagaatttatcaatggaccaaataatgctcatatccaacaagttggtgaccgttgttatgatgaaaaaatgtatgatgctgctaagttgttgtacaataatgtttccaattttggacgtttggcatctaccctggttcacctgggtgaatatcaggcagctgttgatggggctaggaaagctaacagtactcgaacatggaaagaggtctgcttcgcctgtgtagatgggaaagaattccgtcttgctcagatgtgtggacttcatattgttgtacatgcagatgaattagaagaacttatcaactactatcaggatcgtggctattttgaagagctgatcaccatgttggaagcagcactgggacttgagcgagctcacatgggaatgtttactgaattagctattctatactctaaatttaagcctcagaaaatgagggagcacctggagctgttctggtctagagtgaatattcccaaggtgctaagagctgcagaacaagctcatctttgggcagaactggtgtttttgtatgacaagtatgaagaatatgataatgccataattaccatgatgaatcatccaactgatgcctggaaagaagggcaattcaaagatatcattaccaaggttgccaatgtggaactatactacagagcaatacagttctacttagaattcaagcctctgttgttaaatgatttgctgatggtgctgtctccacggttggatcacactcgtgcagtcaattatttcagcaaggttaaacagctaccactggtgaaaccgtatttgcgttcagttcagaaccataacaacaaatctgtgaatgaatcattgaacaatctttttattacagaagaagattatcaggctctgcgaacatcaatagatgcttatgacaactttgacaatatctcgcttgctcagcgtttggaaaaacatgaactcattgagttcaggagaattgctgcttatctcttcaaaggcaacaatcgctggaaacagagtgtagagctgtgcaagaaagacagcctttacaaggatgcaatgcagtatgcttctgaatctaaagatactgaattggctgaagaactcctgcagtggtttttgcaggaagaaaaaagagagtgctttggagcttgtctgtttacctgttacgatcttttaaggccagatgtcgtcctagaaactgcatggaggcacaatatcatggattttgccatgccctatttcatccaggtcatgaaggagtacttgacaaaggtggatgcaataaaggaaaaggtggataaattagatgcttcagaatcactgagaaaagaagaagaacaagctacagagacacaacccattgtttatggtcagccccagttgatgctgacagcaggacccagtgttgccgtccctccccaggcaccttttggttatggttataccgcaccaccgtatggacagccacagcctggctttgggtacagcatgtgagatgaagcgctgatcctgtagtcacctattttcgtactgaaacatcgtctttacccacttctcagtttataatgggggaaaacaggcaacgtgttcttgtaacctttatttcatgaaggacttctttttgtttctaactataaacttggatcacctatgttaaaaccttatttcacattccacatcattttagaatttattttcgaaggggaatagtttcaatgttttattcacttgggctttttttcttccccctctttctttaaagaactgctcaatattcaatctgttgtgaagaacctgatttgcactctgtagtgtttaaagaaacaaagaactgctcaatattcaatctcttaaatttagtgtatgtaaacagcttacaaatacgtattgtctaaatgcatttaaatctgttttattcaaagaaaagctaaagcaaaaacactggcatatgaccatgcaagactgtcagtgccaacaaagacaacactaatcagcacatcgtacactggattgcagtgcttcccagattattgaaaaatgttacagacaacttgcctgatttttaaatgagcgtaaaaggccctctaacctatgcaggtttccccattatgcatatagaaaatgctagtatgttttgctcacttcatatgtaacaggtgcccttatgttgtgctgtatcctgtgctttttctgtgggaccattccattcaggagcaaagagcaccatgattccaatcttgtgtgtgtttactaacccttccctgaggtttgtgtatgttggatattgtggtgttttagatcactgagtgtacagaagagagaaattcaaacaaaatattgctgttcttcagtttgtttgtggaatttgaaattactcaaatttaaaataaattactggactgtggaacttaaacaccaaggcactgcccaacacaccagccctctctccctcaaacagtccagccaagggtaacctacctcttagaaacagttcacaaacgcccatcgcctaactccttcacaaaaata

SEQ ID NO: 13443 - DNA, 956 bp, Homo sapiens
  misc_feature 1, 2, 3, 4, 5, 6, 7, 8, 9, 10, 11, 12, 13, 14, 955, 956: n = A,T,C or G
nnnnnnnnnnnnnnaaaagttgttccaaattgccaatgatggcccagtgttgtgaaataaacaaagtaccttgagtggctgatttgatcatctaggggggcgggggagttatttctgtttaaaatttaaccaatgaaacagagtatgaaatgtgaggtgtaatatttgtgtttagtaagtgtatattttagttcatgcttgaaatattttactgaatttcaataatgtttttaaattgaaacttactttttaattattttgaaatggcagaccaaaatacagaccatagattcatcaatgttgtaccgtctgctaacattttgcacttattaaaatcctctcattggtctctgaataattatttacataaattattagaatgtcaccaaaggatgaaagtcaaactgataggtatatttaaacataagtaagtaaataattgtgcatcgttgtcctgtaggaacttggaataacgtgcagtgtcttgcagtattgtgaaaccagcaacttgttcacaattcttctgaatttcttgggaaatttgaagtggagtacctacgctgttgttattcatttcctgcttttcacagaaaacaattttgttgcatggaagatcggtgagttaaaaaaagacctgccctgggtgtcaagcacagtagttacaccgctggttctgctccctctgcttgggatacatgggcagggtgccctggtggtagggccttggtcaccagcaaagtcagttcccatgggatcctctttctgagctgatgcccactcccctgaagaaggggcttctattcaggcctattgttgcaaggagcagaaacccacttaggctggctcaagtccgctgtgtatccgctgttcaacattcctgtttcacagatgtgtcccagcctcttttggggtatgacaccaagctggcaggggagacccagggaatgtcaccagnn

SEQ ID NO: 13444 - DNA, 1071 bp, Homo sapiens
  misc_feature 1052, 1053, 1054, 1055, 1056, 1057, 1058, 1059, 1060, 1061,1062, 1063, 1064, 1065, 1066, 1067, 1068, 1069, 1070, 1071: n = A,T,C or G
acagagtgtgggaatagtttcacgagtagttccgagtttgttatacatcagagaatccacactggggagaaaccctatgagtgtaatgagtgtggcaaagcttttgttggtaattcacccctacttcggcatcagaaaatccacactggagagaaaccctatgagtgtaatgagtgtggcaaaagctttggaaggacttcccatctaagccaacatcagcgtattcacacaggggaaaagccttattcttgtaaagtatgtggacaagccttcaattttcatacaaaactaactcggcaccagagaattcacagtgaggagaaaccctttgactgtgtagattgtggaaaagccttcagtgctcaggaacaattaaaaaggcatctgagaattcatactcaggagtcttcctatgtatgtgatgagtgtggaaaagccttgactagcaaaagaaatcttcatcagcatcaaagaatccatactggagagaaaccctatgagtgtagcaagtatgagaaggcctttgggacttcttcccagctaggtcaccttgagcatgtctactctggagagaagcctgtgctggacatttgtcgttttggcctcccagaattttttacccccttttactggtaatagtacactccagtgaaatgtactgagtggattccgtcttctactcaggaatggaatgtgtgacacaggcctgactcagcctctgatccatccctcaagccacagttaatgattcagatgtcagtagatgaccaaagatggttcaattagagtcccaggattgcaagagctaataggaacaaatactctccccccgcccacccccattggttttaatgctgagaagaagaactagactcttacagaggtgagaatgaagtccacacagcaaaaatgcatctgagaattggagagcagtaaaagactgaagataatgtttgaacagccacatacaccatgcctgaagctaaaaatatatacgggtttttgaattgcagcagccaataaattccatttttgtttggttggttttggcnnnnnnnnnnnnnnnnnnnn

SEQ ID NO: 13445 - DNA, 517 bp, Homo sapiens
  misc_feature 517: n = A,T,C or G
acccgctgcaggaagtagagcggttcctcgccccctacgggaggcaagaccttcacctgcgtatctttgacccaagcccggaggacatagccagggcggacaacatcttcacggccactgaacggaaccgcatcgactacgtcagctccgccgtccgtatcgaccacgccccggaccttccgcggccagagggacacacaaagaaaatgaattttttcaaagttggaaaacattttacagtggtggacatgccaggttatggctttagagcacctgaagattttgttgacatggtagagacctatctaaaagaacgaaggaacttgaagagaacatttttattagtggatagcgttgttggaattcaaaaaacagacaatattgccatagaaatgtgtgaagaatttgcattaccttatgtgattgtattaacaaaaattgacaaatcttccaaggggacatcttttaaaacaagtgcttcatatccagaaatttgttaacatgaaaactcaaggan

SEQ ID NO: 13446 - DNA, 2981 bp, Homo sapiens
  misc_feature 1, 2, 3, 4, 2979, 2980, 2981: n = A,T,C or G
nnnngaccagcagcaggaggagaaagaacatggcgggcgcatcagagctcgggaccggcccaggagcagcgggtggagatggagatgattcgctatacccgatcgcggttttaatcgacgagctccgcaatgaagacgtgcagctccgactcaacagtattaagaagttatcaacaattgccctagcacttggagtagaaaggacccgaagtgaattgttgccatttcttacagatacaatttatgatgaagatgaggtactattagctcttgctgagcagctgggaaatttcactggcctagtgggaggtcctgactttgcccactgtctgctgcctcctttggaaaatctggcaactgtggaagagactgttgttcgtgacaaggctgtggagtccctgagacagatctcccaggagcatactcctgttgctctggaagcttattttgtacctctggtgaaacgcttagcaagtggggattggttcacctctcgcacatctgcatgtggtttgttcagcgtttgctatcccagggcatcaaatgctgttaaagcagaaatcagacagcaattccgttccttgtgctcagatgacacaccaatggtacgacgtgctgctgcttccaaattgggtgaatttgcaaaagttttggaattagacagtgtgaaaagtgaaattgttccactgttcactagtctagcttcagatgaacaggattcagtgcgcctccttgctgtggaagcttgtgtcagtattgcccagttattgtctcaggatgaccttgagactttggtgatgcctacacttcgacaagcagcagaagataaatcttggcgcgttcgctatatggtggctgacagattttcagagctccagaaagccatgggtcctaaaatcaccctaaatgacctcatccccgcctttcagaacctacttaaagactgtgaagctgaagtccgggcagctgctgcccacaaagtaaaagaacttggtgagaacttgcccattgaagatagagagaccataattatgaatcaaattctgccttatataaaggaattagtatccgataccaatcaacatgtcaaatcggctctagcttctgtaattatgggattgtctactattttgggcaaagaaaataccattgaacatcttctacctcttttcttagctcagttaaaggatgagtgtcctgacgttcgtttgaatatcatctccaatttggattgtgtaaatgaagtgattggaatccgtcagctctctcagtctctccttcctgccatagtggagctggcagaagatgccaaatggagggtccgcctggccatcattgagtatatgccgctgctggcaggccagctgggtgtggaattctttgatgaaaagctgaattctttatgtatggcttggctcgtggaccatgtatacgccatccgagaagctgccaccaacaacctcatgaaactagttcagaagtttggtacagagtgggcccaaaatactattgttcccaaagtgttagtaatggcaaatgatcctaattacttgcatagaatgaccactttattctgcattaatgcactgtctgaggcctgtggtcaggaaataactactaagcaaatgctgcccatcgtattaaaaatggcaggagaccaagtagcaaatgttcgcttcaatgtggccaaatctctacaaaagattggaccaattctagataccaatgctttacagggagaagtgaagccagtactacagaagttaggtcaagatgaagacatggatgtcaaatactttgcacaggaagctataagtgttcttgcattggcataatgaggagcaggagggaaaaggcctttactagattcttgtcacaaatttctagtcaatgtgttcttaactgggtggagaaagaatggaaaaccttcaagatctcatccaagcaaatggcaacaacttagaagaaatcatttagtgacttaattctttctaaagatgaaatgggattgttttttactcgtcttccttgttaaatcattatttaagccgttcttattgaccaattcctgacacttgattgtctcctaatgctttatccatcaccacctgggctcctgcatcctcactgtggaatcaggcaccagccacataatgttccagacaaagcctggaagggtgtggacccagacgtggagtggagtgattctcttgacgtttacatatatctctgtgtctctccatcattccaaagctaaatgtacatgtttagaataacttattttataaactcttcgggagacatgttgagatttgaccgtaatgaaagccacattttcctgaattatgatggtctgcattagtctcatgtgaaaggggaatgtggaagctcagggttaatgtagtggttgttttggtttttatttgctcaattttgtctgtactcatgtcattcagaaacctgaagtgtggctgcatcttgctgctaatgtgtgatgttgacgcctaactgaatttgaacagctcaccactgtgcctacatttaaaaatacttctctctcttttctaaaaagctttaactgtagtgcctcctaataagcagtatgtttgtttcattgtgagattgcagttctgtatttcgaatgagtctaagaaccacagggataatactgtgcagatttcctgttctttacctggctctgcttccccagccagtattgacacctaagttcctttgctgcaattgtacagctagcttttccaaacctgcaagttatattgctaaacgatttctcagtatgggctgataccgggactcttatcacatggaaagataggttactaatttacacgtaaacccatctcaatctgaacactccgatacgagttaccggaaagtttcctgagcgcacttcatatgaggagccttgaacactaacctgaaccttgaaaaccccaatcggaccggggcacactaaannn

SEQ ID NO: 13447 - DNA, 1086 bp, Homo sapiens
  misc_feature 1: n = A,T,C or G
nagtcacccacgcgtccgggagctgggagcgtgccccgggcccggcggaggaggcggctgcagttggagtggagtcttgggagcgctgctggcagcgacttctcagcgaagcaagtgtctgagactgagagtccctaacagcggcagcggcggccacggcggcggctggggccgagttacttgtggaaattgttgattacccggacgtcttaaaaccaagaaacctgtgaacaggttcattaagaatctgctgtcttgaaaaatgcatattatgaatgctttgaattaagaaggtgttaacagtggttgtcatttctgccacataagagactataatctgaaacagttcctggcagttgcccagatgcctgaaactggcacgatctagtactcttgagtgatcatccttcaacgagaaatacagagctacttacatactgtacctcataccgtataaatgtaatctctctgatgccatttaatgcagtggacctcttttcagaatctaattgtcagatgcagaattaacacttggaatctggagaagcattttgtacaaattgaaagattgggttttttctttagttttccacatgtattgtctcatctctgttcttgaaacatccacaatcacataaactccagttataaccatggagttatgtgactcattaaaatttaggaaaagtgttgctgagctgtggaatcaggcgtttctccctcagttcaacaactaatacatagactgctgatcaagaataaggaaccaaataaagtcatgcacgttctgttgacagaggaactctgtggctgttgaattttactgtaactagttactctgtcttcagagtcaacttaatatacaagttatgtcataatggatggaaagacctgtgttgatgtatccagactctagcaaatgaagataaaaaacccgttatgactaatccttgggaagagaaagtctgcaaaatggctcaaaccagtttactgcaagggaagcagctttactgtagggagtggggttttccacaagcttcagcattgcctccaggagaaaagtaactgctgcaatagtgctgtcaa

SEQ ID NO: 13448 - DNA, 1235 bp, Homo sapiens
  misc_feature 1, 2, 3, 4, 1229, 1230, 1231, 1232, 1233, 1234, 1235: n = A,T,C or G
nnnncgcggccgcgtcgacacggccgcgaggaaacgactgcgggggcgcggcggcaccgcgaagggaggagtggcaacatggcgtcttcgggagctggtgaccctctggattctaagcgtggagaggccccgttcgctcagcgtatcgacccgactcgggagaagctgacacccgagcaactgcattccatgcggcaggcggagcttgcccagtggcagaaggtcctaccacggcggcgaacccggaacatcgtgaccggcctaggcatcggggccctggtgttggctatttatggttacaccttctactcgatttcccaggagcgtttcctagatgagctagaagacgaggccaaagctgcccgagcccgagctctggcaagggcgtcagggtcctaatctggatgggtattgatcatgtccaacctgctggagccccttcacatggtggatgatgccccatgaccctgtagaaattgaatcctgctcacaacattgttggccttcttactaaccttggaccgtgattgagcccaagaaaccagggacttacgcatttggccaatgtcaaaagaacagaactttgcccactgcacacttgctgtgtacaatgactgagccctttcttgtagtttgtttccttgtttgagaggtgtgcatgcgaccgtggcttttcccaaagtttctgactttgtggtttacccccttcaccttccagggacgcagttgttacgaggttagacgtggcagctctgtgcagtgtttgagcctacagtgggatacatagggtcaaattgagaataataaactgagtcattctcctggaaaaaaaaaaaccaaaaaaaaccgggggcttttgggggggggggaacaagcggtacgtgcagggggccgaggcccagagtgttgcgggaacccgttcttggtcacacgggggggaaaatcggggggcgccccacagaggggagcggaataaattcggaacaccggggtcaccgtaagtgtatttccacaaaccgaagacagaccacgacgcacggagggagacaccactgggagacacaagaggtagtgcaaagataacaacgacgaacgaccgccagcacaacacaagtagacgagacgaacgatcgaaacagccagagacgatgcagaactaaagcaaatacgcaaagcatagcgtagacagctgacataagagagacgaacaaagaacggatcacagaacnnnnnnn

SEQ ID NO: 13449 - DNA, 1515 bp, Homo sapiens
  misc_feature 1, 2, 3, 4, 5, 6, 7, 8, 9, 10, 1503, 1504, 1505, 1506, 1507,1508, 1509, 1510, 1511, 1512, 1513, 1514, 1515: n = A,T,C or G
nnnnnnnnnncgcggtccccccctcaacatggcggcagcggtgctctaggcgccggaagggggcgtgaatcggtgcgaccgcgcgcgtgcgcagtaccgggtccgcgcctgtccccgaaacttcgcaccccgtcgaactctcgcgagagcgtatctgcgtgtcgggacgtgcggaggctctcactttccgtcatggcgctgaaggtagcgaccgtcgccggcagccccgcgcaggcggtgctcgggccagcccttctctgccgtccctgggaggttctaggcgcccacgaggtcccctcgaggaacatcttttcagaacaaacaattcctccgtccgctaagtatggcgggcggcacacggtgaccatgatcccaggggatggcatcgggccagagctcatgctgcatgtcaagtccgtcttcaggcacgcatgtgtaccagtggactttgaagaggtgcacgtgagttccaatgctgatgaagaggacattcgcaatgccatcatggccatccgccggaaccgcgtggccctgaagggcaacatcgaaaccaaccataacctgccaccgtcgcacaaatctcgaaacaacatccttcgcaccagcctggacctctatgccaacgtcatccactgtaagagccttccaggcgtggtgacccggcacaaggacatagacatcctcattgtccgggagaacacagagggcgagtacagcagcctggagcatgagagtgtggcgggagtggtggagagcctgaagatcatcaccaaggccaagtccctgcgcattgccgagtatgccttcaagctggcgcaggagagcgggcgcaagaaagtgacggccgtgcacaaggccaacatcatgaaactgggcgatgggcttttcctccagtgctgcagggaggtggcagcccgctaccctcagatcaccttcgagaacatgattgtggataacaccaccatgcagctggtgtcccggccccagcagtttgatgtcatggtgatgcccaatctctatggcaacatcgtcaacaatgtctgcgcgggactggtcgggggcccaggccttgtggctggggccaactatggccatgtgtacgcggtgtttgaaacagctacgaggaacaccggcaagagtatcgccaataagaacatcgccaaccccacggccaccctgctggccagctgcatgatgctggaccacctcaagctgcactcctatgccacctccatccgtaaggctgtcctggcatccatggacaatgagaatatgcacactccggacatcgggggccagggcacaacatctgaagccatccaggacgtcatccgccacatccgcgtcatcaacggccgggccgtggaggcctaggctggccctaggaccttcttggtttgctccttggattccccttcccactccagcaccccagccagcctggtacgcagatcccagaataaagcaccttctccctaaaaaaaaaaaaaaaaaaaaaaaaannnnnnnnnnnnn

SEQ ID NO: 13450 - DNA, 4234 bp, Homo sapiens
  misc_feature 4206, 4207, 4208, 4209, 4210, 4211, 4212, 4213, 4214, 4215,4216, 4217, 4218, 4219, 4220, 4221, 4222, 4223, 4224, 4225,4226, 4227, 4228, 4229, 4230, 4231, 4232, 4233, 4234: n = A,T,C or G
cgcccacgcgtccggcggagtcttcggcgagacctaccgggccctgtctgtgccggccgtgagctgcgttaggacggctggagattacttctctaacaggatcaccagtttgctccacaaagcacaatgtctcgatcacgacaacccccccttgtgaccggcatctctccaaatgaagggataccatggacgaaggtcacaatcaggggagaaaatctggggactggccccaccgacctcataggcttgaccatttgtggacataattgcctcctgacggcagaatggatgtctgcaagtaaaatagtatgtcgagtgggacaagccaaaaatgacaaaggagacattattgtcaccactaagtcaggtggcagaggaacctcaacagtctctttcaagctactcaaacctgagaaaataggcattttggatcagtctgctgtgtgggttgatgaaatgaattattatgatatgcgcactgacaggaacaaaggaattccgcccttgtccttacgtcctgctaacccgcttggcattgagattgaaaaaagtaaattttcgcagaaggacttagaaatgctattccatggaatgagtgctgattttacaagtgagaatttctcagcagcctggtatcttatagagaatcactcaaacaccagttttgagcagctcaaaatggcagtcaccaacctaaagagacaggctaacaagaagagtgagggcagcctggcctatgtgaaaggcggtctcagtacattcttcgaagcacaggatgccctctcagccatccatcaaaaactagaagcagatggaacggaaaaagtagaaggatccatgacgcagaaactggagaatgttctgaacagagcaagtaatactgcagacacattgtttcaagaagtattaggtcggaaagacaaggcagattccactagaaatgcactcaatgtgcttcagcgatttaagtttcttttcaaccttcctctaaatattgaaaggaatattcaaaagggtgattatgatgtggttattaatgattatgaaaaggccaagtcactttttgggaaaacggaggtgcaagttttcaagaaatattatgctgaagtagaaacaaggattgaagctttaagagaattacttctggataaattgcttgagacaccatcaactttacatgaccaaaaacgttacataaggtacctgtctgaccttcatgcgtctggtgaccctgcttggcaatgcattggagcccaacacaagtggatccttcagctcatgcacagttgcaaagagggctacgtgaaagatctgaaaggtaacccaggcctgcacagtcccatgttggatcttgataatgatacacgtccctcagtgttgggccatctcagtcagacagcgtccctgaagaggggcagcagctttcagtctggtcgagacgacacgtggagatacaaaactccccacagggtggcctttgttgaaaaattgacaaaactcgtcttgagccagctgcctaacttctggaaactctggatctcctacgttaatggaagcctcttcagtgagactgctgagaagtcaggccagattgaaagatcaaagaatgtaaggcaaagacaaaatgattttaagaaaatgattcaggaagtaatgcactccctggtgaagcttacccgcggagccctgcttcccctcagcatccgggatggggaagccaagcagtacggaggctgggaggtgaagtgcgagctctccggacagtggctcgctcacgccatccagactgtaagacttactcatgaatcgttgactgcccttgaaattcctaatgacctgttacagactatccaggatctcatcttggatctccgagtacgttgcgtaatggccacgttgcagcacacggcggaagaaataaagagattagctgaaaaagaagactggattgttgacaatgaaggactgacttctctaccatgtcagtttgaacagtgcatcgtgtgttctctgcagtcactgaagggggttctggagtgcaagccgggagaggccagtgtcttccaacaacctaaaacacaggaggaggtttgccagctaagcatcaatataatgcaggtttttatatactgtctggaacagttgagcaccaagcctgatgcagatatagatactacacatctctctgttgatgtttcttcccctgacttgtttggaagtatccatgaagacttcagcttgacctcagaacagcgccttttgatagtcctaagtaattgctgctatctagaacgtcacaccttcctaaatatcgcagaacattttgaaaagcacaacttccagggaatagaaaaaatcacacaggttagcatggcctcattgaaagaactagatcaaagactctttgaaaattacatcgagttgaaagcagatcccatcgttggctccttagaacctggaatttatgcaggatattttgattggaaggactgcctgcctccaacaggtgtcagaaactatttaaaagaagcactggtgaatataattgccgtgcatgcagaggtgttcaccatttccaaagaactggtccctcgggtactatccaaggtgatagaagcagtttctgaagagctcagtcgactgatgcagtgtgtttcatccttcagcaaaaatggagctttacaggcgagacttgaaatctgtgctttgagggacactgtggctgtttacctgacacccgaaagcaagtcaagttttaagcaggctttggaagccctgccccagctttccagtggagcagataaaaagttactggaagagctcctgaacaagttcaagagtagcatgcacttgcagctcacctgtttccaagcagcttcttcaaccatgatgaaaacataaatatctgccacataaaagaagtccaggaaaataacacaaggttgagtgctgcaggaagagctgcttctgcagggagttttctggaatggcgtggcacatattgaagcatttctcagtgtcccgttcacggaagcgcaggcagctcccacgacacacggagagactgactgatacgagatttggaaagctatgtagacatctttggagctcttactgtcctaaactgtacagctgtgcttaaaaccctcatttcatataaatggccttaagttttctaattcaagcgggtttttggaaaaatttatggtctccattaaaatacatattacaactggggtagattatttgtggtccaggtgtctgtgatttaactttgcgttttgctatctgatttttatttttcacagggctaagcatgagctttcattctcactcactcttaatttgtcgtgcgtcactacacatgcacgtgttgcagtccctgaggccctgtgtgttatctgtgatggagtgtgaatgtgtaacgggcactgtgttacactctcaggtgttggcggggcggtcgcagacttcagggtcccctaacggaaaggccaggctccgcgtggacggccaactccctgcccgctccttcagcaggtgactgtctctgccacttcttacctgctgaaggatcttgctcagtagctggaacaatgctgctgtcacacagtctcttctctgaaacttcaggatgctccttggtcaccaggcaatgggagctgtagaccagccgcatgcacttgccccacattcactgctgactggcttcactggaataggttcaggtcaccgggacttctctcagagtcagcagcccacccaactccctcataccgtcgcatctgaaaattttcagagaggaattctctttgtagtcggcttgtcagggttttcaagtttttctatggttatttttaaatctctttttttaaatgctaaaattaatgtcctcattaatgcaagtaattttagagcacagtgtagccatgtacagtttccattatttaaaataaataaatgtgttggttcatttggtgtatggggggacatcatggtaactggaaatgaaagtttaatctttcacaaatgtgcttgataaagctgttaagaattgtctttcctaagtatgttaactgttgtatctaactcaactgtgagctaagtttaaaaactgcaatcatgaatgtttgtgatattttaaatatctactacagcacattcagccaataaagaatctgcctttaatgtaagttgtaatttaannnnnnnnnnnnnnnnnnnnnnnnnnnnn

SEQ ID NO: 13451 - DNA, 413 bp, Homo sapiens
  misc_feature 408, 409, 410, 411, 412, 413: n = A,T,C or G
agagatgcatgagaaaacaaaaagccattttacaagacaatttgaaggatcacattttgttcatgaatattcaagaagacatcctcagcttgctgtctcagtaattctaagagttgctaaaggataccaggagttattggagaagtgtttccagactgaaaacccttttgaatgccaagataaaggagaagaagaattacagaaatacatccaggagagccaagcattggcaaagcgaagctgcggccttcttccagaaactaggagaatatttacttacaaaatgcgtttttcgttgcttacacaaagaaagccccccagctgacctcgtcggagctgatggccatcaccagaaaaatggcagccacagcagccacttggtgccaactcagtgaggggacaaactannnnnn

SEQ ID NO: 13452 - DNA, 892 bp, Homo sapiens
gtccgcggacgcgtgggcgcgggtccacgcgtgtgatcgtccgtgcgtctagcctttgcccacgcagctttcagtcatggcctccggtaacgcgcgcatcggaaagccagcccctgacttcaaggccacagcggtggttgatggcgccttcaaagaggtgaagctgtcggactacaaagggaagtacgtggtcctctttttctaccctctggacttcacttttgtgtgccccaccgagatcatcgcgttcagcaaccgtgcagaggacttccgcaagctgggctgtgaagtgctgggcgtctcggtggactctcagttcacccacctggcttggatcaacaccccccggaaagagggaggcttgggccccctgaacatccccctgcttgctgacgtgaccagacgcttgtctgaggattacggcgtgctgaaaacagatgagggcattgcctacaggggcctctttatcatcgatggcaagggtgtccttcgccagatcactgttaatgatttgcctgtgggacgctccgtggatgaggctctgcggctggtcccaggcttccagtacacagacgagcatggggaaagtttgtgccgctggctggaagcctggcagtgacaggattgaagcccaccgtggatgaccagcaggaatatttctccaaaaacaatcaggctggctaacggataaggagctgtgcgcctgcctaggtgctgtgctgggtgcctgtggcccctggtgtcttgtggaccagaaggggagtggcccaaccagatggccggggaggcaggcgccggccccaagaaaagggccccccccgaggggcaatattgggggcgaaaaaaagggcgcggataaagggggagaatggtgacgcgacagtggaatcag

SEQ ID NO: 13453 - DNA, 1635 bp, Homo sapiens
  misc_feature 1635: n = A,T,C or G
ctatagggagtcacccacgcgtccgggcggagctccttgttaacgacatccccaacctctgctaacgcgcaggcgcacttcctgaagctgaaggtcagcatagacaaagggcctcagaatcgcgcaggcgcaattgtgccctggttcgccaagatgtcgttcccaaagtataagccgtcgagcctgcgcactctgcctgagaccctcgacccagccgaatacaacatatctccggaaacccggcgggcgcaagccgagcggttggccataagagcccagctgaaacgagagtacctgcttcagtacaacgatcccaaccgccgagggctcatcgaaaatcctgccttgcttcgttgggcctatgcaagaacaataaatgtctatcctaatttcagacccactcctaaaaactcactcatgggagctctgtgtggatttgggcccctcatcttcatttattatattatcaaaactgagagggataggaaagaaaaacttatccaggaaggaaaattggatcgaacatttcacctctcatattaagtctggcaatgatgactatatgtattcctgcctaaataaatcatctattaatcattgtcctctgccttcccttcctctcttcttttatctttattcctttccagcaggagttaaaacagaaagttttcagtcacctttgtctatttttgttagttcatttgttttttaaaaagatgatgtttattgggttaagtattagcagaatacataaatcatttagtacgtttcctgtttgcgtgaattctatttatgttggtcacattttgcaaattaatgttaaaacctattaatactctacggacagagaagcacaagctgcctgtgtggggaatagctgccgtcagcagcctgggtatatgattggagagaaagtcaagctgatctttggcaccaaaccattccacatctggtactaaaccctgagctgcagcccccaggcttgtgttgccactggagcccactcgtctagctttgtctttaactggcccatctgcattcccattagagttcgtgtattttgattatctggtgaatgatctacttaacagaaaggtagtccacattttcccagaaagtgtttgcattttgctttcaatgtatggttttatgggataatatatttctaatgactaaaatgtgagtaagatgtttttgaataggagcattttcttactgtgtctttagttcctcggattactgtttcttcgcacactccctgcggcttagacagtgggattgcattaggtttggagtgttcattcctgttgcagttgtacggtgggttgtgcgaaatgcagttttcgtacgtgtgtatttattattttatctatatagcagctgcagattagatgcttaatgacatgttccgccttacaggtggaagaaacttccggagggaatggcgacaatcctcaatagttggaagggcgaagtctcccaaaaaccgtgtgtttggataagagaagagatgggggccctctggttttgcgcgttacaggtgcaagccatgtggaccctcggtaagagggcccaacgggagcgcactggtggcggatccggcttcttcctagcggcccaaacggcggttctaan

SEQ ID NO: 13454 - DNA, 1785 bp, Homo sapiens
  misc_feature 1, 2, 3, 1783, 1784, 1785: n = A,T,C or G
nnnccgcggacgcgtgggcggacgcgtgggcgcggcgcatgcatcgggggtccggtcggcttgtcaggtggtggaggaaaaggcgctccgtcatggggatccagacgagccccgtcctgctggcctccctgggggtggggctggtcactctgctcggcctggctgtgggctcctacttggttcggaggtcccgccggcctcaggtcactctcctggaccccaatgaaaagtacctgctacgactgctagacaagacgactgtgagccacaacaccaagaggttccgctttgccctgcccaccgcccaccacactctggggctgcctgtgggcaaacatatctacctctccacccgaattgatggcagcctggtcatcaggccatacactcctgtcaccagtgatgaggatcaaggctatgtggatcttgtcatcaaggtctacctgaagggtgtgcaccccaaatttcctgagggagggaagatgtctcagtacctggatagcctgaaggttggggatgtggtggagtttcgggggccaagcgggttgctcacttacactggaaaagggcattttaacattcagcccaacaagaaatctccaccagaaccccgagtggcgaagaaactgggaatgattgccggcgggacaggaatcaccccaatgctacagctgatccgggccatcctgaaagtccctgaagatccaacccagtgctttctgctttttgccaaccagacagaaaaggatatcatcttgcgggaggacttagaggaactgcaggcccgctatcccaatcgctttaagctctggttcactctggatcatcccccaaaagattgggcctacagcaagggctttgtgactgccgacatgatccgggaacacctgcccgctccaggggatgatgtgctggtactgctttgtgggccacccccaatggtgcagctggcctgccatcccaacttggacaaactgggctactcacaaaagatgcgattcacctactgagcatcctccagcttccctggtgctgttcgctgcagttgttccccatcagtactcaagcactataagccttagattcctttcctcagagtttcaggttttttcagttacatctagagctgaaatctggatagtacctgcaggaacaatattcctgtagccatggaagagggccaaggctcagtcactccttggatggcctcctaaatctccccgtggcaacaggtccaggagaggcccatggagcagtctcttccatggagtaagaaggaagggagcatgtacgcttggtccaagattggctagttccttgatagcatcttactctcaccttctttgtgtctgtgatgaaaggaacagtctgtgcaatgggttttacttaaacttcactgttcaacctatgagcaaatctgtatgtgtgagtataagttgagcatagcatacttccagaggtggtcttatggagatggcaagaaaggaggaaatgatttcttcagatctcaaaggagtctgaaatatcatatttctgtgtgtgtctctctcagcccctgcccaggctagagggaaacagctactgataatcgaaaactgctgtttgtggcaggaacccctggctgtgcaaataaatggggctgaggcccctgtgtgatattgaacaacaaaaaaaaagggggggcaaagccccgaggggccagtacggcccggttggacaggcccaaggggcaaaacagagcgcgcgaaagcggggaaagaggaggggacaccgggaagcccannn

SEQ ID NO: 13455 - DNA, 3930 bp, Homo sapiens
  misc_feature 1, 2, 3903, 3904, 3905, 3906, 3907, 3908, 3909, 3910, 3911,3912, 3913, 3914, 3915, 3916, 3917, 3918, 3919, 3920, 3921,3922, 3923, 3924, 3925, 3926, 3927, 3928, 3929, 3930: n = A,T,C or G
nnacggacgacaccagttcggtgacctcctctgccagctccaccacttcctcccagagcggcagcggcacgagtcgcaaaaagagcatccccttgtccatcaagaacttaaagcgcaaacacaagaggaagaagaataaaatcactcgagacttcaagccaggggacagggtggcagtggaggtggtgaccacgatgacctcagccgacgtgatgtggcaggatggctccgtggaatgcaacatccgctccaacgacctcttccctgtgcaccacctggacaacaacgagttctgccctggagacttcgtggtagataagcgagtccagagctgtccagaccctgctgtctacggtgtggtacagtctggggaccacatcggccgtacctgcatggtgaagtggttcaagctgaggccgagtggggacgacgtggagctgattggagaagaggaagatgtgagtgtttacgacattgctgaccaccctgactttaggttccgtacaactgacatcgtcatccgcatcggcaatactgaggatggggctcctcacaaggaggatgagccatcggtgggccaggtggcccgtgtggacgtcagcagcaaggtggaggtggtgtgggctgacaactcaaagaccatcatcctgccccagcacttgtacaacatagagtctgagattgaggagtcagactacgattcggtagaaggcagcaccagcggggcatcctcggatgaatgggaagatgatagtgacagctgggagacggacaatgggctggtggaggacgagcaccccaagatagaggagccccccatcccacccctggagcagccggtggcccctgaggacaagggagtggtgatcagtgaagaggcagccacagctgccgtccagggggctgtggccatggctgcccccatggccgggctgatggagaaggctggcaaggacgggccacccaagagcttccgggagttgaaagaggccatcaagatcctggagagcctcaagaacatgactgtggagcagctgctgacgggctcgcccacctctccgactgtggagcctgagaagccaactcgggagaagaagtttctggatgacatcaagaagctacaggaaaacctcaagaagaccctggacaatgtggccattgtagaggaggagaagatggaagcagtgcccgacgtagagcgcaaggaggacaagcccgaggggcagtcacctgtgaaggctgagtggcccagcgaaaccccggtgctgtgccagcagtgtggcggcaagcctggcgtcaccttcaccagcgccaagggcgaggtcttctccgtactggagtttgcaccctcaaatcattcttttaagaaaattgagttccagcctccagaagccaagaagttcttcagcacagtgcggaaggagatggcgctgctggctacctcactgcctgagggcatcatggtcaagacttttgaagatagaatggacctcttctcagctctcatcaagggccccactcgaaccccctacgaggatggcctctacttgtttgacatccagctccccaacatctacccagccgtgcccccccacttctgctacctctcccaatgcagtggccgcctgaaccccaacctgtatgacaatgggaaggtgtgtgtcagcctcctgggcacctggattggaaaggggacagagaggtggacaagcaagtccagccttctccaggtgctcatctccatccaaggtctgatcctggtaaatgaaccatactacaacgaagccggcttcgacagtgaccgaggcctgcaggaaggctatgaaaacagtcgctgttacaatgagatggcgctgatccgcgtggtgcagtccatgacccagctggtgcggcggccccccgaggtctttgagcaggagatcaggcaacactttagcactggtggctggcggctggtgaaccgtatcgagtcctggctggaaacccatgccctgctggagaaggcccaggcactgcccaacggggtgcccaaggccagcagctcgccagagcccccagctgtagccgagctgtcagactccggccaacaagaacctgaggatggagggccagccccaggagaggcctcccagggctcagactcagagggcggtgcccagagcctggcctcagctagcagggaccacacagaccagacttcggagaccgcaccagacgcatcggtgccacccagtgtgaaaccaaagaagcggagaaagagctaccggagcttcttacctgagaagagtggctaccctgacatcggcttccccctcttcccactttccaagggtttcatcaagagcatccggggtgtcctgacgcagttccgggctgccctgctagaggcaggcatgccggagtgcacagaggacaagtagctgccaggcacagaggaaagagcatcaccgtgggagaggccagccgccgcctgctcactcccccccggaatcacccctcttcccatgcccctctgtccccactgcaaacccactgccctcttctccccaaggtgagtttgatgctgaagtgcaagaagtgtgttgagatgctgccgtttctattttgaagcgagctttcaacaggcgggtcccctgtggcaaagaaaatcggaaccctgttgccgattttccatttgtcaccccagcagaatgtccggcacttgctcccttgctgccccttctcaggtcagaggcgggtgttccagggcctgccgcggggctctctgggccggttccctgcagacccgcaggagagcacatgtgccttgcatgaagtgtgggttgcgccaacaattcccctggtccctttcaacctgtttagttcaactcaagcctccctgtgtcccagaccctcctgctgccaccaccacccaggtcctccctagtcctccagcgtcaacactatcccttgggagttgtagctgctgtcactgactcccggctatacatggcctgtcgaccacgttatagccctcaggcctgttgaacttgctctctaagagaggttgggaccaggctaggttccgggtgacgcccaggagaggtggtggccttcacacatgcacatggagttgaggaccagggagctgcagggaaagcaacagctataggtgccttgctcttctgtcggaggctgctgggggcaagagcagctgcacaaggccagggcaagtgctagggcccctcccccatcacatggtcacactgggacaggcgtgcagctcactgaactccaagcgagccagccctctcttggactagaaggcctactgtcagcccttcgcttacaaactgcaggctcaatccgaaggggacggccggcgggggctctcctagtgcccagagacaggcccagaggtttacaagttttctaagcttttgataatgtgaagctccaggccgagaggatgctgttgagcacattgcagctatgtaatttttggtgtatgtatgtaatatttaaggttggaaaaaaaactcaaaagcaaagatattaactcttattagaaaaaaagacaaaaaaaaagccaaagcatgatgcgtcttgtcagccttaagtgggctccacacctgtgctgtgctgtgaccgcccagccagcagagctgcgggaggatggagccggaccacacaccgtggcatttggaaccgagtcggtatcttgtttgagaaacacccggagtgactggtggggctgtgcttcccagtgcattgtacatgtggagatgtgaatgcctactgcttacgatatctgtataaagtgctgtgtgattaaacttttttttacttgcattttttttttttttttttttttgttggctcattagcaagacaaggtgacaccattaaacctccctctgccannnnnnnnnnnnnnnnnnnnnnnnnnnn

SEQ ID NO: 13456 - DNA, 2539 bp, Homo sapiens
  misc_feature 1, 2, 3, 4, 5, 6, 7, 8, 9, 10, 11, 12, 13, 14, 2538, 2539: n = A,T,C or G
nnnnnnnnnnnnnnagtacgtggtgatggtgcgcgttgtgtcttgcgtccttctgacctagtcgagtcctgcgggcaatcgatctagcgcgtgcatcttggagtcccttcggcaagcatttctcaatactgggaatacccacccgtcaaatgtcgcccgaccttgcttggacagtcaggagaacggccggagcgtccctggctggccgctaggcagacccggggttggaatccacttccaaattctaagtcgagagactgcagtgggatctgtctcaactcccattccgtctccagagccaaagtttggagggaacgtgagctcgggtcaggacacaccaggacagcctcatccaccacaccacaggctccagacaggtgctgcagccacggagttgaaaccctaacctgctgaacaatctctccatcttccacattaaacttgacaatgttcacatggctgaagggaacaactccgagggcccacaccaccccagagccgtaagaatacaccatctggtagtggatgctgtcactttctgggagatgttccacccacttgaggtgcccactggagaggtgatggagggcaagtgtagtcttcttcaggactgcgatgtaccttacagactcctgcaggccaaccagcccaagtgcctggaaactgccactgtccagggttatctcccagttcaggcccccgatgttagtctcccaggaacgcatgattcggcctccattggacacagtgatcacatcctgtccgtgcagcagcatggcatccacagccccttctgccgtgcccttgtcaacatggcgccacaagatctccccagttcgggaatttaatgctgcaatcacattcttctctgtggctacaaccaacttcttggatccaggggaaaattccaaggaggcaaacttgaccttcccaacatattgctgtctccaatcaaacttgcccacttggtcttcgtagaccgcggccgccggaatcagcagcgtagcccaaagccagaaacgagaagcccactcagccgccatgatgcgagcgcatgcaccacccaccgccgtcccggcatgcaccgcgccgcgggctccgcctccgcgggaccacagagctgggatagcgcgcgaggccctcggtcggacgggacgctcgggattcagggactgcctcggcacacgggaagttgccctacaggcgcgggagaaagcgcaggcggcggcttagcagggagaggcaggctgcagtgcacattgggtcaggcacacgcgaggggcagcccccgagggccgtcccagagtcccccgcgccgccggggtcctaacggggtgcaccgtcttccgccgcacgtggattcagcgcgatgcccaaatccaagcgcgacaagaaagtctccttaaccaaaactgccaagaaaggcttggaattgaaacaaaacctgatagaagagcttcggaaatgtgtggacacctacaagtaccttttcatcttctctgtggccaacatgaggaacagcaagctgaaggacatccggaacgcctggaagcacagccggatgttctttggcaaaaacaaggtgatgatggtggccttgggtcggagcccatctgatgaatacaaagacaacctgcatcaggtcagcaaaaggttgaggggtgaggtgggtctcctgttcaccaaccgcacaaaggaggaggtgaatgagtggttcacgaaatacacagaaatggactacgcccgagctggtaacaaagcagctttcactgtgagcctggatccagggcccctggagcagttcccccactccatggagccacagctcagggcagctgggcctgcccaccgccctcaagagaggtgtggtgactctgctgtctgactacgaggtgtgcaaggagggcgatgtgctgaccccagagcaggctcgcgtcctgaagctttttgggtatgagatggctgaattcaaggggaccatcaaatacatgtgggattcacagtcgggaaggttccaggcagatgggagacgattgccagagagcgcattctgagtccacaggaagagtccgactccagaagatgactgactcgacacggactcgggcactgcaggtctccggaagcttctgggctcacctgggaccccaccgaatgttggcagccctctgggaaagaggccggtattaatatgcgtcggcaaccgcggaacacgaagcggcaccggacccccctgtgatccaacacaaacacggcggcccgcgcaagcccgagactagaacaacccacgaaaaatactacacgacgcacagccaacatcaagacagcagcagagcgcatacaagacaacacgcaagcagtacaagaccaacctaccgatagtcacgaaaacaaaacaaaccaccgagctcaccatcaggcaacagataacgcaacatgcaccactcacaatccaacacaagcaaaacaggcacacactagaaactcacaactaacatcgatataccaaccagacacaacgctcgccacgcacactann

SEQ ID NO: 13457 - DNA, 1187 bp, Homo sapiens
  misc_feature 1173, 1174, 1175, 1176, 1177, 1178, 1179, 1180, 1181, 1182,1183, 1184, 1185, 1186, 1187: n = A,T,C or G
acgcgggggctgctgctgcttgtcccaagaccaagtcgtaatagcaacttcccttcctcagctgcctgaactttttttttcccttgtagctggagagaagtgtcacattttgctcactctcaaccttcctcgcccacccccttcccggagaacctgtgcggtgtgtagagggtgctgtgagccacctccagcctcgggtggctgcttaagtaactttcaactcctctcttcttaacactatgaagtgtctcgggaagcgcaggggccaggcagctgctttcctgcctctttgctggctctttttgaagattctgcaaccggggcacagccacctttataacaaccgctatgctggtgataaagtgataagatttattcccaaaacagaagaggaagcatatgcactgaagaaaatatcctatcaacttaaggtggacctgtggcagcccagcagtatctcctatgtatcagagggaacagttactgatgtccatatcccccaaaatggttcccgagccctgttagccttcttacaggaagccaacatccagtacaaggtcctcatagaagatcttcagaaaacactggagaagggaagcagcttgcacacccagagaaaccgaagatccctctctggatataattatgaagtttatcactccttagaagaaattcaaaattggatgcatcatctgaataaaactcactcaggcctcattcacatgttctctattggaagatcatatgagggaagatgtctttttattttaaagctgggcagacgatcacgactcaaaagagctgtttggatagactgtggtattcatgcaagagaatggattggtcctgccttttgtcagtggtttgtaaaagaagctcttctaacatataagagtgacccagccatgagaaaaatgctgaatcatctatatttctatatcatgcctgtgtttaacgtcgatggataccattttagttggaccaatgatcgattttggagaaaaacaaggtcaaggaactcaaggtttcgctgccgtggagtggatgccaatagaaactggaaagtgaagtggtgtggtaagtttgggaccaactgggatccagatccaaaggtttctgcaggttttactctgcaaaatatgagtccagaggactctcatgggagactcatgnnnnnnnnnnnnnnn

SEQ ID NO: 13458 - DNA, 1755 bp, Homo sapiens
  misc_feature 1, 2, 1754, 1755: n = A,T,C or G
nncgcgccgcaggcagcactggcgggggcctttcctgccgccgacgccggggtcctcccaggctaggtacgaggcctggggtggtatggcggcgcccgttgtcacggccccgggcagagctctgctgcgggcgggcgctggacggctgcttcggggaggcgtccaggagctactgcggccgcgacatgaagggaacgcccctgacctggcctgcaacttcagcctttctcaaaatcggggcacggtcatcgtggagcgctggtggaaggtaccgctggccggggagggccggaagccgcgcctgcaccggcgacatcgcgtctataagctggtggaggacacgaagcatcggcccaaagaaaacctggagctcatcctgacgcagtcggtggagaatgttggagtccggggtgacctggtctcagtgaagaaatctttaggccggaatcgactccttcctcagggactggctgtatatgcatcccctgaaaacaagaagctgtttgaagaggagaaattgctgagacaagaaggaaaattagagaagatccagaccaaggcaggtgaggcgacagtgaaatttctaaaaagctgtcgcctggaggtagggatgaagaacaatgtcaaatgggagctgaaccctgaaatagttgcccgccacttctttaagaatcttggtgttgtggttgccccacatacattaaagttaccagcagagcctatcacacggtggggcgagtattggtgtgaggtgacggtaaatgggcttgatactgtgagagtgcctatgtctgtcgtgaactttgagaagcccaagaccaaaagatataagtactggttagcccagcaagctgccaaggctatggcccccaccagcccccagatctaaatctactctccctccaaggcagcaaagcagaatcgggagcagtggagcagaaatgtgcaagcaccctgatctcactcccagctctgaccaaatacagaattttagagaacatctgaagacatcagactgcactgcgtatacatgttgaattcttcatttttgccatctttaactgtcatcactggggcagggaagtcctgttccagaagtaccaggctgtagatttgataagctagatgcagtagaccgaaaccatccaaaacctgtttagcttcttcctccattggagtttattgggacaaacaggagagccagccattgtctccagtacttgcctcattctcatcatccaaactgaacatttgtatcccaagcagaaataaagagaatatgttctttttaaaaaaaaaaaaaaaaaaaaaaaaaaaaaaaaaacaaaaaacacaaacacgaaaccaacaaacaacacaaacaacaccacagaacaacaaaaacaaagacaaaccaaaatcaacgcacccaacggaccccacatccaaccccccataaactacaaacagcatgccccgatccactgctgcctgtagaccacgcccataccaagagccaaaaaagcgtgaatatcgaacaccacaagccaaagggcccaccaccatactcgagcacgacccacaacccgacagcaactcacacgaacagacacaccaacgcccacagacgaataccaaccgccacagcccaacaacaagccataaaaaactacgagcgcccgacccgacagcaacgccacgtgccccacaaaacactagcactacgccgaaacgtacacggcgcaacccagaactccactacctaaaccagctcnn

SEQ ID NO: 13459 - DNA, 602 bp, Homo sapiens
ggcgaattggagctccacgcggtggcggccgaggtacgcggggaactgaaaatccacaagacagaatagccagatctcagaggagcctggctaagcaaaaccctgcagaacggctgcctaatttacagcaaccatgaggaaaggccacttaaggatgcagcaagaaggagccatctgcaatccaggaagaaattccttgccaggaaccaaattggttgtcaccttcatctaggacttctagcctcgagaacttacaaatggtgatgatcatcaggtcaaggatagtctggagcaattgagatgtcactttacatgggagttatccattgatgacgatgaaatgcctgatttagaaaacagagtcttggatcagattgaattcctagacaccaaatacagtgtgggaatacacaacctactagcctatgtgaaacacctgaaggccagaatgaggaagccctgaagagcttaaaagaagctgaaaacttaatgcaggaagaacatgacaaccaagcaaatgtgaggagtctggtgacctggggcaactttgcctggatgtattaccacatgggcagactggcagaagtccagacttacctgga

SEQ ID NO: 13460 - DNA, 1196 bp, Homo sapiens
  misc_feature 1, 1192, 1193, 1194, 1195, 1196: n = A,T,C or G
ngagctcggtccaactcagggcgagctgctactcagggcgagctgcagctcagtgggcgctgcacggctgcgccgagcacgcgggggagtccggcgcgcagaggaggaggagaaagctgaccgcttaggcccgggtagtggtcgtcgtggttttccttgtagttcgtggtctgagaccaggcctcaagtggaaacggcgtcaccatgatcgcacggcggaacccagaacccttacggtttctgccggatgaggcccggagcctgcccccgcccaagctgaccgacccgcggctcctctacatcggcttcttgggctactgctccggcctgattgataacctgatccggcggaggccgatcgcgacggctggtttgcatcgccagcttctatatattacggcctttttttttgctggatattatcttgtaaaacgtgaagactacctgtatgctgtgagggaccgtgaaatgtttggatatatgaaattacatccagaggattttcctgaagaagataagaaaacatatggtgaaatttttgaaaaattccatccaatacgttgaagtcttcaaaatgcttgctccagtttcactgatacctgctgtttctgaatttgatggaacatgtttcttatgacagttgaagcttatgctaatctgtatgttgacaccttgtaattaaaatacgtaccatgaaaaaaaaaaaaaaaaaaataatcaaaaagcccataaaaattaccaaaacaaaacacaaacccacacacagccccaacacaaaacccacgacacacaatcacttccaccgccgccgaccaccaccggtccacacaactgcggccctgcccacaccgccgcctcctccaccaccatcccctgcgccccaacagcgcgcgacaaatcgcaccgcacccccccacatggcggcgcccctgtccatcacacctccatgtatctcggatactatacttaaccgaattccactaatgcgccagtcaccagtcgatttccatccgtcatcgtcgacactaatcataccacccactcactccacacaacacccatatctactccatctctcatttctactgatctcactcaatctcatatctcaactcgttctcctagctattgcttgtctcaaatccaccccaccccccatccacctcctccacaactaactcagccagactannnnn

SEQ ID NO: 13461 - DNA, 925 bp, Homo sapiens
  misc_feature 923, 924, 925: n = A,T,C or G
acgcgggggctttgtttgtttgggcttttacaggttggtttttgctctcggcagtctccagctatagaggtcctgaaaagagggagaaggcattggaaactaactgtagctctggatttcagtttcagcggatgttctctccagctttcaacagaccttgcactcaactttgctgaatcccattccaaaatgtcggccagcgctctgcaccttactatctcatggcttcttcagaaatgattttctggaagttgtgaatttcttgaaaagtttaacattgaagagtgaagaggagaaaacggaattctttaaatcatgcgcagggagaaactccttgcttgctctcaccagccctgttccagtcacgggtgatccccgtgcttctccagttgtttgaagttcatgaagagcatgtgcggatggtgctgctgtctcacatcgaggcctacgtggagcacttcactcaggagcagctgaagaaagtcatcttgccacaagttttgctgggcctgcgtgatactagcgattccattgtggcaattactctgcatagcctagcagtgctggtctctctgcttggaccagaggtggttgtgggaggagaacgaaccaagatcttcaaacgcactgccccaagttttactaaaaatactgacctttctctagaagattctcctatgtgtgtcgtctgcagccatcacagtcagatctcgccaatcttggagaaccccttctctagcatattccctaaatgtttcttttctggcagcacgcccatcaacagcaagaagcacatacagcgagattactacaatactcttttacagacaggcgatccattttctcagcctattaaatttcccataaatggactctcagatgtaaaaaatacttcggaggacagtgaaaacttcccatcaagnnn

SEQ ID NO: 13462 - DNA, 264 bp, Homo sapiens
acgctgtgaacctgacgagtcacatggggttttctggcaaaatccctcttgttttagtgggttctatgtttatactgattcctgggatagataagtctgtcttctccacataatgaaaataaaaaacttttaatttttatacaagtggcagttactttagccactttaaaagttaagaagtgtcaagtacctcggccgcccgggcaggttcgaccaagccagggaggagaggcaccacgagaagtgacttcagactcaggaagc

SEQ ID NO: 13463 - DNA, 1103 bp, Homo sapiens
  misc_feature 1, 2, 1099, 1100, 1101, 1102, 1103: n = A,T,C or G
nncgcccgccgggcgtggcgggggaggggacgctgagggcccatgtgctgaaaatccgaagtgccgcggaaagtggagagctgacaaggaaggtttcgagcgttttgctggcaaagggatttcttacaacctccaggcatgcgtctttctgccctgctggccttggcatccaaggtcactctgcccccccattaccgctatgggatgagccccccaggctctgttgcagacaagaggaagaaccccccatggatcaggcggcgcccagtggttgtggaacccatctctgatgaagactggtatctgttctgtggggacacggtggagatcctagaaggcaaggatgccgggaagcagggcaaagtggttcaagttatccggcagcgaaactgggtggtcgtgggagggctgaacacacattaccgctacattggcaagaccatggattaccggggaaccatgatccctagtgaagcccccttgctccaccgccaggtcaaacttgtggatcctatggacaggaaacccactgagatcgagtggagatttactgaagcaggagagcgggtacgagtctccacacgatcagggagaattatccctaaacccgaatttcccagagctgatggcatcgtccctgaaacgtggattgatggccccaaagacacatcagtggaagatgctttagaaagaacctatgtgccctgtctaaagacactgcaggaggaggtgatggaggccatggggatcaaggagacccggaaatacaagaaggtctattggtattgagcctggggcagagcagctcctccccaacttctgtcccagccttgaaggctgaggcacttctttttcagatgccaataaagagcactttatgagtccaaacaaacaccaaaacccgcgccccagcccaccagacggacacacaaggggggggcgaaaatatcgcgaggggagatgcagccacccttttcagagcgccaggggataaaaacaggcgcggacaccgtcgagcacactgctgtcggaacccgcgcggtgtacccccacgcagaaatagtaacgcgggactcaatcgagactaacacggagagannnnn

SEQ ID NO: 13464 - DNA, 1612 bp, Homo sapiens
  misc_feature 1602, 1603, 1604, 1605, 1606, 1607, 1608, 1609, 1610, 1611,1612: n = A,T,C or G
ccgcccacgcgtccgtcgggagttcgagatcagtctggtcaacatggtgaaacgccatctctactaaaaatataaaaattagcctggcgtggtggcgtgtgcctctagtcccagctacccgggaggctgaggcaggagaatttctggaacccaggaggcggaggttgcagtgagccgagatggcaccactgcaatccagcctaggcaacagaatgagactctgtctcagaaaaaaaaaaaaataaaaaaggagaaatagatgtttcaaatatgaacattcttttggcaccaattttcttttttaatttggttgtttctgagatgtatgatcaactgaagatggagctgaaatgggagacgggtggccccaccgtgcccttgaaacagcagagcactcctcagtagagagggagggagccaagagcctgaacatgtggtcgccagcttggaatgttactgacatatgtggcgagggcttagccagaaatatttaaagatgtagtattccggcctgtgagttgtctgggcagggagggggagtcagaaagggtagagagctctcaaataactcatgactctagtgttcctttcacatgtgaacagtgtcactgatgacacattttctaggaccttcgtttgttttgtggacctgcctcagtctcctcagtatcaggcgatcttaagggaagatggagtgtttcaaattggagagaagttcatgggtaggtatcgtcctgtggaattctgaatgcaaggaagtcaaccccagaggccttggtacccccagctttctaaaactactttattacaatttatatgtatatacacatgcacatataaacgtgtgcatttatgtatgtgtgtatagtaccttttttaaaaaaacatttcctccaagctgctaagcaaagggtctcacaggtcgagcacagtgctgagaggatggtgtctgcataatgaagacttggatgaagctgagaccgtgttcaaactcactgaaaacaatgaagttctattccttttttcttcctctccaatgatcttgcagttgatttgtttgttttttaattttttaacatttttttaacgttgaaaaaatgctgcgtctttctttaagccttcccagtaacttcctgccttttttttccccgtgggcttttaagtgaagctgcaggattttatctttcaatctgccctttctacccttgtcctattgaaaggatgccctcttcccttgcttttttggtctagggcctgtttggagctaactaggcttggctgagtccgggcaagaccttcttccgaggcatggacaagccccagagaacatgcagaacattgacctttccattgactgtctttcaagcagccagtgaaatcactaagtggggttcttccatgacatattttgttaatatgggtttcactttttccaagaatagtcccttgttgccacaatgttgatttactttacacaatgacagtatgtattaatttgtaattaaacccatccagattgttttagccttttcccaatggggtgggggagggaagaaggatattaaaataagttttaagaaaaaaaaaaaaaaaaaaaaagtnnnnnnnnnnn

SEQ ID NO: 13465 - DNA, 432 bp, Homo sapiens
  misc_feature 430, 431, 432: n = A,T,C or G
actttttttttttttttttttttttttggggggggtgttttttttttttttaagccttcggtgctttaatccagaggaaaattacttattttaaaaagcagtgaaaaacaccgcattcctttggcacaggatgaagaccagctcagctcttcagttgttgatcattggctattggtctccaaacagtaaaccagtatttcacactgagattgtcggctgcgggtatattccaattccccgtctcctcatgaatatgaagtgaagggctctgaccctggaagtggtaggtaattgcttggcgataggtgattgtctcgccgctcagctataggcgatggtctcaccactcggggataggcgattgtcccatctaggtcgccaaaatgtgtctggaattggggggttcttcgtctcacctgacttcaagaannn

SEQ ID NO: 13466 - DNA, 1368 bp, Homo sapiens
  misc_feature 1, 2, 3, 1367, 1368: n = A,T,C or G
nnncgcgcggcctcgaggccttccggtgcgggagaaactactactcccatcaggccccgcggtcccgcagcctgccagtctcgtcgcgagaagcagcggcccggggcgactgagcggacaaacggaagtgtaggttacggtctgagacatcaccgccaagctgggcatcggggagatggccgagactgaccccaagaccgtgcaggacctcacctcggtggtgcagacactcctgcagcagatgcaagataaatttcagaccatgtctgaccagatcattgggagaattgatgatatgagtagtcgcattgatgatctggaaaagaatatcgcggacctcatgacacaggctggggtggaagaactggaaagtgaaaacaagatacctgccacgcaaaagagttgaaggttgctaataatttatactggaatctggcatttttccaagccaagagaagatcgaatggctttttgcagctaactactatgtgtagacaggttttatattataaagtatgcattcttatcacctagtatatagttagtttgtagagtgatttccccccagtttcttgaacatggtatcttcacatcttggaccttggtcagttgtgctattcattattaaacactaaaactttggcggttcttgcataacattgtcagattttttagtgtatttctgtgaagtcattttttttcttgtcattccttttgtagtagttgctgtttggatagtcggttgctgaggcatacacaggtgactgtgctgcacacacctcattacaacacacttaggtacagacacgcatacaaccacagtaagcaacagcacataggctgacagtaacgaatgtaacaggacgaacatgcacgacggtaccgagaccaatacgctaggggcacaaacagaggacagtgcgacgcagccataaccccacaaacagggcggtgcacggaccaaacacaacacaacagtggccggcccacgcacgcatcacgcacatggccccacccccccacacaccacaccggtgacaccccgggcctcggcgcgcccaccaacagccaaggcaagacgcacccagaccggcgacggcactgaagcaccgaggcaaccaacggcgagcacgatcgcagcaacgagaccacccggaacaggaccagagggcgacacactaacacgcaccgacaaccaggcagcccacatactagaggcgacagcacacaactccgaggagacgacacaaacagagaggaccgaaacaaggacaacagaggacccgaaacgctggacgacacagccaagacgcagacgaagcagaagaagagacaaacgaacgaggacagagagacgaaacaaagcnn

SEQ ID NO: 13467 - DNA, 1392 bp, Homo sapiens
  misc_feature 1, 2: n = A,T,C or G
nnatgttgtgctcggatttcttggttcaagctccagccctttgatttgcttatttatggattcaagcaagatattttccctcagccttaagtattaggcgtacaattcaaacatattgatcaatcatgtttatttaaggttttcttaacattagagatttttaatgggagtataaaattagtaaacaaccatttcattttttctctcttcctattctagccacataagccagtttaatccatgacacagatttcagctgtaatttgcaaaacaatccaagagctaccacagtccccaaaactacagaaaactgccatccacaaataaactaccaaggtaaatgtaaatacagcgtggttctaattttctttcacacaatcccagacaaccccaaataactttataaataccttatgaaaaaaagcaatttaaaaacctatcaaatctatttaaaatatataaatgcagacctctcaaatttccttcaatcaggccagaaattatcacaaaaattataatcacagttacaaacagaatgagtggaatgtttgtaagtttaggacaaccaaaaaagccccatgtaactttttaaaaatataatcattcactcaaatatactgtaaataggaatggcagtaacacaggaagcaaaaataaacttgcaagtgaaatttctagaagctcatgaaaacaataccatcccatattgcagatacaaaaggaaaaacagttctaatggggttaagagtactctggtcatcttcgttcgtttggtcgtgcaaggtgttaactattttcacttcccatatcacaaagttagtccacaggaggagctggtggatcttgtccattatgaggactggttggctttccaggtaggctggatcctcttagattaggaggtctcagtaagaacaagatcaatgcaataaccatccaggctaccaagatcattgtaacactgatgccattatcaccagagggtcccggtaattcctgaagacactctgtgtctgtgcagtaggactgggactgccgtaacagattgatcagtcttctcattgcatgttcatgagagcaaacacattcacagggatcaaatccaccttctgccatgattacccagcttgattttacttgactgtttaaatccgcccagacaacaaccgatggggcggggaggatgggggccgggaccgaggctcggcagaaagaccgcctggagcttccagaaggctgcggctgctccggacgctgctgccactgccgtttctggccgccggcttcctccccctcctctgttttgattcgagtgaccacgtcactcttagccacaagacccggatctgccggctcccgcgggcggcggcgcaacagcggacgcgtgggtcg

SEQ ID NO: 13468 - DNA, 1441 bp, Homo sapiens
  misc_feature 1, 2, 3, 4, 1441: n = A,T,C or G
nnnnaggcaaagtataacattttgtatcgttgtttgaaaacagcctatcaattgttattacatatctttggaaacatcattataaatctagactagtctcccactttgaactacattcatgccacataaatagcactccaaagagaattgtttcgagttttattttttaaaaaattacacttgaggtaaggaaaaaaatacagtaaaattagattttagagattaaccaaaatccaaactatacaacttaattcatgactaattcaatcacagtttgtaacaaaaggaacagaacatttttaccttcaaattcagtgtaaacaataatttatcacatttaaaagaaggctgccaataagtagaactcagcaatttcttgacttaattgacaagcctaggaattctaaaaagtcattaaaaattttaaaacctgtaaaaattattttatctatttcaatccatattcatttcattcagaatattctttttgacaatcagtggaattcattacatactaaaaataacaccatatttatgcacaaataaattaatttttccagtaagagctaatcttcctttaagaagacttcccacatattcacaatacataatatcacagaacacccatatttggcctaaatgcctctgaattgtagcattacaagatggaagttcattgtgcctaataatttgattgagttttgtccaaatgtcttccagagtttggctgttacaaatagtgtgttctattgtccatcttgctctataaagtgagtgtaaatttagtgcctttaaactatcttgcaattttttagacaaaggagaaacgtttttagtacaattattgctgggaagggaaatactccaagatctcctcttgtgctgttttcccttttctgattgtttacccagatttccagaattagtctgttccttcagtgtgtgtgaccaggttaaatgctgctttttcaagctaggttgaaactccaatagatctactgtgcaatcataactgtgtgacttagcatcatgttctgaaatggttaagtactgtttcacatcttcagctgcctcttcagaaatcacaggtggtgatcttttaggtctgagtggaagcttggacccatcatatgccacccaaggtataaatcttgatagcggacgagtaggaacgtcttgaattgctttctctgcaatttttggcagtagtgtgggatcactctcaaatggtctaaatgcaatcagattgcatctcgacgaagaatagagtaccaatgtcattcatcgcttattctatgttaatcagaatacctattctgtacctttcctctaacttctcagattagtaattcttcttaagggagctgagctattgcttaaaggagaacagataattgttgtctcagccagccctagagactgcttcatgtgtttgtgtcan

SEQ ID NO: 13469 - DNA, 2035 bp, Homo sapiens
  misc_feature 2032, 2033, 2034, 2035: n = A,T,C or G
cgtccgctttttattaagctgttttgttaaaagcttttggttataggcatgaatattgttttgatggttaacttcactgacttatctgtaagtgtcattttatagtactttacagttgtcaaaaaaaatcttacatatattgatctagttgatcggtagaggaagcttgtgaagtaggtaggacaggttatgatgtcttcactgtatggacgtgaacccagggttctaataggtaggaatagggctcaaagtaaaacttttggttcagaagcttgactcataactatactatatattcccaaaaatgtcagtattgacaacacagtctaactcttaaataaaattatgctaattagttacattcaaaataatgtttataaatttatttgtctatactagtagaagtgatcagtgacatactataaataatcctaaatggttatatttgatagaattcataacacattaaagagaaaatttcacattaaaggaaggtttaaaaatctattttcagattataaaaggtgtctttactggttttcattccttttatctacatgtaattggacatgtaaacttgttaaaaatcaaaatcttactgattgtacagggagaaattaagcattctgttttaaaaattaggcttattgctagactgtaagtttaaaaacaattcatgttcaaaggagcttttcaaattacccagtccaccacagaatcagctaatgtgacagaagtaaatatagtgcgtcataattgctaaaaacagggtgaatttctttcacttaagttggaaaaccagcctctaaaaaattaggtgctggtaatgagagcttaataccatggttccctgcaggtctcagaaacattagtagttcctttcttggccctcactgtccttccagtgttggcctctggcctcttcccctcacatttatgttcattctccgggcttatattcattctctgctgctttctcccttcacccgtgggactctcacccttcttgctcattctccagcacccattcctactttagtctctttgaaatcttttttggagattttccttcagctacaaatgttccagtacaaccaatattactcctgaggggcaaagactttttcatatttatgtccctagtatctggtatggcgcctggcatatggcatttcagaatatgttcatagttgaaacagtaggatagatatttgtcatcttgacaagtagccctttgcaatttatacttgagttcactcctggtcaatggcacatggctggaaaatgcagaaagcaaattcacttacagcctgaggcttataaagcttgtacagctgcctcccggcagtccaggaaaactgcaaaaaatgggaagtaaggtcctggcaggcagacccggcatgtagccgctggccatcttgaatcctagggcatgaagttgccccaaagttcagcacttggttaagcctgatccctctggtttatcacaaagaataggatgggataaagaaagtggacacttaaataagctataaattatatggtccttgtctagcaggagacaactgcacaggtatactaccagcgtttggatattgatatatacatggcaaatctgaatattgttttatgagaggcctggcaatgggtaaaacaccaaacttgaaatcagaacataggtgcaaatggccactcctgtagtttcttttctgtaaaatgggatctggacgaatgataccaaacgtttctttctaacattgtattttataactctggcctatgattgtgttgtgtcttgcattaaaaaaaaaaatttgagagtggtagaattacttctgttatctgaaatacctgagatgcactttaaactgttgaaatgtaagctctgagggcagggaccgtatcttatttactgttagtatccgttgcatctagtgtggtgcacctggcacacagtaggcactcaataaatatgtattgattaaaaacaaaaaagtcataaaaaacccaaaaaaaagcttgtacctgcccnnnn

SEQ ID NO: 13470 - DNA, 3139 bp, Homo sapiens
  misc_feature 1, 2, 3, 4, 5, 3126, 3137, 3138, 3139: n = A,T,C or G
nnnnnaatcgggtcatttttgtattaggaattgtcagaaatttaacatattttgaatggcaagaagcagcttttctatattcattttttttttagcatagattatctgatgcttaggaaacagtgagtgaggcaaaaagaattcccacatttatttaattttctttgggtgtgagttttctgatgttctatgatggaagtgacaggtgttttctgacattaattacactacattaaaaattacctagtactgagccagatgtgaactccacataaaggcttatctttatcccttacactcaaggctttctaaccagtatgaattctgtagtgttcaatgagttgtgagccaagaataaatgcctgcccacactctctacattcgtaaggtttgataccaggatgaattctctgatgttcggtaagttgtgaactacgaataaaggccattccacactccctgcattcatagggtttctcacaagtgtgaattcgctgatgatgagtcagttgtgaaacacgaataaaggccttcccacattccttacattcgtagggtttgtcacctgtatgaattctttgatgttgaatgaggtatgagctacgactaaatgccttcccgcagtccttacattcatagggtctgtcgccagtatggactctctgatgtcgtgtgagctgtgcgtgctgtctgaaggccttcccacattccttacactcatagggtttctccccagaatgaattctttgatgtcgagtaacttctgagctgtgaataaagccctttccgcattccttacactcgtagggtttctcaccagtgtggattcgctggtgtacagtcagctgtgagtgctgtctaaaggctttcccgcattctttacactcatagggtctggcccctgtgtggattctccgatgcacagtgagttgggagccacgaatgaaagccttgccacagtctttacatacgtagggtttctcgcctgtgtgagttctttgatgcagaatcagctgtgaatgctgcctaaaggtcttcccacattctttacattcataaggtttgacaccagtatgaagtctctgatgtagaataagttctgatgtacgaccaaaggccttcccacagtccttacagtcataaggtttctcacccgtgtgaattctctgatgctgacaaggtgtgaggcacggctgaaggccttcccacattccttacatccaaagggtttttcaccagtgtgagttttctgatgttgaataaggtgtgagccacggctaaatgctttcccacattcatgacattccatcagtttctcaccagtctccctgctctgacgtacagtgtgagacgtgtgatgctggaacacgggcatatgtccataggtgacgttcacttgcttaaaatagcactcttcattgacttgtctctcaaactggccttcgcattcccagtcagctctaaaatcggagccctccaggtcactgcatttaaggctttccattatctcccagttgaatgccccgatttcaaaaatgtctttttgtagaaatttctcacacctggactccaagtctgggcaccatggtcctgtcacatcatttgcaatcatccagggctctttcccttgctccaataaggagacgacatcaggcttagaaatggagagtcctagtgaggccaagtgaccaaagttctccagagtcacctccctgtacaagtccctctgagcaggttccaggcacttccattcttccagagagaactctatggccacgtccctgaatgtcaccagtccctgggccatggcttttagaactatttgacctgctctgatttctctggattcttctcttggacaagtgcagagtccttctgcctcccctggtcgcgtccgggtccttgcggagctaactagctcgccacgacgtcaagaacgacgtaacgtcaggccgctgtgggctctgggaattgtagtccagagctagatcggccacggacagaatggcgttctcttatctctgagtcggggcctggctcgttttgacatttttgcgcccacgagtcttcggagagggcgtcgccactccagaccttccagcaagcttgaagtcatctgacgctaaaggactacttacctcaagagctccatcgtcacagaaggaggcggccaagttcgcggggggaggggaggagacagagagtcgaccagtaaagcctcaagggaaatgtagtccaaggccctgggtccacgtggcgcgaaagtaggaggaagacataggccaaggagccagacttcctgtgttaactccttcctctgccactttttaccttggggacctcagttaatatgatcctctgttgaagcaagaagacaaactgtatggtggagaaagaagtgggaaggatctgcgcggaagaagcctgagaagatgatgcacagatagagaggcaccaggacttgagaggcaccaggacttgggaggcatgttgatccatctccaggaaagactgagaaaaagagcgttgaatataagaaaaaatacttcctctgtctcagatcgtatttgttttaaggccacaccttttggaagttttcagtttgaaacacaacctggactgaaatcatgagggaggtcgtgtaggaaagaatcatcaagggacttagttgggagcttctctaccacagcttactccttatgtattaaccccctttaagtgtaaatgtctttggtttaaaacgtttgtacctcatctgttaccagagtgttcatactggagagaaaccctatgaattactgaatgtgggggaactgttactcatatgttgcattccgtcgaacgtggcagtcatgctgaagagaaccctggctctaagagtatgacaaggccttgctgatgcatctctttgggagccgaaatctgcggggcagaatagtgaggggccactcctgagttgaaattttgacggaactgtatcgggtgtaatcctcacactacactacgcgtggggcacccaaccattgaggggttccaaccacaaaattggaaggtggggacacacccgcaagggccctggtgtccctcttgtgttgtcccctcatcgtcctctttttcagctctccngggaagcacannn

SEQ ID NO: 13471 - DNA, 401 bp, Homo sapiens
  misc_feature 1, 2, 3, 4, 5, 6, 7, 8, 401: n = A,T,C or G
nnnnnnnngaccggctggagattgattggctgaagggggagactataaaagaaaatatttagtttttggaggatacggatatgaaatctctagagaacaaaagtttggaaatgaccttcatccctaccattgaagatactggaaaagctcttgtttgtcaggctaagttacatattgatgacatggaattcgaacccaaacaaaggcagagtacttggtttttttttttataataaaagttaaaccagttttttttatttggaaagctctgccataaacttcttacgtgtgccaatgggaacctgccacacttgcaccaagttgtccgtgtagccagcaaacagagtctggccatcagcagaccaggccagggaggggcactggggtggttctgccttgcn

SEQ ID NO: 13472 - DNA, 1404 bp, Homo sapiens
  misc_feature 1, 2, 3, 1379, 1402, 1403, 1404: n = A,T,C or G
nnnccctttgcaattgccttgggtcctgccgcacagagcggcctgtctttatcagaggtccctctgccaggggagggccccagagaaaaccagaaagagggtgagagactgaggaagataaagcgtcccagggcctcctacaccagcgcctgagcaggaagcgggaggggccatgactacgaggccctgggaggtcactttagggagggctgtcctaaaaccagaagcttggagcagaaagtgaaaccctggtgctccagacaaagatcttagtcgggactagccggccaaggatgaagcctcacttcagaaacacagtggagcgaatgtatcgagacacattctcctacaacttttataatagacccatcctttctcgtcggaataccgtctggctgtgctacgaagtgaaaacaaagggtccctcaaggccccctttggacgcaaagatctttcgaggccaggtgtattccgaacttaagtaccacccagagatgagattcttccactggttcagcaagtggaggaagctgcatcgtgaccaggagtatgaggtcacctggtacatatcctggagcccctgcacaaagtgtacaagggatatggccacgttcctggccgaggacccgaaggttaccctgaccatctttgttgcccgcctctactacttctgggacccagattaccaggaggcgcttcgcagcctgtgtcagaaaagagacggtccgcgtgccaccatgaagatcatgaattatgacgaatttcagcactgttggagcaagttcgtgtacagccaaagagagctatttgagccttggaataatctgcctaaatattatatattactgcacatcatgctgggggagattctcagacactcgatggatccacccacattcactttcaactttaacaatgaaccttgggtcagaggacggcatgagacttacctgtgtatgaggtggagcgcatgcacaatgacaccggggtcctgcttaacacgagcgcggggccttactatgcgccacggggcttgatgcgcgcccgtcccgtgaacggccgcatgccaggatgagctcccgggcactgaacaccactgggggaagcgcgggacacgtgggccagggacctaccggggttacccggctacaccccagggagcgcgcggatcacacgtgggcacggcaaggggctctatcgtaacaacgcacacccaggcgaccgggcgatcctcaggcccgaattgatgatgcaggaacgacagcggagcgcacctgatcaagacggcagcacgagacaacatacagggagtagcgcaccgacaccacgaggaaagagccatgcaggcgcataagagacagaggaagaaaacatatacngcagcagctgtacacagaccgannn

SEQ ID NO: 13473 - DNA, 3055 bp, Homo sapiens
  misc_feature 1, 3054, 3055: n = A,T,C or G
nataaggagtcgacccattcgtccgtggttatgggctcggaaatctagttcgggaaaagtgtgaggggctcttcacgtggggaaggaacagcaggcgcggaggagggggcaagcgtgtgtgagattcagtggtccatgcgtgcgtttgtcgtgtaagggtcattcctggggtttggagtgggggaacaaatcaatgtggctgtttttccgtggaaagaattcccactgcagtgtcccggagcctgcgtgtggtgggcaagctcctcaaatggtatctcacagggaataggggagtcttgaaaacgcagcttcggcagtaggaacatgaacctcttacctaaaagttccagggagtttggctccgttgactattgggagaagttcttccagcagcgaggaaagaaagctttcgagtggtatggaacctacctggaactgtgcggggtgctacataaatatatcaagcccagggaaaaggtgctggtgattgggtgtggcaactcagaactgagtgagcaactgtatgatgtgggctatcgggatatagtgaacatcgacatcagtgaggttgtcatcaagcaaatgaaggaatgtaatgccacccgacggccccagatgagcttcttgaagatggacatgacgcagatggagtttcctgatgcctcgttccaggtggtgttggacaagggcaccctggatgctgtcctgacagatgaggaagagaagaccttacaacaggtggacaggatgctggctgaggttggccgtgtcctgcaggtgggcggtcgctatctctgcatctccctggctcaggctcacatcctgaagaaagcagtgggccacttctcccgggaggggtggatggtgagggtgcaccaagtggccaacagccaggaccaggtgttggaagcagagcctcagttctccttgcctgtctttgccttcatcatgaccaagttcaggccagtccctggctctgcccttcagatctttgagctgtgtgctcaggagcagcgcaagcctgtgcggctggagagtgccgagcggctggccgaggcggtgcaggagcgacagcagtatgcctggctgtgcagccagctgcgccgcaaggccaggctggggagtgtgtctctggacttgtgcgatggggacacgggggagccacgctacaccctccacgtggtggacagccccactgtgaaaccatcgcgggacaatcattttgcgattttcatcatccctcagggccgggagaccgagtggctctttggcatggatgagggccggaaacagctggcggccagtgctggcttcaggaggttgattacagtggcccttcaccgaggtcagcagtatgaaagcatggaccacatccaagctgagctgtcggctagagtcatggagctggccccagctgggatgcccacccagcagcaggtcccctttctgtctgtgggtggggacattggggtccggaccgttcagcaccaagactgcagccccttgagcggtgactatgtcattgaggatgtgcaaggggatgacaagcgatacttccgtcgactgatcttcctcagcaacaggaatgtggtgcagtccgaagccaggttgctgaaggatgtgtctcacaaagcccagaagaagcggaaaaaggacaggaagaagcagcggcctgctgatgcggaggacctccctgcagccccggggcagtccattgataagagttacctgtgttgtgaacaccacaaagccatgatcgctggccttgccctgctgagaaacccagagctactcctagagatcccactggcattgttggtggtaggcctgggcgggggcagcctccccctctttgtccacgatcattttccaaagtcctgcattgatgctgtggagatcgatccctccatgttggaagtggccacccagtggtttggcttctcccagagtgaccgaatgaaggtccacattgcagatggcctggactatatcgccagcttggcaggaggaggagaagcacggccttgctacgatgtcataatgtttgatgttgacagtaaggacccaacactgggaatgagttgtccgcccccagcatttgtggagcaatcttttctacagaaggttaaaagcatcttgactcctgaaggtgtttttattctcaaccttgtgtgccgagacttggggctaaaagactcagtgctggctgggctcaaggcagtgttccccctcctatatgtccggcgaattgagggtgaagtgaatgagatcctgttctgtcagctgcaccctgagcaaaaacttgccacaccagagctcctagaaacagcccaggctttggagcggaccctgaggaagcctgggaggggttgggatgacacgtatgtcttgtcagatatgctcaagacggtgaaaattgtgtgactgcttaggccaagcagccctcctgcctagactgaccttggactcccagcctgccagagaatgaagaaatacaacgcacagtacttttgaagcttcgtatttttcttggtttcacactcagctacatgtgacctccagcttggtgaggttgcctgaagattagggaaaataaaaatgtccttcccatcttgtcctcttcagtaccacttgggttggtttgtctttgcttcctacaccacgtccttgagtggagttccctgctgaagcccctagcacacactgatgccttaacaagtgtgtgcaagccctcagaactcagacatccaaattttattgcgtctctacttatactggtttgctttgatttatcctctattagtctatagggagtgatctcaagtgagatagcagagcagatgcccaaagaccataaatagagtaggtctatacgctgtacacagattgagaaagccttactcgtctcctgggatgaactgtgctgaatgttcatttagatcggttccctttattgacgtcctgtacaactgtgtgccatgttttcaggggattgaccgccgtgcgtaaacggaaacctcgggcgcacgaagaccccaagggcaatacacacann

SEQ ID NO: 13474 - DNA, 321 bp, Homo sapiens
  misc_feature 1, 2, 318, 319, 320, 321: n = A,T,C or G
nnagctaccttcaaggaaaccagtttaggaggaattgaactcaggactcagagtagtccaggtgttttcctcctattcagttcccagaatcaaagcaatgcattttggaaagcttctagcagagagactttcagccgtaaatttagattcaaggttcccagagatgacaaatggagaagaaaggccatttgagcaaatttgggggtttcccaaataaaataaaaataatatatttttttttgtgtttctctcttccgccccctattgggaaaaaaaaaaaaaaaaaaaaaagtactctggccgccaccgcggtggagnnnn

SEQ ID NO: 13475 - DNA, 379 bp, Homo sapiens
  misc_feature 1, 2, 3, 4: n = A,T,C or G
nnnnaagaccagcacccttggtacaaagtgttagctccactctttctcctttgaatactgagtattaaacttttagaatttattaataattacttagttctcccaattcccttccaacctctgagcgttctctgacatcatgcagtagcaactcctttcttgttctctgggtcacttgaataacttaatatgaaaatgctttgagaccttcagagaatcaggacagtcgcatactttggcccaggcacccgcaagacgtgccaggaggtttacgtgcctgtctctctgcctctagctggctggggttgtcccacggctctgaggagggacacacgcaaatgctgagagcctgcagttcctcgggggtggtcaggagagt

SEQ ID NO: 13476 - DNA, 419 bp, Homo sapiens
  misc_feature 392, 393, 394, 395, 396, 397, 398, 399, 400, 401, 402, 403,404, 405, 406, 407, 408, 409, 410, 411, 412, 413, 414, 415,416, 417, 418, 419: n = A,T,C or G
acgcgggattctcactggtgctcaaggtgacattttcatccataaatctgtatgtggtttaaatattttaaattttaatcagagtgctagccattgtttaaaaatacagcttcctaaaatgtttgcaaagcaaagcagtggcgtccagtagaactttctgaagtgatagagatgacctgtgtctgcactgtctaataacctcatgtggcttaaagcacctgaaatgtggctattatgactgaaactgaatttttaattttagttaatttaaatagccacatgtaggccgggcacggtggctcccagcactttgggagcctgagacgggcggatcgcctgaggtcaggagttcaagaccagtctggccaacatggtgaaaccctgtctctacnnnnnnnnnnnnnnnnnnnnnnnnnnnn

SEQ ID NO: 13477 - DNA, 1166 bp, Homo sapiens
  misc_feature 1, 2, 3, 1143, 1144, 1145, 1146, 1147, 1148, 1149, 1150,1151, 1152, 1153, 1154, 1155, 1156, 1157, 1158, 1159, 1160,1161, 1162, 1163, 1164, 1165, 1166: n = A,T,C or G
nnncttccgggtcgtattgttgtgtggaattgtgagcggataacaatttcacacaggaaacagctatgacatgattacgaatttaatacgactcactatagggaatttggccctcgaggccaagaattcggcacgaggcagccttcgggctaggttgagtgagggctcttgggttaacgcgtgggtcgacccacgcgtcgggagtaggttgaagtctcctaagatgcccggtgggctggggcaccgggagctgtgaagggaacgtgagggggcggcgtagtggagacccacggcaggcctgaagaagagcggcggccgagcccgccttccctgcaccatgctcatagaggatgtggatgccctcaagtcctggctggccaagttactggagccgatatgtgatgctgatccttcagccttagccaactatgttgtagcactggtcaagaaggacaaacctgagaaagaattaaaagccttttgtgctgatcaacttgatgtctttttacaaaaagaaacttcaggttttgtggacaaactatttgaaagtctctatactaagaactaccttccacttttggaaccagtaaagcctgagccaaaaccactagtccaagaaaaaagaaaacattaaaacgaagaggtatttcaggagccagcagaggaagaacgagatggcagaaaccagaaatatcctagtccccagaagactcgttcagaatctagtgaacgaaggaccgtgcgaacacacccgccacgcgggcactggcccagactatgaccggacttatcaccggcaggcttcgtccgggccacgctcgcccgcgcaacgcgccgccgccacacccccccaacagcccccccccaacccccccggcccccgcccgaccccccagtcagcccccccagcgacccccaatcccgccgtcgaagcgccaccgtcgcgcacctcttagacaccagcccgcgtaccaccgcgccgcaccccacacacgtcggcgcacccgcctctcggcgcccaacggagccacccgatccacaaacgccacctctgggaccgcactggaagatgtaggagccagccacacgcccaccgcctcaacgatcccgctcccagccccgcccacccacccgcccccgcannnnnnnnnnnnnnnnnnnnnnnn

SEQ ID NO: 13478 - DNA, 1246 bp, Homo sapiens
  misc_feature 1245, 1246: n = A,T,C or G
ttttctacatcacaacgacctggttttcaaattcagctctcaaggccaaatcttttctaaatttaaccaagaacttcatcagttcacagagaaagtaatccaggaccggaaggagtctcttaaggataagctaaaacaagatactactcagaaaaggcgctgggattttctggacatacttttgagtgccaaaagcgaaaacaccaaagatttctctgaagcagatctccaggctgaagtgaaaacgttcatgtttgcaggacatgacaccacatgcagtgctatctcctggatcctttactgcttggcaaagtaccctgagcatcagcagagatgccgagatgaaatcagggaactcctaggggatgggtcttctattacctgggaacacctgagccagatgccttacaccacgatgtgcatcaaggaatgcctccgcctctacgcaccggtagtaaacatatcccggttactcgacaaacccatcacctttccagatggacgctccttacctgcaggaataactgtgtttatcaatatttgggctcttcaccacaacccctatttctgggaagaccctcaggtctttaaccccttgagattctccagggaaaattctgaaaaaatacatccctatgccttcataccattctcagctggattaaggaactgcattgggcagcattttgccataattgagtgtaaagtggcagtggcattaactctgctccgcttcaagctggctccagaccactcaaggcctccccagcctgttcgtcaagttgtcctcaagtccaagaatggaatccatgtgtttgcaaaaaaagtttgctaattttaagtcctttcgtataagaattaatgagacaattttcctaccaaaggaagaacaaaaggataaatataatacaaaatatatgtatatggttgtttgacaaattatataacttaggatacttctgactggttttgacatccattaacagtaattttaatttctttgctgtatctggtgaaacccacaaaaacacctgaaaaaactcaagctgacttccactgcgaagggaaattattggtttgtgtaactagtggtagagtggctttcaagcatagtttgatcaaaactccactcagtatctgcattacttttatctctgcaaatatctgcatgatagctttattctcagttatctttccccataataaaaaatatctgccaaaaaaaaaaaaaaaaaaacacagagnn

SEQ ID NO: 13479 - DNA, 852 bp, Homo sapiens
  misc_feature 1, 843, 845, 852: n = A,T,C or G
naaccaacagaggcaagttggtggatcagtaaccccactcccttgctcttcactgggacaatctggggagaagttctgcagtctctcagggggccccagcaggctgagccttgcctgtccactcactgccaggcacccactcgtcatcatacccttcattggcttcctgtcttccttgtgtcactgtccccatggttcctgggatcacctctcaagtaaatgatgtggaccaaagtcctgtctcagggtaaccatctctgcttattcctctgccacgtctttcccttctcctctctgctctcataaagaagaatgggagatgaaagtggaggggcagctgaggtggggcggcatcaggctgatacaacaccccagggaaccctgcttccatgtaaccctgaccttaaatccctatcctataataaagagttgggcacaacagaagggaaaaggaagtattctgcaaattgttttccataacagtgcagaggacacactttgcaatgtgtaatttgtgcagtatgacatgcatttgggtgtgtctggtcaggtacatcatgtggtgtccctgttatgcattttgcagactgacactctgcttaaccagtccttccgtgctgtgctgttttgtaagctcttaaccagaatgcaaaaatgttaaataactgtctggttttattttccagccctctgggatgagtctgatgacagtaactcagaaattgaggctgctttacgccccagaaaccataacaccgatgattctgatgatttttatgactaacgtgctgtgacattggtttcaaataaagtctttaaacaaactcaaaaaaaaacgcacgnanggacgan

SEQ ID NO: 13480 - DNA, 969 bp, Homo sapiens
  misc_feature 783, 793, 902, 939, 965, 966, 967, 968, 969: n = A,T,C or G
accttaatacactccaaacctcagactggtgatattgcattactttctataagatacacacttatattttgcttaaagaagcatttgcagctttaacccatttaatgtaatatataaggcagatggttcttgacaactataatcttggaagaaaactgaaaaaatcaattaggtgtttggcagcactcaaaaaacagcctaataagctcattgccatgcaaatcacctacaatgttaaatatataaaactgctgtattaagctcggagaaggaggaaaatttcctcttcactcatgtgaccggagactaagaggaaggctccaggggtgctgctggctgggaagagaactggggaaactgccccagtagaggtggagatgccagggcagagggaactgggcttaaccggcagggcagggctgcctctagaaagagccagcttttctagcacaggttaggagtgaggcagcagaactgggcttaacagggggcaggactgcctctagaaagagccagcttttctagcacaggttaggagtgaggcagcagatctgggcttaacaggggcagggctgcctctagaacgaggcagcttttctaacacaggttaggagtgaggcagcttcccaccagtgagtcaaccttgccataaattgccaacaaatatgctcagggcgaaagaatcagatcagatgttaccgtgggactctttttctaattacagaagtttcttctgtggggcgttagcccctaccaattaagaagtaattacattctaaaggnttggttacanagcaagataaactaaaaatagaaagtgtgaaataagaataaaggcaaaaaataatggctattttgccagttacattctttttcttcttcatccccaaactagaaatcanttgaaaagcaaaaaatattaggtaactaaggcaaatntggttagaaacatcccaagtatacannnnn

SEQ ID NO: 13481 - DNA, 911 bp, Homo sapiens
  misc_feature 1, 2, 3, 4, 909, 910, 911: n = A,T,C or G
nnnncgtgttcacgtccgtttggcgccggttggtatcacggttcccaagtggtgccctcttacgcgcagccctgttgttcgcgtgtgttggcaggccgcaggctctgttcttgaggtcccgcgcgcgcccgtttgtcattgtgcggtcctgatccgtgtttgtgatgtgtcccacttggcctccagggctcgcccccccttgggcgcaattttcttgagtttggtgacacaccggccctgttcaccgggtgccaccccggtgtgttgttcttctttttctcggaccggggttctttttctgtgtccacgggcgtaccgcttcacgtgtgttgcaaattctcgggtgcacttgcaaaccttgccccccatgtggtgttcccccctctttttcttgtcgtgtcttcctccgcggtttctgtgtggtctatttgtgtcctccttcccccctcccgggctaattttgtttttttttttgttttcggtattgttttaggtagagtacagggtttcaccatgttagcccaggatggttctcgatcttccttgacctcgtgatccacccacctcggcctcccaaaagtgctgagattacaggcgtgagccaccgcgtccggccgatcttcccaatttttgaagcaaagccagacactgaattttaacacaaaatcagctgacttttagacattgtgaactcctagcctgcggccaaccacttccagggttgtcagggcttccaccccacactgacccagggtggcttcattctgtaagggagaacctgccagaagcacaaccttatcttcagggatgaggccctccagggatgctacatgggccttgctctgggcaaccgtctccaggccggtcacttcaagagtgtgcccctcccgggcgcgcacgtaggcgacnnn

SEQ ID NO: 13482 - DNA, 334 bp, Homo sapiens
  misc_feature 1, 329, 330, 331, 332, 333, 334: n = A,T,C or G
nactccaccgtggtggcggcctttctgccaagttctcggggtagaagaagaagcgtggggggaaagactgcaacaagaacaaaaaaattcccggacaggccgcttgctgcagaggatccagtccagatcccacgagagcccctctgccccttcggacctcgtctcccatctacaaaacgtgaagattggcccaattagcgtgtctctacaaaaaggtgcatataccactgaagctgccttgtttgcttttgggtgttggattgaacttttctttcatgaatcacgggttggaaaggcttctcttgttttctgctaataaaaagccatcnnnnnn

SEQ ID NO: 13483 - DNA, 1504 bp, Homo sapiens
  misc_feature 1497, 1498, 1499, 1500, 1501, 1502, 1503, 1504: n = A,T,C or G
gcgtccgctgtttgcatttaagcgggctgtgaacgcccagggccggcgggggcggggccgaggcgggccattttgaataaagaggacaattttcagcaggaagaagtagaaaggaccgcggcgagcgtgcgcgcgttgcaggtcactgtagcgggacttcttttggttttctttctctttggggcacctctggactcactccccagcatgaaggcgctgagcccggtgcgcggctgctacgaggcggtgtgctgcctgtcggaacgcagtctggccatcgcccggggccgagggaagggcccggcagctgaggagccgctgagcttgctggacgacatgaaccactgctactcccgcctgcgggaactggtacccggagtcccgagaggcactcagcttagccaggtggaaatcctacagcgcgtcatcgactacattctcgacctgcaggtagtcctggccgagccagcccctggaccccctgatggcccccaccttcccatccagacagccgagctcgctccggaacttgtcatctccaacgacaaaaggagcttttgccactgactcggccgtgtcctgacacctccagaacgcaggtgctggcgcccgttctgcctgggaccccgggaacctctcctgccggaagccggacggcagggatgggccccaacttcgccctgcccacttgacttcaccaaatcccttcctggagactaaacctggtgctcaggagcgaaggactgtgaacttgtggcctgaagagccagagctagctctggccaccagctgggcgacgtcaccctgctcccaccccacccccaagttctaaggtcttttcagagcgtggaggtgtggaaggagtggctgctctccaaactatgccaaggcggcggcagagctggtcttctggtctccttggagaaaggttctgttgccctgatttatgaactctataatagagtatataggttttgtaccttttttacaggaaggtgactttctgtaacaatgcgatgtatattaaactttttataaaagttaacattttgcataataaacgatttttaaacacttgagtttttgtttctatacgtcgcccgtcttccggccccctcccgccgccccccactcaccacaacaacacacactacagcaagaacaagccacagaatcagtaccacaccaccggccgcggctcgccccacacaacataccgaacacgcgccacacgccccgaccaccacagaccatcaaacagaaacaagagggcggaaaggcgcaggacgcggacgaaggagaggcaagcgggaggcaggggcgggggcaagggggggcgggccggagtcgggcggagggccgcggcaggcgcgcgggcgaggcgcgaggggacgagagaggggaggagcaacgagagagcagagggccagagaagggcggagagagggcagaaaggcgcgcgaggagccgcgggcggcacagcgaggaaacgccgcnnnnnnnn

SEQ ID NO: 13484 - DNA, 181 bp, Homo sapiens
  misc_feature 181: n = A,T,C or G
ggaccacttctctgggacacattgccttctgttttctccagcatgcgcttgctccagctcctgttcagggccagccctgccaccctgctcctggttctctgcctgcagttgggggacaaaaaatgttttgtttttacactccttttctcccaacaaagaattttgacattcccaagtcagn

SEQ ID NO: 13485 - DNA, 2962 bp, Homo sapiens
  misc_feature 1, 2951, 2952, 2953, 2954, 2955, 2956, 2957, 2958, 2959,2960, 2961, 2962: n = A,T,C or G
natccacgtcgcgtctgccacacccgtccgggaagtcgagagaggaggaagagagaaagtacttaaaatgtatcgttttaacttaatatttaaccgaatgatagcaaaatcttatctgaaattggaaaagtcaaggttttgagtgctggttcggtgcccatttctttatgatttgatagtctgagaagaatacgacgggtgtggcttaaaaacctacatcacgtgtgtagttggaattgggtgttatatgagcaaacaaaataaatatctgtgcaatatatctgcttatgcactcaagcagagaagaaatccacaaagactcacagtctgctggtgggcagagaagacagaaacgacatgagcacagcaggaaaagtaatcaaatgcaaagcagctgtgctatgggaggtaaagaaacccttttccattgaggatgtggaggttgcacctcctaaggcttatgaagttcgcattaagatggtggctgtaggaatctgtcgcacagatgaccacgtggttagtggcaacctggtgaccccccttcctgtgattttaggccatgaggcagccggcatcgtggagagtgttggagaaggggtgactacagtcaaaccaggtgataaagtcatcccgctctttactcctcagtgtggaaaatgcagagtttgtaaaaacccggagagcaactactgcttgaaaaatgatctaggcaatcctcgggggaccctgcaggatggcaccaggaggttcacctgcagggggaagcccattcaccacttccttggcaccagcaccttctcccagtacacggtggtggatgagaatgcagtggccaaaattgatgcagcctcgcccctggagaaagtctgcctcattggctgtggattctcgactggttatgggtctgcagttaacgttgccaaggtcaccccaggctctacctgtgctgtgtttggcctgggaggggtcggcctatctgctgttatgggctgtaaagcagctggagcagccagaatcattgcggtggacatcaacaaggacaaatttgcaaaggccaaagagttgggtgccactgaatgcatcaaccctcaagactacaagaaacccatccaggaagtgctaaaggaaatgactgatggaggtgtggatttttcgtttgaagtcatcggtcggcttgacaccatgatggcttccctgttatgttgtcatgaggcatgtggcacaagcgtcatcgtaggggtacctcctgcttcccagaacctctcaataaaccctatgctgctactgactggacgcacctggaagggggctgtttatggtggctttaagagtaaagaaggtatcccaaaacttgtggctgattttatggctaagaagttttcactggatgcgttaataacccatgttttaccttttgaaaaaataaatgaaggatttgacctgcttcactctgggaaaagtatccgtaccgtcctgacgttttgaggcaatagagatgccttcccctgtagcagtcttcagcctcctctaccctacaagatctggagcaacagctaggaaatatcattaattcagctcttcagagatgttatcaataaattacacatgggggctttccaaagaaatggaaattgatgggaaattatttttcaggaaaatttaaaattcaagtgagaagtaaataaagtgttgaacatcagctggggaattgaagccaacaaaccttccttcttaaccattctactgtgtcacctttgccattgaggaaaaatattcctgtgacttcttgcatttttggtatcttcataatctttagtcatcgaatcccagtggaggggacccttttacttgccctgaacatacacatgctgggccattgtgattgaagtcttctaactctgtctcagttttcactgtcgacattttcctttttctaataaaaatgtaccaaatccctggggtaaaagctagggtaaggtaaaggatagactcacatttacaagtagtgaaggtccaagagttctaaatacaggaaatttcttaggaactcaaataaaatgccccacattttactacagtaaatggcagtgtttttatgacttttatactatttctttatggtcgatatacaattgattttttaaaataatagcagatttcttgcttcatatgacaaagcctcaattactaattgtaaaaactgaactattcccagaatcatgttcaaaaaatctgtaatttttgctgatgaaagtgcttcattgactaaacagtattagtttgtggctataaatgattatttagatgatgactgaaaatgtgtataaagtaattaaaagtaatatggtggctttaagtgtagagatgggatggcaaatgctgtgaatgcagaatgtaaaattggtaactaagaaatggcacaaacaccttaagcaatatattttcctagtagatatatatatacacatacatatatacacatatacaaatgtatatttttgcaaaattgttttcaatctagaacttttctattaactaccatgtcttaaaatcaagtctataatcctagcattagtttaatattttgaatatgtaaagacctgtgttaatgctttgttaatgcttttcccactctcatttgttaatgctttcccactctcaggggaaggatttgcattttgagctttatctctaaatgtgacatgcaaagattattcctggtaaaggaggtagctgtctccaaaaatgctattgttgcaatatctacattctatttcatattatgaaagaccttagacataaagtaaaatagtttatcatttactgtgtgatcttcagtaagtctctcaggctctctgagcttgttcatcctttgttttgaaaaaattactcaaccaatccattacagcttaaccaagattaaatgggatgatgttaataaaagagcctcnnnnnnnnnnnn

SEQ ID NO: 13486 - DNA, 626 bp, Homo sapiens
  misc_feature 1, 2, 3, 4, 5, 6, 598, 599, 600, 601, 602, 603, 604, 605,606, 607, 608, 609, 610, 611, 612, 613, 614, 615, 616, 617,618, 619, 620, 621, 622, 623, 624, 625, 626: n = A,T,C or G
nnnnnncgagctcgggggccccagaaaatgaaactgaacccgtggtcacgtgacaggacatgtagtatatagcaggctgccagcgactcctgctcttgcttctggatctgcagggcagtcccagcaggacccatggagtgtccttcgtgccagcatgtctccaaggaggaaacccccaagttctgcagccagtgcggagagaggctgcctcctgcagcccccatagcagattctgagaacaataactccacaatggcgtcggcctcggagggtgaaatggagtgtgggcaggagctgaaggaggaagggggcccgtgcttgttcccgggctcagacagttggcaagaaaaccccgaggagccctgttccaaagcctcctggaccgtccaagaaggagctacatcagaggttttggtagatgctgctgtagacctcatatccgatgaatgggaagctgctaatgccatacccagcaagagaaggaagcaggatgcagccccgcttgaggccgccagcgtgccttctgcagactgtgagcagagcggtccactctaaatcctcccccccccactaccctcccctctccctcctcttttgnnnnnnnnnnnnnnnnnnnnnnnnnnnnn

SEQ ID NO: 13487 - DNA, 845 bp, Homo sapiens
  misc_feature 1, 2, 3, 4, 801, 826, 829, 842, 843, 844, 845: n = A,T,C or G
nnnnatggcgacctccgcgacgtcgccgcacgcgcctggttttccagctgagggtagatgcggttactatgtggaaaagaagaaacggttctgcaggatggtggtggccgcagggaaaagattttgtggtgaacacgctggagccgcggaggaagaagatgctcggaaaagaatcctgtgtcctttagatccaaaacacacagtatatgaagatcaactagcaaagcatttgaaaaaatgtaactcaagagagaaaccaaaacctgatttctatattcaagatattaatgcaggcttaagagatgaaacagaaatacctgaacaattagttccaatttcttctctatctgaagagcagttggaaaagttaattaagaaattgagaaaagcaagtgaaggcttgaattctacacttaaagatcatattatgtcccatccagcattacacgatgcacttaatgaccctaaaaatggcgattctgcaaccaagcacctgaaacagcaggtatgtttaggctatagtaactactaaacatggcctttgttcatttgttaaaactgttttaaatgtaattattaataagattttattttgtttacctttgagggtaccaaatatttccatttcaaaaatatatagaaacatatacaaaaaattgagggcatggatgtgattctgagtaccgtatattaaatatttaaaggcaagagagaaaaattttaagtcaaataccaattatcaatgtaagcatactggcttatgcagaaattaccctgctggtttccatttgaacccaatgngttactctagtttataaaataatcntgngaagtttgcagcnnnn

SEQ ID NO: 13488 - DNA, 1163 bp, Homo sapiens
cgcccacgcgtccgcttgcctgctgctctggcccctggtcctgtcctgttctccagcatggtgtgtctgaggctccctggaggctcctgcatggcagttctgacagtgacactgatggtgctgagctccccactggctttggctggggacaccagaccacgtttcttggagtactctacgggtgagtgttatttcttcaatgggacggagcgggtgcggttcctggacagatacttctataaccaagaggagtacgtgcgcttcgacagcgacgtgggggagtaccgggcggtgacggagctggggcggcctagcgccgagtactggaacagccagaaggacttcctggaagacaggcgggccctggtggacacctactgcagacacaactacggggttggtgagagcttcacggtgcagcggcgagtccatcctaaggtgactgtgtatccttcaaagacccagcccctgcagcaccacaacctcctggtctgttctgtgagtggtttctatccaggcagcattgaagtcaggtggttccggaatggccaggaagagaagactggggtggtgtccacaggcctgatccacaatggagactggaccttccagaccctggtgatgctggaaacagttcctcggagtggagaggtttacacctgccaagtggagcacccaagcgtgacaagccctctcacagtggaatggagtgcacggtctgaatctgcacagagcaagatgctgagtggagtcgggggctttgtgctgggcctgctcttccttggggccgggctgttcatctacttcaggaatcagaaaggacactctggacttcagccaacaggattcctgagctgaagtgcagatgacaatttaaggaagaatcttcttccccagctttgcaggatgaaaagctttcccgcctggctgttattcttccacgagagagggctttctcaggacctagttgctactggttcagcaactgcagaaaatgtcctcccttgtggcttcctcagttcctgcccttggcctgaagtcccagcattgatggcagcgcctcatcttcaacttttgtgctcccctttgcctaaaccctatggcctcctgtgcatctgtactcaccctgtaccacaaacacattacattattaaatgtttctc

SEQ ID NO: 13489 - DNA, 841 bp, Homo sapiens
  misc_feature 1, 2, 3, 4: n = A,T,C or G
nnnncaggtacgcgggtgataatgatagcccctatgatggagggacgcctgggcgcatgcccccacagcccctagtcaatgctgtccctgtgcagaatgtatctggggagactgtttctgtcacaccagttcctggacagactttggtcaccatggcaaccgccactgtcacagccaacaatgggcaaacggaaaccattcctgtgcaaggtaaggaaggcagagttggatattgagttccttctctgtggcatgtattgaaaagttacccgaggtttggctagagtgacataggggacagatgagtgatggggagagagggtttgggagagcataaattgtaaacctctgcccgaagaacctcttataataaacattttcttcatgccttttttctctgtcactaggtatggccaatgaaaatggagggataacattcttccctgtccaagtcaatgttggggggcaggcacaagctgtgacaggctccatccagcccctcagtgctcaggccctggctggaagtctgagctctcaacaggtgacaggaacaactttgcaagtccctggtcaagtggccattcaacagatttccccaggtggccaacagcagaagcaaggccagtctgtaaccagcagtagtaatagacccaggaagaccagctctttatcgcttttctttagaaaggtaatttttcacataccttatcagagcatgagcttgggaaatacaagtgttaaacaaagtttgaaatgtttttatctcctaggtataccatttagcagctgtccgccttcgggatctctgtgccaaactagatatttcagatgaactgaggaa

SEQ ID NO: 13490 - DNA, 724 bp, Homo sapiens
  misc_feature 567, 624, 722, 723, 724: n = A,T,C or G
accctatgttgggctctgtgctgagagaccccagtttcttctccaacccccaggacttcaatccccagcatttcctgaatgagaaggggcagtttaagaagagtgatgcttttgtgcccttttccatcggtaagagaccactgtttgctgccaggccacggctcacaccagcaggcgcctccctcaccctcctcccctctctgcggtgtagcctggtatttctccagcttggaagttcctgttagaatctacccttgagccagcagctgatacttccttaactaccaagcacccagtacctgcgcccaggtaaaatgaaaggaaacatctttccccgtagatgtatttctctagggtcacacagcagattcctcagatccctaaaaaggagatgacggcacagcagtcatatttgcaagtgtacctggcaggaaaggacatctaaacctcccattgctacacctggcatggatcaccccatctatgatggatgtgtgacattatgcctttttcaaaacccatagaactgtataacacagagtaaaccctaatgtaaactatggactntgttagtaataatatatcaatattggttcaaaaaaaaaaaaaaaaaaaactcgaggnggggcccggtacccaattcgccctatagtgagtcgtattacaattcactggccgtcgttttacaacgtcgtgactgggagtggcgtaataaccgaaannn

SEQ ID NO: 13491 - DNA, 587 bp, Homo sapiens
  misc_feature 581, 582, 583, 584, 585, 586, 587: n = A,T,C or G
acctttaataatattttatttaacctcatatatccaaaacattatcctttaagcatgtaatcaatataaaaaattattaatgagacattttacatcctttgtttcacagtaggtctttgaaatctagagtgtattttatactcacagcacatctcaatgtagactagcatatttcaagtgctcggtggccatatgtgactagcagctaccatagagggccacaaagatctagacccttaagagttacacatacatacaacacccctttaataatctcttccatgtttctataatgatccaaagaggtagtgctctactctcgtttctatgcttacacacttctgggatgaaattacagggataccatccaatgaatgcctgaaattccaccatggtagcttacactcaattctttaaatatactgtgcttcaagttgtgtttaaacaaaaatgccccaaaagggggaatactctaagctaatatctgtctatcattaaaccttaggttacatgaagggaactgacagcacatccagggagagccagtaggggcacagaagacaaaaatcagatggctgacnnnnnnn

SEQ ID NO: 13492 - DNA, 1404 bp, Homo sapiens
gcgtccggcagtaagatggtggggcccaggtcttgggagacgggcaggattggggacgagaggcaggaagagacgggtggggggcgaggagaaggcaggggtaggaggcaaagggaatctgaggacccgaaaggttggaggtggggttggaaagactggggccctgcggggaagcgagtctgcagcctgaaacaggagtttgtgggtcagagtttgtgggtcagagtttgtggggctgggatagaaactcgggggattggcgttcagatgctgaccacttccctcttctctgagcagtgtgacttcaccgaagaccagaccgcagagttcaaggaggccttccagctgtttgaccgaacaggtgatggcaagatcctgtacagccagtgtggggatgtgatgagggccctgggccagaaccctaccaacgccgaggtgctcaaggtcctggggaaccccaagagtgatgagatgaatgtgaaggtgctggactttgagcactttctgcccatgctgcagacagtggccaagaacaaggaccagggcacctatgaggattatgtcgaaggacttcgggtgtttgacaaggaaggaaatggcaccgtcatgggtgctgaaatccggcatgttcttgtcacactgggtgagaagatgacagaggaagaagtagagatgctggtggcagggcatgaggacagcaatggttgtatcaactatgaagcgtttgtgaggcatatcctgtcggggtgacgggcccatggggcgggtacggctcctcccagctctcctctagttgatctccccagtgtttcttttttccccaacctgtgctctttatcccctgcccttaccctactaccatctgactttctcctggcatgtttctgcatggagctgactagggaggggagggattcctcaaagaggaagacaacctgggggtacagtacctccttacctctagaatgggccctgaggttttacttatgcggccctgggtgctggtgtctgggaactctcaccagcctgtataccagtcttgctttagggtgaccttctggccctggagcatgggtagctggcatagaggggtatgggttgcctgccccattctgctgctatagctgaacagtcctttccccttccctcgctgggcagcttggaggtaccctaacccaaaactctgtcctctcctcccgccagtggctgacagtagctgtaggtgtagtggagaacttttctgcctctgctgtgttcttgctgcttaggtttgggtgggggactaacagctgctgggaggggagctaggggcatggagaactggtcagactcaaggtggcttctttgcaaactgaccccagggttggttgctgtgggcatgttcccgcttatgctacctttgca

SEQ ID NO: 13493 - DNA, 4678 bp, Homo sapiens
  misc_feature 1, 2, 3, 4, 5, 6, 7, 8, 9, 10, 11, 12, 4678: n = A,T,C or G
nnnnnnnnnnnnatattaattatgttgtagcttattgttactcttttgaatgctcaaattgtcgagatttggccaatgcaatctgttatttttttaaccccacaatccaggttaaactgagctatttttaatgcccagagtaatttctaatatttcccactgccaacagaaattgagaaagggactccagaagttgggggcttattcagactcttcttagaagtctactttcttcctgtgtactttcagcccaaagtgagacttttgagttgggaagagatacctctgaattaaactactgatcagtgtcacccaattctaatcccaaccacttttattctaggcataccatactcactgccatgcttacccttcagttgggcacctttgtcctccttcccattgcccttctggttcctacccaactgtcccagtccacaggcctcagtaacacctttctgcccagccctgtggtagcgttggcctgcctcctttgcctactcaagtaactgctttaccactatttattgttttgtgttttcatcttataggatcttacctagccatatggcctgctgcctctgccaatttaaaaatagcattgaggctgtctgcaagacagtcaagctgcattgcaacagtgcatgtctgacaaacaccacacattgtcgtgagtccaaattgcccggtgataaattgttacattaagtatttgtttttaaactttttatttttaatgatgataaaattttaagctaatgacataattgctttatttttatttactcattcagagttaaactccctcaatttccgaactactcccttgctgaaagtcaggttctcagttactattacaaaatttaataatagaactgttccatatgcagaaaggaccaagacaaaggaatgggaaggctagggaataacattaacatccacacactgtatactgtgctctctgcttgatgctttgcccacagtgataatttcttcatatagtgcaatgtagtttgtaagctggttttaaatccatgagatctcaagtactctctgccttataggacagatgtagatacggttttggtctttctgtttttacagttttataagagtacaagtgatgctgttttatttgaagcctgagagcttctggttccataaccagaaattgctacctggctcttctaatggaatggagggcttttccattcttagaccatccaactctgaacttgctccgaatctcaaacctttctgttcacagaacaaacgctcaagggctttcaagagtgtttctgtagattaggcttattagcatcaacttcatgacttctaaaatgtgactgctttcatgtccagatagcttgaatacaggtatctaccagtgatatggggtggagaattaataatgcttggttacataaagtcagtgttgcttatttttcaaaactttttttttttttttttttaccaattatgttattcccttctccccaagaagtgggcagaaaagctttgttaacctccttttacagatgaagaaaaacaagatcagaggtgctaagtgctgtagcctagtgccaggtcttctggccccaattctgggttctccccaagcccatgcttcttccactttctcacaatctttacttcttcctctgaccctcaccaccacccaaaatacttttaattctggaaaagaaacccagctgcacactggcacacttgaccttcatgcagtcagaagctttggctgattccccatccaaaatattagagatgaaatgaaagcaaagtaggcatctgacaaaagttgctttttcccttctgcattttaggacctcaagtaatgtttatccagaaactgctatcataccagggattcattgtgtatttaacaacataggcatgcaatctggcaaatttgaaaaactcttaacatacaccccaaatccctgcccaaatttaagaactagggtggacacagtgcgtttttccatgtcgcatcttctgtgatggggctacgatacgtgggagcagagaatggggagggtggagcgcatgccagatgaggatctatcagcaatgggacggggcctccactttagcatctccaccctgctcctctcagaggaccgcctttcattgcattcagctgtgatggtagcacgaacacaggtgcaccgaggacgaggagagcaggagccttgtgctctctctgcatctgaggcaggacagcacagggtacggagcagtctgcagagaggccagctcatcagggaagcacttgtcttccaccttgggctttgactgagcactgggcaattggcctctggggatcaacgaaataatcctaaacagagttactctatgtcacactatggaatgttccaagtaggtggccgtgttttcaaaagatgtattttctccttttgttgttgccatttcataggtttaggattgggtgtgtgtttctcctctctgaatggcactcgaatgtttgctgactcctactctgtgtgactggggtgtacagctatggactgatgcatcccatcccatcatctttcatgatcaaagcagtctcttcttttttcctcggccgattcagcacccgggcctcgtactatgccttcatgaagatgttacaagcccggaagcagcacatgagcactgagctgactattgagtcggaggcgccctcagacagcagtggcatcaacttgtcaggctttgggagtgagcagctagacaccaatgacgagagtgatgttagcagcgcactaagttacatcttgccttatctctcactgagaaatctaggtgcagaatcaatattgttaccgttcactgaacagctattttcaaatgtacaagatggagataggctcctgagtattttgaaaaacaatagaaagagcccctcacagtccagccttctaggtaacaaatttaaaaacaaaatatttgaaaaaaaaattagaaactgcgcaaccacaggaaaaccgcctggcaaagattcaaagtgtaggcaaaaacctgcagagagtgaacagagtcctcatgggcccaaggagcatccaggaaaggcacttcaaaaaggtgggaaagcacagcactaggaaagaacaggatgcccaggcatttgtggacaatgctgccaaaggaaaaaggcttgagggtccagccccaagggagctggaacagcctcacatagtgcaggggcctgagaaggtagtgggaaacaccatctacaccaagccttcattcacccaagagcataaggcagcagtctcctctgtgctgaaacccttctccatgggcgtgccttctgcctctagccctgcaaaagccctacctcaggtcagagacagatcgaaagacttagcctacaccattttaattttagaaatggcaatggctagagtgaaaaacatgaaggctgctaaaccaatcacacattccagaaaaaaatagcgcttttataaaactcactccattgtggcccacagaacacccaaggccaaaaagattagaaagtttagaaagggcagttatctcaacagaccgatgctcgcaaagaggccgctgttctctgcagcaaagagcctcatacattcgcaagggattttttcatccttaggagacctgagtcctcaagaaaaccctcttctgggaagtagttgctccttcagaacgttttacagaaaacactaatgtaaaagacacaactaatgtaaagacacaaagagatgtgttcaaagacactctctgaaaaccaaatacaatcatctctggaggaggtcctccgctgggactgcattcaacttagaaccaactgttaaacaaactgagacaaaatgggaatacaacaatgtgggcattgacttgtcccctgagcccaaaagcttcaattacccattgctctcgtccccaggtgatcagcttgaaattcagctaaccgagcagctacggtccctcatccccaacgaggatgtgagaaagttcatgtctcatgttatctggaccttgaaaatggaatgttcagaaacacatgtgcaagggagctgtgccaagctcatgtcgcgaacaggcctcctgatgaagcttctcagcgagcagcaggaagcaaaggcattgaatgtagaatgggatacggaccaacagaaaacaaattatattaatgagaacatggaacagaatgaacagaaagagcagaagtcaagtgagctcacgaaagaagttccaggatatggctataacaacaaactaatcttggtgatatctgtgactgtaatactaacgattttgattctaattttttgtcttattgaggtaaggacaataattaattcaggttttcagaaagcaatcctgtctttgtgtggattcagaacccacaaactgaaaaccaaagccacttccccacttgacattcttcttcagtcgtttaaggctgaggtatgctttgttcttttactgcagtgtatattccaggatttttaaaggatcctcgcttccaagagatctcaagtcacccttactctgccactaatttatttccttgttgctgaaatgatgagagatgtataaatctccaccctcacggagttgtcatcacccctgagtcccagctgctcaggaggccgaggtgggaggatccttggagccagcn

SEQ ID NO: 13494 - DNA, 1946 bp, Homo sapiens
  misc_feature 1, 2, 37, 83, 278, 1943, 1944, 1945, 1946: n = A,T,C or G
nngcagaatcaatagctgctgccaactccgcagaatntgatcggctcttttttgcaagctgcttatatggtctggtcaggccntccccaacagctgtagcctatgtttctcaagaggaaagtagatttatgctgtacattgagctgtagagctagattcgcttactgtgagctgtgaaccttgttgcttttacccagagtctgatggcagtgactgtgatcaagggatcttcaccgccacaagtgcatgcagcaggtgtgttcaggtccccccccacnccactgtgctcctttgaagccaacgtgcctccctcgcctccatactggagggacgacgcaggggagaacagagaagtgcttggccctaggattgaggcacttgtttcctagcccgctgggttagggctggtgcaagcgaggcaatgttgaggatgctttaagcactaccagccgaatccgggaactctgttaacagttgtccaaccagcagaatgaggctaactgtataaagcatgggacccaggatgaggataaggaaaggacagcggctttccctgggcagtacaatggcttgaaggcaaaaagggataaagtgacagccgactgtgactctggtgaggaggggtgagcagggaggttgattctctgatgttaactaagtggcaaagtctcaaccgtgctcagccctccccaatccagggaagagaaacaaagattcaaagtaagcatgatactagtgggtttaccagtgtttcttccaaggagacatatattttttaataaacgatagttgcaatgaactgtggctcagagaccttcttaaagtagttgagaagggagggcgtgggcaaagcagtgggaagaacatcccaaacttttgggggccagagggctctctccttagtgatgatcagctagccgagctgggccgtcctggggatcggtacagctccctggggtggtgacaggccctttgtgaaagttgtgtgcttggtcttccaccccagccccagacactgcttcaaatagcaccaaccagatgggagtccacatctgtggtggcaaaatgctgacattttcccaagaggtacacaaggtgggagaggcctgctgtagcagaggtgtgtgttagagaaagcaggggcctgatttagtagcagagaactgggtgagaaaaatggccagagaaagtgacctgccagctaccagtgtttccgaaaatgagggtgggatgggcccatttgcagagcaggacagcagtcatccccatagccctctgaggaggggagggatgcttagagcaggcagttctggcagttctgacgtggcaggtgccattgcaacttgtgcggaggagtcttaggaagtgctgtcataattcataaggtcaagagcaacatctggatgaatgagccacctgaaatgtgtgtgggctgagccacaggaagggtgagtcctcttgcttgtggtgctttatggtgtgcaggttgcttgctttcccacattctctcatttgcttgaaggcagcctaacaaaagggagtccccaaagagctccatgagagcttaagaaaattcatctcctgaggacaaagagaacaaagatctgtcctgtggtcacactgttgaggctctgtcttcacagctgatgttctcctagtggaggtacagctgaagaacattcagccccagcacgagaagatacagagcaacttggaaaccccaaagggagacacacccttaacactgccgtgctgtgctgtgccgtgtcctgaaggaggagagagccctatctcctcctggttttgttgctgacattgcagctgatcatgccttgactccttcatctctaacagaggaagaactgtattatcaaaccttatggtctacccatgaataaataaaatatttgttcaagcgcattttataaatgaaaaaatgaaannnn

SEQ ID NO: 13495 - DNA, 556 bp, Homo sapiens
  misc_feature 556: n = A,T,C or G
acacgggggaggttaatttctttttctgtttgaaaagagtggatgttggtagacactggtcgtttctattacggcctcctgtaattttagaaaaccgatatttgtcatgacctgaggaaacatctcattcatggcttttataagacatagtcaaattcagcatcaactctcagaagatctttcttggagtctagaagaagaaatacagaaaggggtttattgatgtttcaaaaatcaagtgtgtggaaatagtgaagaatgatgatggtgtcattccctgtcaaaataagtatccatttcaggttgttcatgatgctaacacactttacatttttgcacctagtccacaaagcagggacctgtgggtgaagaagttaaaagaagaaataaagaacaacaataatattatgattaaatatcatcctaaattctggacagatggaagttatcagtgttgtagacaaactgaaaaattagcacccggatgtgaaaaatacaatctttttgagagcagtataagaaaagcactacctccagcaccagaaacaaagaagcn

SEQ ID NO: 13496 - DNA, 2804 bp, Homo sapiens
  misc_feature 1, 2, 3, 4, 5, 2802, 2803, 2804: n = A,T,C or G
nnnnnctgatagtccctacctgtcaggactggtgttaggatgagataatgtttgtgaactgtaaacatatataaacgtgtgctactgtgagaactggaacaaagaagagagggagtgagagaaatcaagggagggctggggctgggaaagaacgaaaagggagtcgcgtatagaggagaggcgacagtcgcgagccacactttgcaatgaaactctttagactttctgccgggagagcggcccagacgcgccaggtctgtagcaggaggccgcgagggcgggtccccagaagcctacaggtgagtatcggttctccccttcccggctttcggtccggaggaggcgggagcagcttccctgttctgatcctatcgcgggcggcgcagggccggcttggccttccgtgggacggggaggggggcgggatgtgtcacccaaataccagtggggacggtcggtggtggaaccagccgggcaggtcgggtagagtataagagccggagggagcggccgggcggcagacgcctgcagaccatcccagacgccggagcccgagccccgacgagtccccgcgcctcatccgcccgcgtccggtccgcgttcctccgccccaccatggctcggggccccggcctcgcgccgccaccgctgcggctgccgctgctgctgctggtgctggcggcggtgaccggccacacggccgcgcaggacaactgcacgtgtcccaccaacaagatgaccgtgtgcagccccgacggccccggcggccgctgccagtgccgcgcgctgggctcgggcatggcggtcgactgctccacgctgacctccaagtgtctgctgctcaaggcgcgcatgagcgcccccaagaacgcccgcacgctggtgcggccgagtgagcacgcgctcgtggacaacgatggcctctacgaccccgactgcgaccccgagggccgcttcaaggcgcgccagtgcaaccagacgtcggtgtgctggtgcgtgaactcggtgggcgtgcgccgcacggacaagggcgacctgagcctacgctgcgatgagctggtgcgcacccaccacatcctcattgacctgcgccaccgccccaccgccggcgccttcaaccactcagacctggacgccgagctgaggcggctcttccgcgagcgctatcggctgcaccccaagttcgtggcggccgtgcactacgagcagcccaccatccagatcgagctgcggcagaacacgtctcagaaggccgccggtgacgtggatatcggcgatgccgcctactacttcgagagggacatcaagggcgagtctctattccagggccgcggcggcctggacttgcgcgtgcgcggagaacccctgcaggtggagcgcacgctcatctattacctggacgagattcccccgaagttctccatgaagcgcctcaccgccggcctcatcgccgtcatcgtggtggtcgtggtggccctcgtcgccggcatggccgtcctggtgatcaccaaccggagaaagtcggggaagtacaagaaggtggagatcaaggaactgggggagttgagaaaggaaccgagcttgtaggtacccggcggggcaggggatggggtggggtaccggatttcggtatcgtcccagacccaagtgagtcacgcttcctgattcctcggcgcaaaggagacgtttatcctttcaaattcctgccttccccctcccttttgcgcacacaccaggtttaatagatcctggcctcagggtctcctttctttctcacttctgtcttgaaggaagcatttctaaaatgtatcccctttcggtccaacaacaggaaacctgactggggcagtgaaggaagggatggcatagcgttatgtgtaaaaaacaagtatctgtatgacaacccgggatcgtttgcaagtaactgaatccattgcgacattgtgaaggcttaaatgagtttagatgggaaatagcgttgttatcgccttgggtttaaattatttgatgagttccacttgtatcatggcctacccgaggagaagaggagtttgttaactgggcctatgtagtagcctcatttaccatcgtttgtattactgaccacatatgcttgtcactgggaaagaagcctgtttcagctgcctgaacgcagtttggatgtctttgaggacagacattgcccggaaactcagtctatttattcttcagcttgcccttactgccactgatattggtaatgttcttttttgtaaaatgtttgtacatatgttgtctttgataatgttgctgtaattttttaaaataaaacacgaatttaataaaatatgggaaaggcaaaaaaaaaaaaaaacaaatgtgaaaagtccctccagatttctatcactttggtctctaatttcccaagacttgtattttttttttatttcaaattataacacttttttttcccccagaagtgggtgtttcatgttgctactctggtgtgtcccaagatatcctaactggccagtgtaaatgctattctttctaaataagattatttggaaacttccttcaaactgcaggagggcgagctctgagggcacgagaagctaaaactagctgcttttgatgaaaaagagtgccagtctttggtcatctctaaacaaggcttatcaccaatggagacagaaaactctagttcaagagctgtacctcctttgaatcccagccctactcgaaataagtggtactatttccatttagcctttgagcaaatcacttaactcaaaggcgttgtggctctaagattaaacgacnnn

SEQ ID NO: 13497 - DNA, 1099 bp, Homo sapiens
attgtgctgcaaggcgattaagttgggtaacggcagggttttcccagtcacgacgttgtaaaacgacggccagtgaattgtaaaccgactcacattagggcgaattgggtaccgggccccccctcgagtttttttataattattttttttttttttcctttgccaaaataaggttttattttgaaagtcatttgatgaaagtcatttgaaagacactgaggagggaaggaggcctaagacccaacagatgtaggatccagatctggattcgtgccagccccaccaatggtctgtcaggccaagaaggtgctttctttggtaattcatgttttttaacttcctggagaagagatcttttcccacaagccatcttcattttttttgtagagtagggctttatttccagaaaacagtgtgtgagctggagatgggtgtttttttaaaaacatcaaggtagatctaatatgttcaacaaagtggggtggctcagccagaggcgaagtggaaagattctctagtatttgcttgtcatcttggtgcaaccagaaatccacatgtggaaatggtgtccaggagtacggtcctatacgaagttgttctgtctctgcatcataaatgctaatcattggtcctcctgctaaagttcgcgcagcacgaagctgctcctccggaccccgatcttgaaaggatgctctgtaaatctctgcagtcttaatgttgacagcaatgccatatattactggaaagtggttttcgttttcttcccggtcatttaattctgtcacacataatgtcactaagtgaatgtcatcttcttgcctgtcaaattcactaagaagttgatgagtgagtttttgtgacaactgcctgtcgtcactgaagcctccaacaaggtgtacttccagccttccacattgagcgtggtcagaaaaggattttatggagttcatgatcaaggggacctcagctttggtgtcggttccgtcacaatgtgtcaagcaggtggccccattacctccaaaggcgggtgggctcggacgaggtccccggctgactgcggcagccgcactcgccgcccctcgacgagcagcggcatcgc

SEQ ID NO: 13498 - DNA, 1395 bp, Homo sapiens
  misc_feature 1, 2, 3, 1377, 1378, 1379, 1380, 1381, 1382, 1383, 1384,1385, 1386, 1387, 1388, 1389, 1390, 1391, 1392, 1393, 1394,1395: n = A,T,C or G
nnnaaggcagttcctgaaagtgggacgtagagctaccatgtgacccagcatttccaccctgaggggacactcagaagacagggcagatccccagtgacatctctttcccgttggggtttgcttttgtcacagtctccaatagaggtcatcattcctggtgccagaccagctacgatattaccatgcgtgtagcgttttacccgtgctggtatagaggactctaagaagtggggcatgctgtttctggtgaaccagctgtttaaaatctacttcaagatcaacaaactccatttatgtaaacccctaattagagcaattgacagctcaaacctgaaagacgattacagcactgcacagagagtaacatacaaatactacgttggacgcaaggctatgtttgacagcgattttaagcaagctgaggagtacctgtcatttgcctttgagcattgtcaccgttctagtcagaagaacaaaaggatgattctgatctatttgcttccagtaaaaatgctattgggtcacatgcccactgtggagctcctgaaaaagtatcacctgatgcagtttgcggaagtaaccagagctgtgagcgagggcaacctgctgctgctgcacgaggcgctggcgaagcacgaggccttcttcattcgctgcggaatcttcctcatcctggagaagctgaagatcatcacctacaggaacctctttaagaaagtgtatttgttactgaaaacacaccagctgtctctggatgcttttctggttgccttgaagttcatgcaggtggaggacgtggacattgacgaagttcagtgtattctggctaacttgatatacatgggacacgtcaaaggctacatatcgcatcagcatcagaagctggtggtcagcaagcagaacccatttcctcccctgtccacggtgtgttgaaagtacacggagccccgaggacggcctgatgaaaacctggaattcctttttcacagactcggctggttctggagtctttgtgagacttctttgaaggaggctttgcgtgaaggctgctcggctcacttttcctaagtgtggttcctgaaggctgtctttgtaactttttgtagttctttgtgtaaaaagcgtattctgaatttatacacatggcatgttcttcattatatcttccaggatacatctatttttatatattaaatttgaatgtgttatcaaaatgcttggttaacttaaggcacctttttaaaagcagaatttaatttgatttaaattttccagattttatagcttgcctgtatggatgctcctcaatttatgatggggttacatcccaataaacttattttatttgcaaaaaaaaaaaaaaaaaaaaaaaaaaannnnnnnnnnnnnnnnnnn

SEQ ID NO: 13499 - DNA, 1408 bp, Homo sapiens
tcgacccacgcgtccgcccacgcgtccgggaacggcagtgatcacacgtcggctgctgggaagatctggattctcgtttcaggtcaccatcagaaaagctaagtttgctgtatagtgaggatcaggagatctgatcctgattgcagaaccttccctgattacagaatcttggatgatttcacaaaagttcatcttcattgcagatacctgcctttctttctaggttgtatctcccacttcacccttctagaccatcccagaagatctataagatttcatctgggaaatcactaggagttcttggaagggaaagaaggaagattgttggttggaataaaaacagggttgaatgagttccagaaagcagggttctcaacctcgtggacagcaatctgcagaagaagagaacttcaaaaaaccaactagaagcaacatgcagagaagtaaaatgagaggggcctcctcaggaaagaagacagctggtccacagcagaaaaatcttgaaccagctctcccaggaagatggggtggtcgctctgcagagaaccccccttcaggatccgtgaggaagaccagaaagaacaagcagaagactcctggaaacggagatggtggcagtaccagcgaagcacctcagccccctcgggaagaaaagggcccgggcagaccccactgttgaaagtgaggaggcgtttaagaatagaatggaggttaaagtgaagattcctgaaagaattaaaaccatggcttgttgaggactggggacttagttaccaggcagaagcagctgtttcaactccctgccaagaacacatgttgatgcaaattctggaggagtatgcaatggccagacaatcgcagcgcacactgttcgataataaggcatatgcggtataatgaacgtgtggcaggaatcaaagaatatctcaactgtcgctgtcgggcactcagctgctctacaatttgagaaggcccagtatagctgaaatcctactgggtacaccttgatgctccaatgtcccagagttatgtgagcaccaaacctatctgaaatatcggagcactggcgcaattgttgccctatagcccctgttgcaaaacccgccaaacgcgcaacaagataatcccaaaaatcttggcccacaatatgcgcacctcccaacgcgacgtttcacaagggcctcgtgtatacaccaaaacactagtgcgacaacagccacacacatgcagcgcagacacctaggggcagcctcttcagaaaagaagaatccaccacagcaacaacacgagtccggtgatcaacaagcatcaccaccttaaaaacaggatgaaaaaaaacatctaaagacgcacacacacttgacgcttctcgcttttgttttgtctttctctcccccacaaccccaca

SEQ ID NO: 13500 - DNA, 2299 bp, Homo sapiens
  misc_feature 2297, 2298, 2299: n = A,T,C or G
cgtccggtaatggcgtcgctcggggtcccgggaaattgctccgtgggctttcagcggcggtttttatcgccggccggggtgtgcctgtctgcggctcgcctctcctccgggaccgtaaagctgctgccgtgatttatcctccccttctcccaaatccgattaaatggaggagctcggggcccgggcgccgcggggcccgggagccgggagggggcggcgggaaggacggggccaaggaggggaggacaaacggcccctcagagggtggcggatttgcctttatttacagccgcggctttctttttattttttattttttatggggtttggtgagcttttcccgtctttctcgtgctgcgttcaagcacgatgcagggacggcaggggtttggaactggataggccttgtcgccctgttccaaagggcagggcaggtcctgtctgggagacaaggaggcctaggaaagatgagggccaggaagcctcccccacctccttccatcaggggaagggcgagcgaaaggggagagaaaacccacgttcaggagagcatgggggcgggaggggagggcgctgcttatcccaactcgcgtagttgaaacctgagcagaggctcgggcaagcctggagtgacctcgcaaccttacagcgggtcgcaggtgcccgttattcctagactgtcccaggagccaggaaagagggattcggatcatatttaaccctatcttctggctcgctgatgctgcttctctcatggtttatcaccggaatggaaaggaggaaacggggagtgggggaaagggcgaaccaccagaagcagctgcggcattttgctgactattcgcccatggagccggtttgccatccagtgatgccagagtcccggcgcgacagaaagcaggactcccaagatcttcctcctgctgcattttaggcactgaaccccaatcccgaccgtatgttaacactgaattctgagtaggagttttgttttggcagtgtgacgactgcgcatgctcggaaaggggacgcaagtccgacgatcccaaacgcggtacagaccaaaccgcagtccacgttacggatcggcttactccgcggagttggcctcatttctgcacagtcggcgctccctgtagtttctcctctcgaacgccaggtggagcaaccggccggataccgccacagccctggcaggcggcgctgtgatgcctgagctgatcctgtatgttgcaatcactctatccgtggctgagcgactcgttggcccgggtcacgcatgcgctgagccttcctttcgctcttcccgctgctccgcccctctctgtcttctctgcagtgggagcagctctcctgccacagctcctcaccccctgaaaatgttcgcctgctccaagtttgtctccactccctccttggtcaagagcacctcacagctgctgagccgtccgctatctgcagtggtgctgaaacgaccggagatactgacagatgagagcctcagcagcttggcagtctcatgtccccttacctcacttgtctctagccgcagcttccaaaccagcgccatttcaagggacatcgacacagcagccaagttcattggagctggggctgccacagttggggtggctggttctggggctgggattggaactgtgtttgggagcctcatcattggttatgccaggaacccttctctgaagcaacagctcttctcctacgccattctgggctttgccctctcggaggccatggggctcttttgtctgatggtagcctttctcatcctctttgccatgtgaaggagccgtctccacctcccatagttctcccgcgtctggttggccccgtgtgttccttttcctatacctccccaggcagcctggggaacgtggttggctcagggtttgacagagaaaagacaaataaatactgtattaataagaaaacaaaacaaaaaaacacacaaaaactgtgggcggcccgcggacggaaaaagtaacacctcggggccgcccaagaaccggacacggaccacgtaccgcgccaagcaagcccgaggctcaccagcgggtgggggccaaaaggcgaccgcggccgcgtcccaaggcggcgcgcacaggccagcgacccgccaacccgcaagagtataaaagagggaccaaacaacgcgtagaaacaaccgggaggcgggcaaaaacaaacgaagaacgcagcatgcaggcagcgaacgagaggccacagccaacgaggacacacccacacaaagatagaagggacaaaaagcaatatannn

SEQ ID NO: 13501 - DNA, 931 bp, Homo sapiens
  misc_feature 925, 926, 927, 928, 929, 930, 931: n = A,T,C or G
agtacttctagaattaattaaggcgggggcagcagagcaggtaacagctcttgcacctgtttctcttgcacctgacgtgcagctgctcctacccacctctcctggctgagccttgcctgatacagcagcccggaggcaccacttgcttcccgagtctcaccctcccaggcagctcctacactcaactgcttctctaggaaaggtctcacctccagcctggagcagtcgggattacagaaagccccatccttggcttagggagcgccatgacgactgaaattggttggtggaagctgactttcctccggaaaaagaaatccactcccaaagtgctgtatgagatccctgacacctatgcccaaacagagggagatgcagaacccccgaggcctgacgctggaggccccaacagcgactttaacacccgcctggagaagattgtggacaagagcacaaagggcaagcacgtcaaggtctccaactcaggacgcttcaaggagaagaagaaagtgagagccacgctggcagagaaccctaacctctttgatgatcacgaggcatggacggcactcagagttgaagggctgagtgagtggtgctagcacctcttggtccctgaccatcagccagatctgacgacaaggacctttgcccactgcatggccctcttttgcgccatagcgtggatgcttgctggggcccacgtatgataccctgcttgtgagggaaattggcttgtaacatcaggcgtctcgtcatcagttgttgcgcgcacctatatggtaccgcgtctggtagaatcccagggttccatccaacaccctcccccctttgaccaacaatatacaaaaaggcacccctacagtcccaagacgtggaaaacttcctaccccaggtgcgtgaccggccctctccttaggccagnnnnnnn

SEQ ID NO: 13502 - DNA, 937 bp, Homo sapiens
cgactttttctggttgtcaatgaggatatttattggggtttcatgagtgcagggagaagggctggatgacttgggatggggagagagacccctcccctggggatcctgcagctctagtctcccgtggtggggggtgagggatgagaacctatgaacattctgtaggggccactgtcttctccacggtgctcccttcatgcgtgacctggcagctgtagcttttgtgggacttccacctgctcagggcgtcaggctcaggtagctgctggccgcgtacttgttgttgctttgtttggagggtgtggtggtctccactcccgccttgacggggctgctatctgccttccaggccactgtcacggctcccgggtagaagtcacttatgagacacaccagtgtggccttgttggcttgaagctcctcagaggagggcgggaacagagtgaccgagggggcagccttgggctgacctaggacggtcagcttggtccctccgccgaacaccccctgattgctgctatcataagactgacagtagtagtcagcctcgtcctcagtcttcagtccagagatggtgagggaggcagagttggaggagctgtcgatggagccagagaaccgatcagggaccccagagactctttggttatcctcatagatcacagtggtgggggcactgcccgggcgctgctgataccactgcacatagttgctggcaatgttgccactgctgcgggtgcaggagatggttaccgtcttccccggagactccgacacagagtggggctgagtcagcataaaattggcccaagaacctgtgcagtgagcgaggagggtgagaagtagtggagcccaggccatagtggagatgctccaggctctgcttcctgagctaccaccaggactgatccccccgcgtacctcggccgccaccgcg

SEQ ID NO: 13503 - DNA, 996 bp, Homo sapiens
ctatagggagtcgacccacgcgtccggtggtggcttcggcagcggcttcagcagatcggcggcatcagcggtagcaccagcactagcagcatgttgagccgggcagtgtgcggcaccagcaggcagctggctccggctttggggtatctgggctccaggcagaagcacagcctccccgacctgccctacgactacggcgccctggaacctcacatcaacgcgcagatcatgcagctgcaccacagcaagcaccacgcggcctacgtgaacaacctgaacgtcaccgaggagaagtaccaggaggcgttggccaagggagatgttacagcccagatagctcttcagcctgcactgaagttcaatggtggtggtcatatcaatcatagcattttctggacaaacctcagccctaacggtggtggagaacccaaaggggagttgctggaagccatcaaacgtgactttggttcctttgacaagtttaaggagaagctgacggctgcatctgttggtgtccaaggctcaggttggggttggcttggtttcaataaggaacggggacacttacaaattgctgcttgtccaaatcaggatccactgcaaggaacaacaggccttattccactgctggggattgatgtgtgggagcacgcttactaccttcagtataaaaatgtcaggcctgattatctaaaagctatttggaatgtaatcaactgggagaatgtaactgaaagatacatggcttgcaaaaagtaaaccacgatcgttatgctgatcataccctaatgatcccagcaagataatgtcctgtcttctaagatgtgcatcaagcctggtacatactgaaaaccctataaggtcctggataatttttgtttgattattcattgaagaaacatttattttccaattgtgtgaagtttttgactgttaataaaagaatctgtcaaccatcaaaaaaaaaaaaaaaaaaagatctttaattaagcggcc

SEQ ID NO: 13504 - DNA, 906 bp, Homo sapiens
  misc_feature 905, 906: n = A,T,C or G
tttggccctcgaggccaagaattcggcccgccggcgaaagcctctccacctcttccgagcggggtcacggcccggccgtcggtaacctggtttccgagagtgccgggcggtcggcgggtcagggcagcccggggcctgacgccatgtcccggaacctgcgcaccgcgctcattttcggcggcttcatctccctgatcggcgccgccttctatcccatctacttccggcccctaatgagattggaggagtacaagaaggaacaagctataaatcgggctggaattgttcaagaggatgtgcagccaccagggttaaaagtgtggtctgatccatttggcaggaaatgagagggctgtcatcagctctgattaagaaaggagatttcttcatgctttcgattctgcatggggtacagccagtcacctcaccagagaatgacggctggagaagaaaactctgtaataccataaataagagtgcttgtaataaaagactgtgcacaaggattaatatttcccttcttaagtatcaaaagaactctggaacaaattataccattaggaaggttttcatgattcagttgattttccaaaaatgaagctatctcacccagctgggtttggaggagcaatctgcttattattctgtcgttaccacttactcaagcgagctgtgatatgaatacaagcaaccagtgggctcgggaaggtccgggtctcttctgccatcttccagataagagatttcagtaaaaaactgccatgctgagctgccttatagagctcttcgaaaatgttcgagttgataaagctctttgaggacaaggtacttcgggccccctcatgctggagattgcgctgttgaaattatttgaccagtcctaatgctatctgtgtaaaccctann

SEQ ID NO: 13505 - DNA, 1015 bp, Homo sapiens
  misc_feature 1, 1009, 1010, 1011, 1012, 1013, 1014, 1015: n = A,T,C or G
ngcgcagtggaggcggccaggcccgccttccgcagggtgtcgccgctgtgccgctagcggtgccccgcctgctgcggtggcaccagccaggaggcggagtggaagtggccgtggggcgggtatgggactagctggcgtgtgcgccctgagacgctcagcgggctatatactcgtcggtggggccggcggtcagtctgcggcagcggcagcaagacggtgcagtgaaggagagtgggcgtctggcggggtccgcagtttcagcagagccgctgcagccatggccccaatcaaggttcggctcctggctgatcccactggggcctttgggaaggagacagacttattactagatgattcgctggtgtccatctttgggaatcgacgtctcaagaggttctccatggtggtacaggatggcatagtgaaggccctgaatgtggaaccagatggcacaggcctcacctgcagcctggcacccaatatcatctcacagctctgaggccctgggccagattacttcctccacccctccctatctcacctgcccagccctgtgctggggccctgcaattggaatgttggccagatttctgcaataaacacttgtggtttgcggccaaaaaaaaaacaaaaaacagaaaaaaaaaaaaataaaaaaacctaaaaaaaagaaaacaaaaaaaaaaaagaggggggggggcacaaaaaacaatatacccggcgaggggcaaagcataggcacgcccacgcacatccgacgacaagagaccaaccaaaaggaacggagaacaaaaagacaggcgacgagccgccggcggacataaaaccacacagccgcagaacacaacgtaacgcctcgacatcgggaggaacagcacatcgatcggggggtgacaacagtgagcaaccaccaccacagcaagaacaagccccgcggccacaacacacacgcgtgcatagggaaaccacagagagtgcggagcagagagacacgaacagagcacactannnnnnn

SEQ ID NO: 13506 - DNA, 3173 bp, Homo sapiens
tcctgggggggttatttttttgggtgtgtgtgtgtgtgtattgtgccttagaaaggttgcagatttcatcttcacctaccaagaggcggccgcctccttggacaagccgctcatggaccattagacttgagaagacgacccacgtggtgactgcaaagccctgggtacttgccttcatgttctggtttggttttccctttttctgctgctcttggcagcagcctggtcatcatctgcttgtgggagtgggaaatgggtattttagacccaacacaggttctaaatttaaaacaaataataattggaacaaataaaggttcttgtacccagagtgattctacatgggaaaaacaaaccagcttttttcagagagtgaccgaataggaagaagggattcagaaatatgatgtagtagaacatgccctgcaggaagaaaatgttttctctcctgcgtatgttaagaggaaatcagtttaaaatgcctgctaatcaaatgtcgactcagctaaccatatgtccaggttgctgcagagtttctttcaaatctgagtgttgcctgctgaactcggaggggagtttggagaaattttagacagcagctctgtgttctttttttgccgcagccaataagataatagcagaattagccaatcctaaaaccttctaaagacgatttttgagcatcccactgggattatttaatttttctttttgacgtgtgtttttagtttagaagtgctgtattccacaaggtttaagtcagtgaggttggaagataccctatcttttttattcaaaaagcacaatcaatcttttgtttgaaaatctatataaagtacaacttgcttttagcatgattattttcctaaataaaaagacaaagaatttacttactttatgttaattacgggcatgaagcaaaaggttttctttaaaaaaaaaaaaaagtgcagtgatgtagggctgtggttagttaaccgtactgagttatccatctagcatctgtggcttgctggaagggtagtattaactatttaacatgtaatggtgtacttcactcttacctagcacgctgtcttctcattgctttgggggagggagggtctctctgctggcactgtctaacttgcttacctgctgactttgcagtttgcttgtgctatgacatttattgtaggtgctatttagggtaggcttaaagtgctgggtggtgatttgagttcaaacaataaaaaattgtattttttcaatattgtataaacaatagtgttctaattaccttaaaaaaaaaataatgaccagttaagaattgcttttgatcttgtcaaaaaactgaatagaccccagtttcgggaaggtgtgtgagcagtgccatgactctgccccttacctaatcccacatctctctaatgataagacattggctcgcctctgaccagagccccagcaccagagagcggaagatgcagaattgtcaaatgacctgctgggggaggttgtaggagtttagcagatttgagtgtggctgcagagagagagagagtgtgtgtatgtgtgcacatgtgtgagagtgtgagcgagagtgtgtgtgtgtccatctaagtctgtgtgatgaaggtgggataaggctcctctgttagtgctggaagctcctgtaattgccgcatggatcccactgtgccctcttgttctgtgcaagtctgtcctgtctgggcactaaccttggtcccatgcatgtttatgttctgggtggggctttgcctctccactgggaaactgacttttgctgggttgaacagagtcccttatgctttttgtcctctccctgcgcctgggagaggtgggagtaggagcccaaacacacaggtacagaaagatctggaagaaggcctggcagtgaatccaaggactctgggcccccaacaatagatggtagcgtaagtctggagcagcggtgttttcaccaccaaatgcctttccaggctgcccttccaacactcaggagagcatccagatccctgggcagaggctctacattcttggctttagaggtggtggcagcggcagcaggtcagagccacttctggcggtttccctcccctttttagtgcccatagtttttggatcctcccttgagttttaccagcacaagccattctttgcccctgttcacataactgagctcaagctcttgccaaacaccaacaagcaagatggttgcaacctggcaacattgaatccaccacccttgggctccctctggaagccccagcaccggggggcttttgggcacagggtcagtggtagccatcttagacactgacatttggctttgtcgtcaatttcatcaccctccttgaggttactgtgcagtttcaaccagcattttatcctagtgaggtcattatcaggagttgccatatcatctctccagtacctaacatttctcatccacttcaaaagctgttctgactgccagctggctgatctaagctcctgaggaatgtctcctctcaaaggaatttttccctccaaaggccccctgaagtcctagttggcattggcctggcacatgctttatgttaggcctcccgttgggatggctgagaatcatgaaagacagatcctccgctagcctctgtgggtcaagtttctggacaccaagtctctgggaactagtgtttgattttaaatgggcatgtggcccttccttgtttcagtgacttagaaaagtaaaagccatttaaaaaagttagcaagattttttatcgacttcccaactggggcttccagccttgttgaatgaaatcatctatctctgattgggcgcaacgaactgcatttctttggacttctgaatccatgtttgtgctttctctggcccgtgaacacctcggcgattctgttagggatgggatgagtgggaggaagccctttgagaagggggagccggccctgtcatgcgcaggttttccactcatctgaggaagagccagggctctgaattatcgcctatttttcctcgccctgtctcctcccttccacctttctccttgcattgtgatgatctagtaggcacgtctgtcaacaggacacatgcctcctctgactataacctcttaatagttgtgtataatgaaaactgtaaacttttttaaataaacgtgtatata

SEQ ID NO: 13507 - DNA, 1189 bp, Homo sapiens
  misc_feature 1, 1188, 1189: n = A,T,C or G
ncaacgccggggcagagtcttaaaaccgagggcccgcaggggtccccgcggccgccgcgatgcagaaatacgagaaactggaaaagattggggaaggcacctacggaactgtgttcaaggccaaaaaccgggagactcatgagatcgtggctctgaaacgggtgaggctggatgacgatgatgagggtgtgccgagttccgccctccgggagatctgcctactcaaggagctgaagcacaagaacatcgtcaggcttcatgacgtcctgcacagcgacaagaagctgactttggtttttgaattctgtgaccaggacctgaagaagtattttgacagttgcaatggtgacctcgatcctgagattgtaaagtcattcctcttccagctactaaaagggctgggattctgtcatagccgcaatgtgctacacagggacctgaagccccagaacctgctaataaacaggaatggggagctgaaattggctgattttggcctggctcgagcctttgggattcccgtccgctgttactcagctgaggtggtcacactgtggtaccgcccaccggatgtcctctttggggccaagctgtactccacgtccatcgacatgtggtcagccggctgcatctttgcagagctggccaatgctgggcggcctctttttcccggcaatgatgtcgatgaccagttgaagaggatcttccgactgctggggacgcccaccgaggagcagtggccctctatgaccaagctgccagactataagccctatccgatgtacccggccacaacatccctggtgaacgtcgtgcccaaactcaatgccacagggagggatctgctgcagaaccttctgaagtgtaaccctgtccagcgtatctcagcagaagaggccctgcagcacccttattctccgactttgtccgccctaggcccgggaccccgggcctccaagaggggggcgggcgaataatgaccccctgttagatgtggtgaaacaggaggagacgtaggtgtcagtgctcaccagtgtgtaccaccgagggggggtggtggggaccaaaactaacaccctgagcgaggggaataataagggcgccgccaccagaaatagaaaacaacgcgttctgctgggcggggaaaggagtgagccgctagtctgcgagtaagatagactagctacnn

SEQ ID NO: 13508 - DNA, 7356 bp, Homo sapiens
  misc_feature 5162, 7353, 7354, 7355, 7356: n = A,T,C or G
gcgctctctctacagcgctaaagccgggactggaccgagcggagttgtgcgtgtcgccgaaggggggtgggccgggggaggggaggttcgttccgcggagccgcagccagaaccgggaccaagaatcgccttcagccctgtctggtgcatccttggcagaaagtgaggaggaaaacacccccattgttagatgaggtcttaatcatggaacatttgaagtcacgtaaagaaggttctttggcatggacacaagttcagtgggaggattagaattgactgatcagactcctgttttattagggagtacggccatggcaactagtctcacgaatgtaggaaactcatttagtggtccagctaatcctttagtgtctagatctaataagtttcagaactcgtcagtggaagatgatgatgatgttgtttttatcgaacctgtacaacctcccccaccttctgtaccagtggtagctgatcaaagaaccataacatttacatcatcaaaaaatgaagaactacaaggaaatgattccaaaattactccttcctcaaaagagttggcatctcagaagggaagtgtaagtgagacaattgtcattgatgatgaagaggacatggaaacaaatcaagggcaagagaaaaattcctccaattttattgaacgaagacctcctgagactaaaaacagaaccaatgatgtggatttctccacttccagtttttcaagaagtaaggtaaatgcaggaatgggtaatagtggtatcaccacagaaccagactctgaaattcagattgctaatgttacaactttagaaacaggtgtaagctctgtgaatgatggccaattagaaaatactgacgggcgagatatgaacttaatgattacacatgtaacatcactgcagaataccaacttgggagatgtctctaacggactgcagtcaagtaattttggtgttaatatacaaacatacaccccatctttaacttcacagaccaagactggagtaggaccttttaatcctggtagaatgaatgtggcaggagacgtttttcagaatggagaatctgcaactcatcataatcctgattcttggatctcccagtcagcttcatttccccgtaatcagaaacaaccaggggtggactctttatcaccagtggcctcacttcctaaacagattttccagccgtctgtccaacagcagcctactaaaccagttaaagtcacttgtgcaaactgcaaaaaacctttacagaagggccagacagcttatcaacgaaaaggatcagctcacctcttttgttctaccacctgcctttcttccttctcccacaagcctgctccaaagaaactctgtgttatgtgtaaaaaagatataactacaatgaaaggaaccattgttgctcaagtggattcaagtgagtccttccaggaattctgtagtacatcttgtttatctctctatgaagacaaacagaatcctactaaaggagctctaaataaatcaagatgtacaatctgtggtaaactaactgagattcgccatgaagtcagctttaaaaatatgactcataagctgtgcagtgaccactgctttaatagatatagaatggccaatggtttaataatgaattgctgtgaacagtgtggagagtacttgcccagtaaaggtgctggaaataatgttctggtgattgatggtcaacagaaaagattttgctgtcaaagttgtgtcagtgaatacaaacaggtaggtagccatccaagcttcctgaaggaggttcgagatcacatgcaggactctttcttaatgcagcctgagaaatatggaaaactgacaacttgtactggttgccgaacacagtgcaggttttttgatatgactcagtgtataggtcctaatggatatatggagccatattgttcaactgcttgtatgaacagtcacaagacaaaatatgcaaaatcacaaagtttgggaattatttgccatttttgtaagcgaaactctttacctcaataccaagccacaatgcctgatggaaaactgtacaacttttgcaattccagttgtgtggctaaatttcaggctctaagtatgcagtcatctccaaatggccagtttgtagcgccaagtgatattcagttgaaatgcaactactgcaaaaattccttttgttcaaaaccagaaatcctggaatgggagaacaaagtgcatcagttctgcagcaaaacttgttcagatgactataagaagttgcattgcatagttacatattgcgaatactgtcaagaggagaagactcttcatgaaacagtaaatttctctggcgttaagagacctttctgtagtgaaggctgcaaattattatacaaacaggattttgccagacgtttaggattgagatgtgttacttgcaactattgttctcagctatgtaagaagggagcaactaaagaactcgatggtgttgtgagagatttctgcagtgaagattgctgtaaaaaatttcaggattggtactacaaggctgcaaggtgtgactgttgtaaatctcaaggaactcttaaagagcgagttcagtggcgtggggaaatgaaacatttctgtgatcaacattgcttactgcgtttctactgtcaacaaaatgagcccaacatgacaactcagaaaggacctgaaaacttacattatgatcagggttgtcagacatctcgaaccaaaatgacaggttcagcaccacccccttctccaacacctaacaaagagatgaagaacaaagcagttctttgcaaacctttaacaatgacaaaagctacttactgtaaacctcacatgcagaccaaatcttgtcagacagatgatacttggaggacagaatatgttccagtgcctatccctgtgcctgtgtatatcccagttcctatgcacatgtacagtcagaatattcctgttcctactacagttcctgttcctgtgccagttcctgtttttctgcctgctccattggacagcagtgagaagattcctgcagcaattgaggagctaaaaagcaaggtttcttcagatgctcttgatacagagttgcttacaatgacggatatgatgagtgaagacgaggggaaaacagagacaaccaacatcaacagtgtaattattgaaacagatataattggttcagaccttttgaagaactctgacccagagacacagtccagcatgcctgatgtaccatatgaaccagatttggatatcgaaatagattttcccagagctgctgaggagcttgatatggaaaatgaatttttattaccacctgtttttggcgaagaatatgaggaacagcccagacctcgatctaaaaaaaagggagccaagagaaaggctgtatcaggataccagtctcatgatgatagttctgacaattcagaatgcagctttcctttcaaatatacgtatggcgtaaatgcatggaaacactgggtcaaaactaggcaacttgatgaagatcttctggtattagatgagttaaaatcttctaaatcagtaaagttaaaagaggatctactctctcacaccacagctgagcttaactatgggttagctcattttgtcaatgagatccgacggccaaatggagagaattatgcacctgacagcatctattacctttgccttggaatacaggagtatttgtgtggaagtaatcgaaaagacaacatatttattgatcctggataccaaacatttgagcaagaattgaataaaatactgcgaagctggcaaccaagcatacttccagatgggtcaatattctctcgagttgaagaagactatctctggaggataaaacaactaggatcacactctccagtagctcttctgaatacactgttctactttaacactaagtattttggcctgaaaacagtggaacaacacttaagactttcctttggcactgtgtttaggcattggaaaaaaaatcctttaacgatggaaaacaaagcgtgtcttcgataccaagtgtcttccttgtgtggaacagataatgaagataaaattactactggaaaaagaaaacatgaagatgatgagccagtatttgaacaaattgaaaacacagccaatccttccagatgtcctgtgaaaatgtttgaatgctacttgtctaaaagtccacagaatcttaatcagaggatggatgttttttatttgcaaccagaatgctctagttctacagatagccctgtctggtatacgtctacttcactggaccgaaacaccttggaaaatatgcttgtacgggttcttctagtaaaagatatttatgataaagacaattatgaactggatgaagacacagactaaaaaggaacgttgcagaagcaatcgggataaaacagcattagatagtcatgctgctagatctttattatggaaaacatttcaagtttactccttctgttttgagttttgtagcagtgtacccacgctgggtattaccatgtaaataatctgtgagtgaaagttgccattattctatgtagtggttttaggatacttaacaaatacattcaaattctttttttattattatttatttgattaggtatgtttgtaactttttacattacagaatatgaatgagaatgtgccatgtataatttttttcttgtagtaagaaacatccatattgcacaactctactgttgcaaagcttccttggaagggggctcttttactgggttcttaaccagatggttgtgtatgggtagcactactaaaagtttagaacttgcagtgtctttcggaatttttaaaataaactgtaaactaataggctggggtttttgttttgttttggggttttgttttgtttggttttacattttagttactgaagccttacaaggttatgtagagagataccatcttctgtaccaaaaatagacaagagaatgctgtcaatattggtgtactgtaatgtgaatctatgctggtgaaaacaattttttgttccccttattaaaaccttagtgtccttttctcatttgtggctttctgcatcacccaatcaataaaaaacaaatatatatatgtatatatatgtatgtatgtgtgtgtgtatatatatatatatatatatatatatanaactgattgtaagttgaaaacaggatcatcaagacatttcctttgtaaaaatgtctggtgaaagtataaaattctgttttcttctatgccagccataagtatctgaaatcctcttcatttatagaggtttgatttttatttcttttttttccctcttaaggatacagatcatgctgcaatgttagctgtgtagtactctaaaacttagcaattttatcagaattcttgtgcctgtttacattggataaaattgtttttagaaattccactcctgaaatagttacagaaagtcaagctatgttaaataagataggatcacattttataatgaagattaccagtgtagtaattctgatattgcaaatgattgaggaacaaacaaagaaactaatagagaaagtcagtctcagaggaaatcccatttaatgttagattgtttggcttttgaaattacttcttatagaagattgcattaaaaaaaaaaacaactttgtgcttctgcatagcaatttatccattcagaccttttcttttagaataaggaaacttaaaatctactttctaaagactgaacaaagtgctagctgcaaattatcttgaaatcatttggctcttttctagcatgtgtgtaatcatgttttcttctgattcctgaatgaccatggtagcattagtgtttagaaattgttcaggggaaaattgagctattttccatagtggctagcaattgctacacatccttagatactcctctctcccataggataaatgttacagcacacaaaagaaattttctcaattctgatttggaaaatttcacaggtgtcattattgtatatctaagcaataattatctgaatgttttggcataaaaaattataatgttctaacttgttttataagttgaatgacttttcagtcccttgattttatattgttgagtgataatcagactgatagtagcaaatctgatcatacattactaaaatagattgctgattgtctatttaacgaagacaagtgggtaacatttaaaatatataatacaaaaattttctctaacttacctttttccagaactacttctttaagcacttttcctattaatgcctattgttgattaaaaggtggttaattctaaccatcttttagtcttcaaagtggtgctatattccatcaagagcaataaagtttttcccaggtgtcacttattgtatatgttaccaaataccatgaatttctgccatagtactactatcaagcaccttgtcttgctatttacagtttcttcatttgtatatttttagcttttctaagtggaaatgtctacataattttgatcttgacatgattgaggatttagagctcttgtctttgtcttgattgcaatccaacgatagattaacttgattctcagggggaaaagaaaaacttattttatgagaattgtttgttctgtgaaactcacttcacctagaacacatttcattgattcttggatcttagtttatgtggtcatagttgactgctgagaaaaggacaatgaaatgatagcaatttcctttgcttctaggtgatctctgattatagatagcatcctgtaaatataactttattgtcttgaaatgtttattgaagatgctatatttttctgttctgttttctgaagattttgccatttaaaatgatccagtgaaaaatatttatccacattgaagaaagtggatttcccatgcaaattgaatcttcattaacacattttaaaaggctttactgtattaggtaacatagatattaaaggatttttctaggcaagaagctcaactttttttttccataaaaataatttttgcttaaatagtaactcatggttttcttttattaaatggggttgttgtcagtatgttaaacattgaagtaggaggagggtgcatattgtactatgcattcaaatttatcactgttttttctgacagactttccctttgtcctttctagttatgaactgggatgggtacttcttatgctagatagggtgtcgctttgagcaacctaaatgccggtggggggtacaccaggggccaaccgggataaaattgcgggaaacaaaactgggttttgcccttcacaggttgttctctctttaaaggggggcgtcccccaaagggaggaattttaaaaaaaacggggnnnn

SEQ ID NO: 13509 - DNA, 318 bp, Homo sapiens
  misc_feature 1, 2, 3, 4, 318: n = A,T,C or G
nnnnccggccacgggccaggttctcggtggggccgtgtacaccgtggtcctgttaggtccgaggggcaatagccctttggaacaagacaatccatgtgagataagaaagaagagcccacaagaccaaggatgtattctcagtttacagaccactgaccagaggccactccagggtgtcaggactaagacaagtcacaaaacagcacatttcccaagagcagcggaaaatgatccagtcacagatatcatttgaggatgtggctgaggatttcacgctggaggaatggcagctacttaatcctactcagaagaacttgn

SEQ ID NO: 13510 - DNA, 2132 bp, Homo sapiens
  misc_feature 1, 8, 9, 15, 16, 17, 2121, 2122, 2123, 2124, 2125, 2126,2127, 2128, 2129, 2130, 2131, 2132: n = A,T,C or G
natcgaanncccttnnnctcgggaagcgcgccattgtgttggtacccgggaatttccccgacactctgaagccacagatctcttaagaactttctgtctccaaaccgtggctgctcgataaatcagacagaacagttaatcctcaatttaagcctgatctaacccctagaaacagatatagaacaatggaagtgacaacaagattgacatggaatgatgaaaatcatctgcgcaagctgcttggaaatgtttctttgagtcttctctataagtctagtgttcatggaggtagcattgaagatatggttgaaagatgcagccgtcagggatgtactataacaatggcttacattgattacaatatgattgtagcctttatgcttggaaattatattaatttacgtgaaagttctacagagccaaatgattccctatggttttcacttcaaaagaaaaatgacaccactgaaatagaaactttactcttaaatacagcaccaaaaattattgatgagcaactggtgtgtcgtttatcgaaaacggatattttcattatatgtcgagataataaaatttatctagataaaatgataacaagaaacttgaaactaaggttttatggccaccgtcagtatttggaatgtgaagtttttcgagttgaaggaattaaggataacctagacgacataaagaggataattaaagccagagagcacagaaataggcttctagcagacatcagagactataggccctatgcagacttggtttcagaaattcgtattcttttggtgggtccagttgggtctggaaagtccagttttttcaattcagtcaagtctatttttcatggccatgtgactggccaagccgtagtggggtctgataccaccagcataaccgagcggtataggatatattctgttaaagatggaaaaaatggaaaatctctgccatttatgttgtgtgacactatggggctagatggggcagaaggagcaggactgtgcatggatgacattccccacatcttaaaaggttgtatgccagacagatatcagtttaattcccgtaaaccaattacacctgagcattctacttttatcacctctccatctctgaaggacaggattcactgtgtggcttatgtcttagacatcaactctattgacaatctctactctaaaatgttggcaaaagtgaagcaagttcacaaagaagtattaaactgtggtatagcatatgtggccttgcttactaaagtggatgattgcagtgaggttcttcaagacaactttttaaacatgagtagatctatgacttctcaaagccgggtcatgaatgtccataaaatgctaggcattcctatttccaatattttgatggttggaaattatgcttcagatttggaactggaccccatgaaggatattctcatcctctctgcactgaggcagatgctgcgggctgcagatgattttttagaagatttgcctcttgaggaaactggtgcaattgagagagcgttacagccctgcatttgagataagttgccttgattctgacatttggcccagcctgtactggtgtgccgcaatgagagtcaatctctattgacagcctgcttcagattttgcttttgttcgttttgccttctgtccttggaacagtcatatctcaagttcaaaggccaaaacctgagaagcggtgggctaagataggtcctactgcaaaccacccctccatatttccgtaccatttacaattcagtttctgtgacatctttttaaaccactggaggaaaaatgagatattctctaatttattcttctataacactctatatagagctatgtgagtactaatcacattgaataatagttataaaattattgtatagacatctgcttcttaaacagattgtgagttctttgagaaacagcgtggattttacttatctgtgtattcacagagcttagcacagtgcctggtaatgagcaagcatacttgccattacttttccttcccactctctccaacatcacattcactttaaatttttctgtatatagaaaggaaaactagcctgggcaacatgatgaaaccccatctccacccacnnnnnnnnnnnn

SEQ ID NO: 13511 - DNA, 1127 bp, Homo sapiens
  misc_feature 1: n = A,T,C or G
nctgctgatgacgctaactactcgcgcccagatacacttttggtgttgtggtccagcccacgttgtccgccacgtcggtgtcttctgttgatcccgcgtattgtattctccatgggcctttaacaggcggtggcactggctctcctggtactttctcgcccccccccttgtttggttcgtagcgctgattgtctttttaaaaccttaacccagagttatttttattttccagaacgtgttaggaactagtacttaaataatctcaagtccctgaggggccagagatcccaccatgcaaaatagcaaacagacccaagacttggggagaggcggtgagtgcatcagaaatggatgggtacatctgattcccaccacgcggggctcagcttagttagcaggagaccttcagactgagaaaaaatgcaagtctttttttggcctctaatatctgggaaggatggagggagctcaggagacacagaaaagatggcgtatgaatcctgtccggcctgaacgaggctggagttgtgcctctggatagcttcaagcactgatcagattgtcagcccccgctgcttgaacagatgctttagagcctcttccagttgccggtttgttccctgaagccccttcaccacctgcgctgcccactcgaagtattcctggactcgatgttctgaccatccctctggggtgcagcgattcaggtccctcagattgtacagcttgtctgccagcttcaccagtttggccccggggctactgtggggcgcttgctccacctgcagcctctttctctccagcttgggcagagtcttgtcatctgttacctcctccaccaggcgccgcacttgtgccccaaagtgtagctccacctcatccagggtggtgtctgtgtcctccaccgtgtcatggagcagggccgcctgtaacaccacaatgtcagtgattcccgcctcgtgggtcaggatccgtgccacaccgatggggtggttgatgtagggggtcccctcggggtccttccgccgctgctgccggtgcttgcgagccgcgaagtcggcagcctccagcagctgcgccgcctcagagcccatcgcgcggatggggccgcgactgctgggcggacg

SEQ ID NO: 13512 - DNA, 439 bp, Homo sapiens
  misc_feature 372, 373, 374, 375, 376, 377, 378, 379, 380, 381, 382, 408,429, 430, 431, 432, 433, 434, 435, 436, 437, 438, 439: n = A,T,C or G
acgcggggggagaaggaaggaggaagagcggaggccagggcgggctctaggccgtggaatctggggccttaaagccccttcgtctccccagcacccactctctgggggcaggtgggcccggtgacagtaaccttcagggagccctgaagaccatggaggactactgaccaacaacctctgaccttcacccctctggatgggggacgaatcactaggcaaaggggaacaatgggaaggagacaaaatggctgcctttacagctgcagcaagatgtggaaacactggttccctaggcacctccattgtcttcccgccttgggagcatgaaataaataaagtgtgaaggggaacatgaggaagactgatccaagnnnnnnnnnnnataaactgggctagagaaaaaacctncaaaaacatacccctgaaccnnnnnnnnnnn

SEQ ID NO: 13513 - DNA, 461 bp, Homo sapiens
cgcccgggcaggtacgcggggagtgcatttctttgcagaggttacctctttttcttgtctctcgtcaggtctctgacattgacagagcctggacgttggaggaagccccaggacgttggaggggtaaagtaaaagtccacagttaccgtgagagaaaaaggagggagaaagcagtgcagccaaactcggaagaaaagagaggaggaaaaggactcgactttcacattggaacaaccttctttccagtgctaaaggatctctgatctggggaacaacaccctggacatggctccagagatcaacttgccgggcccaatgagcctcattgataacactaaagggcagctggtggtgaatccagaagctctgaagatcctatctgcaattacgcagcctgtggtggtggtggcgattgtgggcctctatcgcacaggcaaatcctacctgatgaacaaactggc

SEQ ID NO: 13514 - DNA, 970 bp, Homo sapiens
  misc_feature 1, 2, 970: n = A,T,C or G
nncccggtcagagctctgctgcgggcgggcgctggacgtgctgcttcggggaggcgtcaggagctactgcggccgcgacatgaagggaacgcccctgacctggcctgcaacttcagcctttctcaaaatcggggcacggtcatcgtggagcgctggtggaaggtaccgctggccggtggagggccggaagccgcgcctgcaccggcgacatcgcgtctataagctggtggaggacacgaagcatcggcccaaagaaaacctggagctcatcctgacgcagtcggtggagaatgttggagtccggggtgacctggtctcagtgaagaaatctttaggccggaatcgactccttcctcagggactggctgtatatgcatcccctgaaaacaagaagctgtttgaagaggagaaattgctgagacaagaaggaaaattagagaagatccagaccaaggcaggtgaggcgacagtgaaatttctaaaaagctgtcgcctggaggtagggatgaagaacaatgtcaaatgggagctgaaccctgaaatagttgcccgccacttctttaagaatcttggtgtagtggttgccccacatacattaaagttaccagaagagcctatcacacggtggggcgagtatcgggtgttgaggtgacgggtaaatggggcttgataactggtgagagtgctatgttctagtcgtgaactttgagaagccaagaccaaaaagatataagtacctggttagcccagcaagctgcagggtatggaccccaacagccccagatctaaatctactctccttccaaggcagcaagcgaaccggaccgcgggcgccaaatttgccaggccctggtttcaatccggtctacacttacgtttagacacctggagtctgggcgggttctttgaccccctcgccttaaaggtcaacggcggaactgtcaaaacagggactaagaagacgcgcgcn

SEQ ID NO: 13515 - DNA, 1204 bp, Homo sapiens
  misc_feature 1, 2, 1202, 1203, 1204: n = A,T,C or G
nngatgttgcaaagcctaagtttgctgcagaaatacaatttcctacacttcatccttaaaggagattcagagctatcgctcaaaaccaaaagtcttggtttttaaatgtgcttagacaaaaaaaatcaggaaaggtacctcggccgcccgggcaggtacgcggggcacagttgaagaagcgaccgagggactgggagtcgttagtgaggatgacgcggcatggcaagaactgcaccgcaggggccgtctacacctaccacgagaagaagaaggacacagcggcctcgggctatgggacccagaacattcgactgagccgggatgccgtgaaggacttcgactgctgttgtctctccctgcagccttgccacgatcctgttgtcaccccagatggctacctgtatgagcgtgaggccatcctggagtacattctgcaccagaagaaggagattgcccggcagatgaaggcctacgagaagcagcggggcacccggcgcgaggagcagaaggagcttcagcgggcggcctcgcaggaccatgtgcggggcttcctggagaaggagtcggctatcgtgagccggcccctcaaccctttcacagccaaggccctctcgggcaccagcccagatgatgtccaacctgggcccagtgtgggtcctccaagtaaggacaaggacaaagtgctgcccagcttctggatcccgtcgctgacgcccgaagccaaggccaccaagctggagaagccgtcccgcacggtgacctgccccatgtcagggaagcccctgcgcatgtcggacctgacgcccgtgcacttcacaccgctagacagctccgtggaccgcgtggggctcatcacccgcagcgagcgctacgtgtgtgccgtgacccgcgacagcctgagcaaggcaacccctgcgctgtgttgcgggcctctggggctgtggtcaccctcgaatgcgtggagaagctgattcggagggcctggtggccctgtggactgggacaatctcgaccgcgacttctcgtgtcggagcggggcagaccggtacgaggctccggagggaagtggcagggggaatcacggcggggagaggccgagtggtgggcgcgaccattaaccgggggtgggccaaaaaaaaaaaccggcttttcgggggcacaacgatggcacggttatgtccacttgcaaggaagccccaggnnn

SEQ ID NO: 13516 - DNA, 1670 bp, Homo sapiens
atacttagggagtcgacccacgcgtccgctcggctccagcgccatggcgccctccaggaagttcttcgttgggggaaactggaagatgaacgggcggaagcagagtctgggggagctcatcggcactctgaacgcggccaaggtgccggccgacaccggtaagccctcgccgaggaggggtctggccgggccggggccggggccggggcaggagtggcagcgccctctcccgaggccccgaggccccgaggccggtatccgcgcggacctgatgcagggctgtgggacgagggccgctggggtccgggcaggggcctcgcagccgcagccccgtcggtgcgtcgagggggcagggcggagcacatgatgccccttggactatggggcagaggtggtttgtgctccccctactgcctatatcgacttcgcccggcagaagctagatcccaagattgctgtggctgcgcagaactgctacaaagtgactaatggggcttttactggggagatcagccctggcatgatcaaagactgcggagccacgtgggtggtcctggggcactcagagagaaggcatgtctttggggagtcagatgaggctagtaacctagagagacgataaggatagatttttccaagaaagatgtctgaccaagtctgtttatcaacaactgattgggcagaaagtggcccatgctctggcagagggactcggagtaatcgcctgcattggggagaagctagatgaaagggaagctggcatcactgagaaggttgttttcgagcagacaaaggtcatcgcagataacgtgaaggactggagcaaggtcgtcctggcctatgagcctgtgtgggccattggtactggcaagactgcaacaccccaacaggcccaggaagtacacgagaagctccgaggatggctgaagtccaacgtctctgatgcggtggctcagagcacccgtatcatttatggaggctctgtgactggggcaacctgcaaggagctggccagccagcctgatgtggatggcttccttgtgggtggtgcttccctcaagcccgaattcgtggacatcatcaatgccaaacaatgagccccatccatcttccctacccttcctgccaagccagggactaagcagcccagaagcccagtaactgccctttccctgcatatgcttctgatggtgtcatctgctccttcctgtggcctcatccaaactgtatcttcctttactgtttatatcttcaccctgtaatggttgggaccaggccaatcccttctccacttactataatggttggaactaaacgtcaccaaggtggcttctccttggctgagagatggaaggcgtggtgggatttgctcctgggttccctaggccctagtgagggcagaagagaaaccatcctctcccttcttacaccgtgaggccaagatcccctcagaaggcaggagtgctgccctctcccatggtgcccgtgcctctgtgctgtgtatgtgaaccacccatgtgagggaataaacctggcactaggtcttgtggtttgtctgccttcactggacttgcccagataatcttcctttttgaggcagctatataaatgatcatttgtgcaagaaaaaaaaaaaaacaagaacaggtttctataacaacatctcttac

SEQ ID NO: 13517 - DNA, 1639 bp, Homo sapiens
  misc_feature 1531, 1600, 1617, 1624, 1634, 1635, 1636, 1637, 1638, 1639: n = A,T,C or G
acgcgggggcttacccatcatggaagcaatgtggctcctgtgtgtggcgttggcggtcttggcatggggcttcctctgggtttgggactcctcagaacgaatgaagagtcgggagcagggaggacggctgggagccgaaagccggaccctgctggtcatagcgcaccctgacgatgaagccatgttttttgctcccacagtgctaggcttggcccgcctaaggcactgggtgtacctgctttgcttctctgcaggaaattactacaatcaaggagagactcgtaagaaagaacttttgcagagctgtgatgttttggggattccactctccagtgtaatgattattgacaacagggatttcccagatgacccaggcatgcagtgggacacagagcacgtggccagagtcctccttcagcacatagaagtgaatggcatcaatctggtggtgactttcgatgcagggggagtaagtggccacagcaatcacattgctctgtatgcagctgtgagggccctgcactcagaagggaagttacctaaagggtgctctgtgctcacgcttcagtctgtgaatgtgctgcgcaagtacatctcccttctggatctgcccttgtctctgcttcatacgcaggatgtcctcttcgtgctcaacagcaaagaagtggcacaggccaagaaagccatgtcctgccaccgcagccagctcctctggttccgccgcctctacattatcttctcccggtacatgagaatcaactcactgagcttcctctgaagccttgaagggttttcaggtccaaggaacaaaggggaaaatagacaaaggagtgcagaggacctggcctggcactggcttatttacctgagctcaaggagatccccgctggagcagcctctgcaaaagggagcccatgtaggccaggggctgtccaaactccagcttcttcccctgggaaaaaacccaaagaaccaaaaacaaaccaccccaaggataataatagctacactgctagcttctcaagttcttgtgaaaaacaatttacataatgacacagtagatgtggaacacctagcccagtgcctgggcaggtccctattatcataaatgaacataaaagtgctctaaaaacactccacagatgtgacttttacattgtttccaaagcaggttcaccaaaaacacatacacaaaatgcaacagtgtgtgttgaattggttcaatcataattcctttgatttttcttgtatcagaatgtgggtctaggaaaaacttgctctatttaacaggacagctctgattgaagcatccaagtacaggtcactggggtgggcactgttttatacagagacgattacaagaactctgcctcaaacgagcttacaatcaaatatgtcagctctcagtctttttggagaagtaggaagtaggaagataaatctgagacttaaaaaaacacaaaacattcaaggaacctgatgtcttaaaattgtcctacggaacaaaagctctcttgaaagctctggcttngggaaactactcttcaggaatcccagcttaacgctcccggggggaagttggcccttgagttcagggggnaggcttaagttgggttnaaggagncaccagggcnnnnnn

SEQ ID NO: 13518 - DNA, 1838 bp, Homo sapiens
acgcgtccgtgaaaccacactgctgcttggctccagcaagaccaccttgctaccagtcacagtcacagcccccatgcactgacactgcacactggactccaagaaacccttgccctaagagccagaaccctccacaccatcattcctagggagattctgcatgatgccagtgtccttggaccctctctgaagaggactttttgagaggaaaagggtttgtggggccgagggttgtgcctgtaccctggagtcaaccctctgtaaacactcaatgtgttctcaccttgttatcattcccaatgacgtcgaatgcgtggttgccctctccagtataaaagtttgatgcagcttttcctggatgtacctgtctataaggagtcctgcttatcacaatgaatgttctcctgggcagcgttgtgatctttgccaccttcgtgactttatgcaatgcatcatgctatttcatacctaatgagggagttccaggagattcaaccaggaaatgcatggatctcaaaggaaacaaacacccaataaactcggagtggcagactgacaactgtgagacatgcacttgctacgaaacagaaatttcatgttgcaccctttttgtctcaatgacagtgtttctacacctgtgggttatgacaaagacaactgccaaagaatcttcaagaaggaggactgcaagtatatcgtggtggagaagaaggacccaaaaaagacctgttctgtcagtgaatggataatctaatgtgcttctagtaggcacagggctcccaggccaggcctcattctcctctggcctctaatagtcaatgattgtgtagccatgcctatcagtaaaaagatttttgagcaaacacttgacaccacacaacaacacaaacaacaacacaacaaaaaacacaaaaaaaaaaaacaaacatttacacacaccacgggcccaacaaaaaagagctctacaagacacacagactcagggcgagcagcaggagaacaccagagggtaggaagactcaataacggtggaaaaatagagggcaccacaccgagggacaaacaggggagcacgacaatataatacatattaaaaaaacaaaaaaataataaaaaccacacagaaacataacacacaaataactaaatacaaacaaacacacatacacattatcaacagaaaaactaccaagacatcaataaacacggagggatcaaaaaaaacaacccacaaatccaagaataaaacaaacatacacaaaacacacagaacaacacacaagtaaaaaagacaaagaaagaaacgaaaaagagcgtagagagaggcgacagcgaggcggggcgagactgagacaggacgagcagaggagaaagtgaccgacaggggtgaaacacgcagaaccagagacggcgaaggcagagagggagagaggcgcgcaggggcaagcaaaacaacaacaaataccacatctcaaatactacgtacaacagaaacactacatccacatcatttccgctctaacattcacacaaactacaactccatcgtatagacagaaatatccactataaccagtataatgaccacatagttcaccacctagagaagagcaagaaggtaacaggatcgacgcacaggcgcgccgagaagagtcagagaaggcgcgcgacatgagaagggaacagcaacgacgcggcaagcgacagcggacagaggacaacgagggccgggggacgacgaacgcgaacgatctgagcgccgaatcgcgcgagaccagagagacgagccagagcgcgagaccgcgaagaagccgagagacagggaacgagcaccgaac

SEQ ID NO: 13519 - DNA, 908 bp, Homo sapiens
  misc_feature 902, 903, 904, 905, 906, 907, 908: n = A,T,C or G
acgcgggggggccaatcaagagcttggcgtattttacaaactgagaaagtagctccagcagcacccgagaggtcaggagaaaagcggaggaagctgggtaggccctgaggggcctcggtaagccatcatgaccacccggcaagccacgaaggatcccctcctccggggtgtatctcctacccctagcaagattccggtacgctctcagaaacgcacgcctttccccactgttacatcgtgcgccgtggaccaggagaaccaagatccaaggagatgggtgcagaaaccaccgctcaatattcaacgccccctcgttgattcagcaggccccaggccgaaagccaggcaccaggcagagacatcacaaagattggtggggatcagtcagcctcggaaccccttggaagagctcaggcctagccctaggggtcaaaatgtggggcctgggccccctgcccagacaggtgccatggcttgtacctgtaatcacagctactcaggaggctgaagcaggaggatcactggaggccaggagttggagaccagcctggatgacagagggagatcccatctctttaaaaaataaataaataaataaataataaagagaaagaaagagtcttattagcggcgaagctatcgtttgtgaggtaatttcctggactgcgtcgtttaacgtgtactgggaacttgcgtaccattatgctgagaatcctttgcagtgtaatggagagcgccttgcttcaattccttatcgatgagcctttggggtaagcggttgtttgcagcggagatgcagcggcgggttttttttctttggcgagcaaaggttgtttttttcggcaattgggtggcctaactttggggttgttagacaggtctagtgtgaaaaattaggcggnnnnnnn

SEQ ID NO: 13520 - DNA, 2535 bp, Homo sapiens
agcacacacatgtcgcggtggttacgtccgtcacgttcacgcatcaggcggatatcgttagcccacccagcaaaattcggttttctggctgcgagaagacgacagaagggtacggctgcgagaagaccacagaagggtacggctgcgagaagacgacagaagggtacggctgcgagaagaccacagaagggtacggctgcgagaagacgacagaagggggaactggagtggtctggagttccacggtgtagtggaccagaggccacctctcctgggcttctcagtgtctcgccggcggggttcggcctgagctggattgacatagcccttggcggatttaaacaacctaaacattaagcagtacagctgcctcaaacctttgggattttcagaatgactgacactgccgaagctgttccaaagtttgaagagatgtttgctagtagattcacagaaaatgacaaggagtatcaggaatacctgaaacgccctcctgagtctcctccaattgttgaggaatggaatagcagagctggtgggaaccaaagaaacagaggcaatcggttgcaagacaacagacagttcagaggcagggacaacagatgggggtggccaagtgacaatcgatccaatcagtggcatggacgatcctggggtaacaactacccgcaacacagacaagaaccttactatccccagcaatatggacattatggttacaaccagcggcctccttacggttactactgatagaaatgttggcagcttttagtaaaagcatttactctgttaccatgagaaaagtttgggtgtcttctgttggtcatagttttacatctgattttacagaatggattattgattttttggaagttgagactttaaaaaaaatagatcttacttgcgaaatgcgatggttgctgggaatacctgaaactgtggattatattgcttgacttctacctcagaatcttctttgtttcatgacttaatagtgctttaagtttggtatattatttgacctctaggaattctttgttttacacagaaataaaaattttaaaatagaaaatgcttttactttgtaaggtaagagagtatccatatgcttagatgtgctcgtttctaaaattctagaggttgatataatcagctcatgaatgcacagctatgctttttgtgatagattgtacataacatcagcagttgaaaggtaaaacaattgcttttttttttttttgcatttgttaagtgactatggtactttgtgattccttaatctatagatgagtcagctccacacttgagtctctttttagagggaaatcagtaataaagctgtaaaataaggaaggaatcattgtcagtttgtgtcttgatctggtggtggttgggataagggtacacatcattttatacaaacactaaagctttttgctaacaacatagcaggtcaaaattcacacataagaaagtttaactctgtactgttcacactttttaatcctgtaaataatgctgcattttgatggttcttacttttttggtatttaatgtgggctgattttacaatgttatattcacttccagatgcatacctctgctgctttctctcctataaatagtgatgctataaacttcctttcacagagatcattctatttcaaatcactttaatgattattacaatgatttcattcaaataaaaattttaaaatatttaagcatcttcactcccaagttctggcagttagcccatttattaatatggtgaaatgagatttttgggtttttatatgctgtccttcatatctgttgaaaagggcttatttggtttaacagtaacattaagagtgcaaatttcaacataggtcaaaggaattaacaggcaccttcctgactttattagagtgacaaaaaaatatatatatttaaaaaggcgtcttccagccaggcatggtggctcatgcctgtagtcccagcacttgagctgtggcggatcactggggtcaggagttcgagaccagcctgaccaacatgatgagaccccgtctctactaaaaatacaaaaattagccgggtgtggtggcacatgcctgtaatcccagctactcgggagggcagagacaggacaatcgcttgaaccaggggaggtggaggttgcagtgagctgtgatcatgccactgcaccccagcctgggtgacaagagcaagactctgtctcaaaaaaaaaaaattttttttttttcaaattactcttgtttggaaaacttgtaatagaattctgatgattatgaccttctgataatgaacactttttcctttagagtgatttaaaaatttctgtatttttgaaatcagtactaattgtcatttttttctctcacagcttcatattctccaattcagcctcattctctaataaaacatcagcagattcctcttcattcaccaccttccaaagtttcccatcatcagctgatattacaacagcagcaacagcaaattcagccaatcacatcttcagaatccaaa

SEQ ID NO: 13521 - DNA, 1756 bp, Homo sapiens
  misc_feature 1, 1744, 1745, 1746, 1747, 1748, 1749, 1750, 1751, 1752,1753, 1754, 1755, 1756: n = A,T,C or G
ncgaccaccgtcacgcgtccgcaaaatcccaggcagcatggacctcagtcttctctgggtacttctgcccctagtcaccatggcctggggccagtatggcgattatggatacccataccagcagtatcatgactacagcgatgatgggtgggtgaatttgaaccggcaaggcttcagctaccagtgtccccaggggcaggtgatagtggccgtgaggagcatcttcagcaagaaggaaggttctgacagacaatggaactacgcctgcatgcccacgccacagagcctcggggaacccacggagtgctggtgggaggagatcaacagggctggcatggaatggtaccagacgtgctccaacaatgggctggtggcaggattccagagccgctacttcgagtcagtgctggatcgggagtggcagttttactgttgtcgctacagcaagaggtgcccatattcctgctggctaacaacagaatatccaggtcactatggtgaggaaatggacatgatttcctacaattatgattactatatccgaggagcaacaaccactttctctgcagtggaaagggatcgccagtggaagttcataatgtgccggatgactgaatacgactgtgaatttgcaaatgtttagatttgccacataccaaatctgggtgaaaggaaaggggccggggacaggagggtgtccacatatgttaacatcagttggatctcctatagaagtttctgctgctctctttccttctccctgagctggtaactgcaatgccaacttcctgggcctttctgactagtatcacacttctaataaaatccacaattaaaccatgtttctcacttttcacatgtttcatagcaactgctttatatgactgatgatggcttccttgcacaccacatatacagtgcgcatgcttacagccgggcttctggagcaccagctgcagcctggctactgctttttactgcagaatgaactgcaagttcagcatagtggaggggagaggcagaactggaggagaggtgcagtgaaggttctctacagctaagcctgtttgaatgatacgtaggttccccaccaaaagcaggctttctgccctgagggacatcttcccactcccctgctccacatgagccatgcatgcttagcaatccaagtgcagagctctttgctccaggagtgaggagactgggaggtgaaatggggaaatggaagggtttggaggcagagctgaaaacagggttggaaggatttcctgaattagaagacaaacgttagcatacccagtaaggaaaatgagtgcaggggccaggggaacccgtgaggatcactctcaaatgagattaaaaacaaggaagcagagaatggtcagagaatgggattcagattgggaacttgtggggatgagagtgaccaggttgaactgggaagtggaaaaaggagtttgagtcactggcacctagaagcctgcccacgattcctaggaaggctggcagacaccctggaaccctggggagctactggcaaactctcctggattgggcctgatttttttggtgggaaaggctgccctggggatcaactttccttctgtgtgtggctcaggagttcttctgcagagatggcgctatctttcctcctcctgtgatgtcctgctcccaaccatttgtactcttcattacaaaagaaataaaaatattaacgttcactatgcaaaaaaaaaacaaagannnnnnnnnnnnn

SEQ ID NO: 13522 - DNA, 1602 bp, Homo sapiens
  misc_feature 1, 2, 30, 1600, 1601, 1602: n = A,T,C or G
nnggaagaactccggccgcccaggctccgnctccgcgacgggccgtcgggaggaggcgaccggaagccacttaaagcagagagggaggtgacaggcgagctggctggactcggagcgcggtcgaggctttctgcgttcgcggcggcggaatggcccgtgcgcggctcgccgcgtcgcggctctgtggtccctagacgtcggctcccgccctcggcgctgatctccggcgcgggcactgctttccactcggctcctgtcgtccgttctctcaggctcccgttcaggatttttagactctgaggagcagttggagctaatccacattatggaaatggaaaccaccgaacctgagccagactgtgtagtgcagcctccctctcctcctgatgacttttcatgccaaatgagactctctgagaagatcactccattgaagacttgttttaagaaaaaggatcagaaaagattgggaactggaaccctgaggtctttgaggccaatattaaacactcttctagaatctggctcacttgatggggtttttagatctaggaaccagagtacagatgagaacagcttacatgaacctatgatgaagaaagccatggaaatcaattcatcatgcccaccagcagaaaataatatgtctgttctgattcctgataggacaaatgttggggaccagataccggaagcccatccttccactgaagctccagaacgagtggttccaatccaagatcacagctttccatcagaaaccctcagtgggacggtggcagattccacaccagctcacttccagactgatcttttgcacccagtttcaagtgatgttcctactagtcctgactgcttagacaaagtcatagattatgttccaggcattttccaagaaaacagttttacaatccaatacattctggacaccagtgataagctgagtactgagctctttcaggacaaaagtgaagaggcttcccttgacctcgtgtttgagctggtgaaccagttgcagtaccacactcaccaagagaacggaattgaaatttgcatggactttctgcaaggcacttgtatttatggcagggattgtttgaagcaccacactgtcttgccatatcattggcagatcaaaaggacaactactcaaaagtggcagagtgtattcaatgattctcaggagcacttggaaagattttactgtaacccagaaaatgatagaatgagaatgaagtatggaggacaagaattttgggcagatttgaatgccatgaacgtgtatgaaacaactgaatttgaccaactacgaaggctgtccacaccaccctctagcaatgtcaactctatttaccacacagtctggaaattcttctgtagggaccactttggatggagagagtatcccgagtctgtcattcgattgattgaagaagccaactctcggggtctgaaagaggttcgatttatgatgtggaataaccactacatcctccacaattcattcttcaggagagagataaaaaggagacccctcttccgctcctgttttatactgcttccatatttacagacacttggtggggttcccacacaagcnnn

SEQ ID NO: 13523 - DNA, 2485 bp, Homo sapiens
gccgtgagtgctcgcgtgtgcggtcggtccactttcgcgcgtgttgatatgtgtgcatcttggcgtgcgagcgctgcgtgtcgaggccggactgctgtgttgtagctttgttcctgtttgttctgactgtcgcctgcgtgtgtgagactgacggtcgtgctagtggtcttcggggtcttctctgttgttctgtcgttgtgtacgtgtcgtaacttcttgcgcgtgtgggtgtcttggatcctgtttggttgagtgcttcgcgtaatgtctggtgcgtcatgcggttgttctgtcttggtgtgctcggtgtgttcgctgtgctcttggtttgctctctctgtcctctctgctgttttcgtggtggttcggtcgtgtctgtctcgtggtctggcgttgtgtttttgttcggtgcgtgtgtgcgtgctgcttgtgtgtgtgcgttgcctgtgtgcgctgtcctcgtgtgctctgtgtgtctgctccttcgttgttcttgtgtgtgtctactgctatgtggcgctctgtatggtgcgtgtcctgcggtgcttgctgcggctggcgtgggctgtcggctgtgcgctgctggcgctgctctcgctgcggtgtgggcgcggtgtggggctgtcgtggtcgtctgcgctgtctctgctctcgcgtctgtggctctcgctgactgtcttgctttccgttctgctgcgggtctctttcttgccggcggcgtctcttcttgtgtgttgttgtgttgtgttggtctgtcttggctctgtgctcgtctttgtgcttggtcggttcttcgtctggttctgtcgtgcctcctgtctcgggttgtcttcgcccctctgtttcctcgcgccggcctccgggctcggtcgcgccttctggcgtccgttcgctcgcgctcgctccccatgcggcttccgctccggttgcttcgctgccctcgttcgtggtcctcggcgtgctgctcgtcgcgtctctccctgtctctctgtgcgtctggtcgtcctctactccgtctgtgctctgccgcgggggcggcgtttcgtccgttgtcgtgctgttcgtctcgtcgcgcgtcgccgcgtcggtggcctcttgcttgtgcgtgttggctgtctggttggtcagttgtgtgtgcgattgttgtgtggcttgctggttgtcgttctgatgtcggcttttggtggtcggtctgcgggtcgttgtggtgtggtttggtgggtgtgtggtggggggggtgggtccaggtggggtatgtgttcgagctgttgctctctgttggggtcggttctcctcctattctcgtagggttgtgtctgacgtctggtgtgctgccgggggtttgttgtgtggtggtgccggcccgtgctgtccgcggtgtcgttcgggcgcgtttggcaggcgtgctggtctgccgtcgtgggcctctggtgcagcgggggtgtgtgtttgtggtgtttcttggtgtctctttgcgggctgtgtgcaggttgttctgttgttttctttgttgtgctggttgcgtgttgggtcaaggtctgttttattatcattcacattatttcatagaaaaaggaatatagcaaacggtcagggtcagggttgtacataaaaaatccaggtttgtggaagtcgcgttctttacatctgggagcggggctgtcccagcatcaggcgcagcagctgcacttgtccgacgcccctttgcagatgcagccctgggcacacttggcacagcccacagggcagcaggggcgtccgggagaacacagctcaaaagggggcatggggccccagggccacaggcatggggaccttggaaagagagacccggaagatgctccagctgggaaggaattcacttcccactgaccagtgtccgctaagcttcaggctttactgccatagatcactaaatgcctatcgttctgaaaggggtactttatgtttccagattcttaatttacagccttattacaatattacaatttaaaagagagtctggtgtcatggcaaaaaggtggcaggcaggaaatgcaacagcatccgtgagcaggagccaatccccagcgtgctgaagccacctcagcgccacctcggcctccctgagccagcctggccgggtcgcggtcggggtggctcctggcactggggctgcaggccgggtaacagaatgctgaggcacggcctcccgggtgttttgaaaaggcacctccaaggttggtggacgtcactatctaggaaaggaagccaaggagtgcggctggcgcctccgggcagggcggtgaggggcgtggcagggcggggcggtctcacactcccaagacaggttacctagccctgctggctctcagtgggccaggtcagtgtggctggcactcagagctcgcgagtcggccagacaattatttcgttcttgaaagcgatcttcagcagccttgccacccacgttaaggacattcagagagctggcacgctcggacgc

SEQ ID NO: 13524 - DNA, 1568 bp, Homo sapiens
  misc_feature 1419, 1475, 1523, 1544, 1565: n = A,T,C or G
ggagtcgacccacgcgtccgcggacgcgtgggttttctccaaaggagtgcttgtggagatcggatcttttctccagcaattgggggaaagaaggctttttctctgaattcgcttagtgtaaccagcggcgtatattttttaggcgccttttcgaaaacctagtagttaatattcatttgtttaaatcttattttatttttaagctcaaactgcttaagaataccttaattccttaaagtgaaataattttttgcaaaggggtttcctcgatttggagcttttttttcttccaccgtcatttctaactcttaaaaccaactcagttccatcatggtgatgttcaagaagatcaagtcttttgaggtggtctttaacgaccctgaaaaggtgtacggcagtggcgagaaggtggctggccgggtgatagtggaggtgtgtgaagttactcgtgtcaaagccgttaggatcctggcttgcggagtggctaaagtgctttggatgcagggatcccagcagtgcaaacagacttcggagtacctgcgctatgaagacacgcttcttctggaagaccagccaacaggtgagaatgagatggtgatcatgagacctggaaacaaatatgagttcaagttcatgccaccaccgacttatactgaggtggatccctgcatcctcaacaacaatgtgcagtgagcatgtggaagaaaagaagcagctttacctacttgtttctttttgtctctcttcctggacactcactttttcagagactcaacagtctctgcaatggagtgtgggtccaccttagcctctgacttcctaatgtaggaggtggtcagcaggcaatctcctgggccttaaaggatgcggactcatcctcagccagcgcccatgttgtgatacaggggtgtttgttggatgggtttaaaaataactagaaaaactcaggcccatccattttctcagatctccttgaaaattgaggccttttcgatagtttcgggtcaggtaaaaatggcctcctggcgtaagcttttcaaggttttttggaggctttttgtaaattgtgataggaactttggaccttgaacttacgtatcatgtggagaagagccaatttaacaaactaggaagatgaaaagggaaattgtggccaaaactttgggaaaaggaggttcttaaaatcagtgtttcccctttgtgcacttgtagaaaaaaaagaaaaaccttctagagctgatttgatggacaatggagagagctttccctgtgattataaaaaaggaagctagctgctctacggtcatctttgcttagagtatactttaacctggctttttaaagcagtagtaactgcccccaccaaaggtccttaaaagccatttttggagcctattgcactgtgttctcctactgcanatattttcatatgggaggatggtttctcctcatgtaagtcccttggaattgattcntaaggtggatgttccttagcacctttaattcctgtcaaattttttggntcccccccttctgccatcttnaaatgtaagctgaaactgggncac

SEQ ID NO: 13525 - DNA, 1205 bp, Homo sapiens
  misc_feature 1, 2, 3, 4, 5, 6, 7, 1200, 1201, 1202, 1203, 1204, 1205: n = A,T,C or G
nnnnnnncgagagtcttctagagttaactaaggcggggccgacgtaagtgctcgcggaagtcagggagccggaggcgacgcgccggaggaaagatggaagactaccaggctgcggaggagactgcttttgttgttgatgaagtgagcaacattgtaaaagaggctatagaaagcgcaattggtggtaacgcttatcaacacagcaaagtgaaccagtggaccacaaatgtagtagaacaaactttaagccaactcaccaagctgggaaaaccatttaaatacatcgtgacctgtgtaattatgcagaagaatggagctggattacacacagcaagttcctgcttctgggacagctctactgacgggagctgcactgtgcgatgggagaataagaccatgtactgcatcgtcagtgccttcggactgtctatttgacctgcagtccagcctatggcctttctccttttgtctctagttcatcctctaaccaccagccatgaattcagtgaactcttttctcattctctttgttttgtggcactttcacaatgtagaggaaaaaaccaaatgaccgcactgtgatgtgaatggcaccgaagtcagatgagtatccctgtaggtcacctgcagcctgcgttgccacttgtcttaactctgaatatttcatttcaaaggtgctaaaatctgaaatctgctagtgtgaaacttgctctactctctgaaatgattcaaatacactaattttccatactttatacttttgttagaataaattattcaaatctaaaaaaaaaaaaaagggggcgactaaaattcccccgaggggcccagttaggtatccgtttctgccaaggtgtccaaaggggcgcaaatataaacagggcagagccgcgcgttaacacgccgtgcgggggaaacacgcctaccgggggaaccctgtggagggagacccacactcggcgggggcggctgcactgtgggcaagacacccacacagaaatagaggcccagcgagacaaaaaaaaaggagcaacgggtggacaccgccactactcgtcgaaaaggttgctctaaatccaagcaaaccaagagaacgaaacaaagcaaaagcagacgaacgacaagaacaagcgaaccaaaacataacaaacatagtcaccaacacaaacagagagagagaacaaccgactgcacgaaccnnnnnn

SEQ ID NO: 13526 - DNA, 1544 bp, Homo sapiens
  misc_feature 1, 2, 3, 4, 5, 1543, 1544: n = A,T,C or G
nnnnngcgtccgcggagggcgctgcggtaaggagcagccgccacaggcacagccgcttcgcagcctcccgccgctggtttgtcagccccgcggctgcgggcggccgggcggccgagcgcgctctgaggttcgtccctcatcgctgaacccgcgtcctcccgccgcagctcctcggggaggggggcggtcggcgcctgcgcagagccgcctcctccccgcccccgcccagactccccccgcgccgccgccgaccgctaccgacgccgccgtcgctgcgcctgctgctcctcgccgtccgcgctagtagggcccgcgggctcgaagatggccggttggcagagctacgtggataacctgatgtgcgatggctgctgccaggaggccgccattgtcggctactgcgacgccaaatacgtctgggcagccacggccgggggcgtctttcagagcattacgccaatagaaatagatatgattgtaggaaaagaccgggaaggtttctttaccaacggtttgactcttggcgcgaagaaatgctcagtgatcagagatagtctatacgtcgatggtgactgcacaatggacatccggacaaagagtcaaggtggggagccaacatacaatgtggctgtcggcagagctggtagagtcttggtctttgtaatgggaaaagaaggggtccatggaggcggattgaataagaaggcatactcaatggcaaaatacttgagagactctgggttctagctgctaggcagactgttaagtattaggggaaaattgctcttaaactttcctagctataagcttaagtcttaattctggaaattttattagcaatgcagggtgatggggtatgaacctgtgtctcctttgtatccctctgttggtggggaaaggtgtctttctttctgccctccccccccaaaataattctgttcacttttgttttgtttccttgtgtactccagcattggttatagtcatgggaaaggaaggtgtccacggaggcacacttaacaagaaagcatatgaactcgctttatacctgaggaggtctgatgtgtaagcagcctctccccatctacctagcaactgtcttcatcaacaaccctaattatggtcacaatgctaccaaactgtagatggtagctaatttttctttacctattttctaatgtcatgattcctgtttgcccaatggatcatttgtatgttaaccactgtatgtaaccaacccttatctggcaacataattgcagcacaataatgatttgcatgataccttgaaattggggggagggggcatgccaagttgggcatcactttgtcttagcaattaatgggatattgattactaaaataagttaatattagcaaggtgccggtgtacaatctctggtcggtctttccgcctggcattatgggccttgctcctgtcggtggggaaagctgtctctctttctctttttcgcccccccagggcgccttggcgcgccacccttctctcgcttggcccgcatcctttcaccgcgctgtccgnn

SEQ ID NO: 13527 - DNA, 262 bp, Homo sapiens
  misc_feature 253, 254, 255, 256, 257, 258, 259, 260, 261, 262: n = A,T,C or G
acccaaagggcaaagtggaggccagggtctctttgctaaggagctaagtaggggaaagaggcagggggagctcccagcaggaccaaagggagaccaaggtttggaccccagaacagagcaggaacccagagtcctgtgcagtcacaggatgacgcagggaggacggttgttggtgatcttttctagggtttttccattaataggtctccatcagtaaatcccagatttgcaatgatgtagtggaacctgcccnnnnnnnnnn

SEQ ID NO: 13528 - DNA, 7322 bp, Homo sapiens
cgtccgggggcagggcgtggtgaggtaaggtgagtgccgtagtggggttccctggagccatggcctgctccattgtccagttctgctacttccaggacctccaggccgcccgggacttcctctttcctcacctgcgggaggagatcctcagcggcgccttgcggagggaccccagtaaatcaacagactgggaagatgatggttggggagcatgggaagaaaatgaaccacaagaacctgaagaagaaggaaatacttgcaaaacacaaaaaacttcctggctccaagattgtgttttatccttatctccaaccaatgatcttatggtgatagctcgagagcaaaaagctgtatttctagtgccaaaatggaaatatagtgataaaggaaaggaagaaatgcaatttgctgttggctggagtggttccttaaatgtcgaagaaggggaatgtgtaaccagtgctctatgtatcccactagcaagccaaaagaggagttccactgggcgtcctgactggacctgcattgtggtgggttttacttcaggttatgtacgcttctacactgagaatggtgtgctcttgcttgcacagcttttgaatgaggacccagtacttcaacttaaatgcagaacctatgaaataccacgacatcccggcgtgactgagcagaatgaagagttgagtatcttatatccagctgccattgtgactattgatggatttagcctttttcaatctcttcgtgcttgtcgaaatcaggtagcaaaagctgcagcatcaggcaatgagaacatacaaccaccaccattagcttataagaaatggggtctacaagatattgacactattattgatcatgctagtgttggtattatgactctgtccccctttgatcaaatgaagactgcctccaatataggtggatttaatgcagcaattaaaaatagtccacctgccatgtctcagtatatcactgtagggtccaatccatttactggcttcttctatgctttagagggaagcacacaaccattattatcccatgttgcactagcagttgcaagtaaactcacttctgctttatttaatgctgccagtggttggcttggttggaaaagtaagcatgaagaagaagctgtccaaaagcaaaagccgaaggttgagccagctaccccattagctgtaagatttggacttccagattctagacgccatggtgaaagcatatgtctgtctccatgtaacacactggcagcagtaacagatgatttcggcagagttattttattggatgtagctagaggaattgcaatacgcatgtggaaagggtaccgcgacgcacaaattggatggattcaaactgtagaggacctccatgaaagagtgccagaaaaggcagatttttccccctttggaaattctcagggtccaagtcgagtagctcaattccttgtgatctatgcgccaagaaggggaattttagaagtgtggagcacacagcagggacctagagtaggagctttcaatgtggggaagcactgcaggctgctgtatcctggctataaaataatgggtttaaataatgttaccagtcagagttggcagccacagacttatcagatctgtctggttgatccagtgtctggaagtgtgaaaacagtgaacgttcccttccatttagcactgagtgataagaagagtgaacgagccaaggatatgcacctagtgaagaaactagcagccttactgaaaacaaaatctcccaatcttgatttggttgaaacagaaataaaggaattaattcttgatattaaataccctgcaaccaaaaaacaagctttggaaagcattttggcaagtgaacgtttaccattttcttgccttagaaacatcactcagactttaatggacactttaaaaagtcaagaacttgagtctgttgatgaaggattgctacagttttgtgccaataaactaaaactgctgcaactctatgagtctgtcagtcaattaaattcccttgattttcatttagacacaccattctctgataatgacttggctctgttactaaggcttgatgaaaaagaactgcttaagctccaggcattactagagaaatataagcaagagaacaccaggacaaatgttcgattttctgatgataaagatggtgtgttgcctgtaaaaacattcttggaatatttagaatatgaaaaggatgtgctcaacataaagaaaataagtgaagaggaatatgtggctttaggtagtttctttttttggaagtgtttgcatggagaaagctccactgaggatatgtgtcacactttggagtcggctggtcttagccctcagctgttgttgtctctgctcctgagtgtttggctttcaaaggaaaaggatattttggataaaccacagtcaatctgctgtcttcataccatgctgtccctcctgagcaagatgaaagtggccatcgatgagacctgggattctcagtctgtgtccccatggtggcagcagatgcgcacagcctgtattcagtctgagaacaatggagccgctctgttgtctgcgcatgttgggcattctgttgctgcacagatatcaaacaacatgacagagaaaaaattttcccaaacagttttgggtgctgattcagaggccctcactgattcctgggaggcactttctcttgacactgagtactggaaactccttctgaaacagctggaggattgtctcatacttcagactctgcttcacagcaaagggaacactcagacctccaaagtgtcatcactgcaggctgagccacttccaaggctttctgttaaaaagttattagaaggaggaaaaggtggcattgcagacagtgtagccaagtggatatttaaacaggacttcagccctgaagtattaaaactggctaatgaagaaagagatgcagaaaacccagatgaacccaaagaaggtgttaacagaagtttccttgaggtatcagagatggagatggacttaggagccataccagacttactgcatttagcctatgagcagtttccttgtagccttgagctcgatgtcttgcatgcacattgctgctgggagtacgttgttcagtggaataaagatccagaggaagcacgtttttttgttaggtcaatagaacacttgaagcaaatatttaatgcacatgttcaaaatggcattgcactgatgatgtggaatacgttcttagttaaaagattttctgctgctacatacttaatggataaggttggaaaatcaccaaaagataggttatgccgaagggatgtgggaatgactgacacagcaatgacatctttcctcggctcctgtttggatcttcttcagatcttaatggaggcagatgttagcagggatgaaatacaggtgcctgtgctggatactgaggatgcgtggctctccgtggaaggaccaatctccatagtggaactggcccttgaacagaagcacatccactacccactggtggagcaccactccatcctgtgctccatcttgtatgcagtcatgaggttttctctgaagaccgtgaagccactttcactttttgacagtaagggaaaaaatgcatttttcaaagacctaacttcaattcagttattacctagtggggaaatggatccaaattttatttctgtacgacaacagttcttattgaaagttgtcagtgcagctgtccaggcccaacattcagccacaaaggtcaaagatcccacagaagaggccacacccactccttttgggaaagaccaagattggccagctctagctgtggatttagcccatcaccttcaagttagtgaagatgttgttagaaggcattatgtgggggaactatacaactatggagttgaccacttaggagaagaggccattctacaggttcatgacaaagaggtccttgcctctcagctgctggtgctcacggggcaaaggctggctcatgcgcttctccacacccagacaaaagaaggaatggagctgcttgccagacttccacccacactgtgtacttggctgaaagcaatggacccccaggaccttcaaaacactgaagtgccaattgcaacaacagctaaactagtaaataaagtaattgagcttttaccagaaaaacatgggcaatatggtctagccttacacctcattgaagctgtggaagccatatctcttccttctttatgacacttacctactggaaatagtctaaaattatgattataacatgaagtagtgcatggttattttacatagtaagacctggaattttatgggaaaagtatgtctttttttttccttttgtaaaataaataaaagtatatacaacttttaaaaagtgcaaccctggctaaattccactcctttggttaatactgaagataaaatataaacaaatgtcaactctgttataattaatacagatgttttactgtttatttctaattcaaacacttaagtagctttattgttaaactttgctatttaaaattggttataatttagattatgttcttataagattctatatttcctatctaaaatgttgttgtaattcaatttaaatgtgttcatgtacagtccccatcagtagcgtatagaacaccccactctcctttagtaaatgttgagaaaatgcctttgttgtcatgctccaaatcccacactgggctgccacctgggagttctggataccgaaaggttcctttcccagaggttctgctgttgccatcagaggaggatgaccgtgcttgaggaggaagaatgggttcaagatcatcatattcatcagaaggggacactaaatagaacccttaacctgttgtacttgccaaaattgagaatcagagatgtgtaaaatgcagcaaattaattataatgtaagttaagatttgctttttgccaagttgcaaagttgtatccacatcaggtcactgtaaaaatgtattatcttgtaaaacttatgtaaaaaaaaaaaaaaggcaaagatactaaaaattttaagtccgactttatttttcctacaagtgtttagaaatgcttctgggatttgctaatattatctgtccttgggaacagtattgaaaaaactgcttagtggtattacagctttagcaaacctacctcacagctgggatgagaggataaaatacaactaattttgtaccctatagtgcctagagcagtccaagtgctaaataaatatttactgattaaaaccaaactatagctactcgggaggctggaggaggatcgcttgagcccaggagtttgaggccattctgggcaatatagcaagaccctgtctcgaaaaaaaaaaaaaaagaaaaaaccaaactaaccaaaactctgtaaaagagtgctttgagctctacaaataccaagtatttattgtggtatatttttagaatgtagccatacagtgtaattatgggtatctgtcatggatcacaattattattcatagtaagtcattgtgatacagaagtttgtttcttcacttccccttaagaagccaactatagtaatcatgcaaagttgaggagtatgtccttcagggatataaaaaaaaaaacaaatctgttttttgagctaaaagagcacatccaaacaagaatttaactggctaaaatttagtaattactgttaagtaactatcaaacttgaaatcttacaagataaatggttaagatgtcttgagtatttgggatgggggcctgtgagtctgattgagacatacattttacagagtagcagcactggaaagggctagtccaacctcccagcctctgcttgggtctccgctgccccagccacacacatcctagaattcttgtaaacatatctggctctgtgttaacagtcacttgttataacatgttttctaagagattagttcttcctgtgatttttccaagtacgctgaaagtagtagtatgaacttaaggaggctagtcaaagaaacttggagttataggtatttttaaagaataaatcctcaattccatcatcacttggcggggagggggcacttattaagcattttagataataaaactggttaagcttactctggtagaacagacaatcaaatctggggattgctgagaacaataataagctgaagtatggctcacagaatcctaacacaaatcattaagtctctagttagatttgttatcctaaaatttttcatagaattttaaaatctaattctgacttgtatggttaagaaaagcagttaaatattttactacttatcaagggcttttaaaataaataaatctgattgataggaagaaaggcaaataaatacctatgtagacattctataataacaaagagccatagatgataaaggaattagattttaatgtagaatgggtggtttctgaaacaaaggtatgtggtactttgtagttattgatgagaagccagtaaccagtagtgttttcctagatatatgcccaccctcacacaactttcttcattaacaaacattaaatatgcatttgtatcttattaaattatattgtataatgctgaaggaaaacaaaaagtgttcaaataatcataacttctacattacaggttctgtttagatgcagaactagaggggccagggtaaatgtagataaagagatatatagcaccatgcttcttaatgcttcatacttttgcaaacagaaaaaaaaagttttacttttattataaaacttcatctatggtcaaagtaaacactgttacatttaaattgctttttaaaaacaattgcgatctaaaaagtcaaaaatctgaaatttaataatatgagacttacactgaatataatgttcatttagaagttgctgtggtccacttcatttataaggaacaaatatttttacagtacactatagcaacagcaaaagccctctctcaccctgataggaatgggtttgctgggtgtctagaagttagattcctgctgaatagaattagccatccttaaaagattttaatccaatactgaactgtttataaaatgctttctctattgtaatgtactgtaagtagtgaaattctgtatatactgctattttctgtctgttcattgttgtgaacttcttatgtatattagtgaaataaattttcagctttcatgttgtttcctacaaaaaaaaatataaaaactcgagggggggccccgtacccaattcgccctatagtgagtcggattacaattcactggccgtcgttttacaacgtcgtgactgggtggcgtatagc

SEQ ID NO: 13529 - DNA, 2635 bp, Homo sapiens
  misc_feature 1520, 1599, 1663: n = A,T,C or G
gtggtagagaagacgggattcaggacaatctccagcatggcctgggcttccctctcctcctcaccctcctcactcactgtgcagggtcctgggcccagtctgtgctgactcagccaccctcagcgtctgggacccccgggcagagggtcaccatctcttgttctggaagcagctccaacatcggaaataattatgtaagctggtaccagcagctcccaggaacggcccccaaactcctcatctatagtaataatcagcggccctcaggggtccctgaccgattctctggctccaagtctggcacctcagcctccctggccatcagtgggctccagtctgaggatgaggctgattattactgtgcagcatgggatgacagcctgaatggttatgtcttcggaactgggaccaaggtcaccgtcctaggtcagcccaaggccaaccccactgtcactctgttcccgccctcctctgaggagctccaagccaacaaggccacactagtgtgtctgatcagtgacttctacccgggagctgtgacagtggcctggaaggcagatggcagccccgtcaaggcgggagtggagaccaccaaaccctccaaacagagcaacaacaagtacgcggccagcagctacctgagcctgacgcccgagcagtggaagtcccacagaagctacagctgccaggtcacgcatgaagggagcaccgtggagaagacagtggcccctacagaatgttcataggttcccaactctaacccctcccctgggatcctgcagctctagtctcccgtggtggggggtgagggatgagaacctatgaacattctgtaggggccactgtcttctccacggtgctcccttcatgcgtgacctggcagctgtagcttctgtgggacttccactgctcaggcgtcaggctcagatagctgctggccgcgtacttgttgttgctttgtttggagggtgtggtggtctccactcccgccttgacggggctgctatctgccttccaggccactgtcacggctcccgggtagaagtcacttatgagacacaccagtgtggccttgttggcttgaagctcctcagaggagggtgggaacagagtgaccgagggggcagccttgggctgacctaggacggtcaacttggtccctccgccgaacacccccaaaccaaagtggctgctgtcatcccatgctgacagtaataatcagcctcatcctcagcctggagccccagtgatggccagggaggctgaggtgccagacttggagccagagaatcggtcagggacccctgagggccgattgttgttaccatagatgaggagtttgggggctgttcccggaagttgctggtaccagtgtacatcagaacctgccccgatgttggagctgctcccagtgcaggagatggtgaccctctgccctggggccccagacactgagggcggctgcgtcaacacagactgggcccaggaccgttcccagtttgtggagacaccgggtcctntcatgtggctcctccctggtggccagggctctccttcctctgtggatcctgcagcgctgaatagaagggaagctcttcnctctaggaggcccagggcacattcccagagggttattctggtcaatcttcattctctacttccnctgaattgcagtcatagtcatctggatcttgtgaccgggctgagctgtgtctcacatacaggacaaggctgctcatggccctctccctgcccaggaatgctcttcctggtggatgccccatcagctcttagggtgagggcagagcgaggagcaggtccacagctacctctcccagttcagccccatcctgggtccagtataatgtgtcccatgtgataagagacttgcagtcatagtcatcgggatccctgtgaccagggatctcacctaggagtctgttctccatcactgaatgccaatcctgcgggggatcctgggcaaatgactttgcagtgttttgctaaagagcaaaacaagcaaatatgcctcagtatttgaagatggaagagttaaaacttcagcttgttttgaccagagtctgtacttaagtgagcctgacacgtggtagcttttaggatcaaccatttccaactagggtgtttaggaaataatactgttcaaaatcgctaatgagtgttttgggcatgtctgaaagatgatagaaattattcatctttgatgtgtaatgaaacttcctcatgggtctggagcactgtgtgagtcttagagttgctgtgccatgtaccacagtaatagtcagcctcatcctcaggctggagcccagagatacgcagaatccctgcattggctgatgcatcgttggatccagagaagcggctgggaactccagagccttggcccttattggagtctgagtggtagtacaggagataccggggagggttccctggcttttgttggtaccaccttatccagaagtccccaacactgaagccactgctcagcatgcaggtgagtctgactgatgctccagaagatgcagaatgggaagatggctgagtcagcacaggctgggagagggaacctgtgcagtgagagaggagcacgtagaaggagatagagtccaggcca

SEQ ID NO: 13530 - DNA, 1802 bp, Homo sapiens
  misc_feature 1, 1679, 1680, 1681, 1682, 1683, 1684, 1685, 1686, 1687,1688, 1689, 1690, 1691, 1789, 1790, 1791, 1792, 1793, 1794,1795, 1796, 1797, 1798, 1799, 1800, 1801, 1802: n = A,T,C or G
nagaaacagcaaacttaggctaggtacgaggctgggtggttgcagcttattggagggctatcttgccttacggctccaagccgctttttacggcgtttttcaagctcgccattcacttcgctgtgaagatggcgtcgggcagcgggacaaaaaacttggactttcgccgaaagtgggacaaagatgaatatgagaaactcgccgagaagaggctcacggaagagagagaaaagaaagatggaaaaccagtgcagcctgtcaagcgagagcttttacggcatagggactacaaggtggacttggaatccaagcttgggaagacaattgtcattaccaagacaacccctcaatctgagatgggaggatattactgcaatgtctgtgactgtgtggtgaaggactccatcaactttctggatcacattaatggaaagaaacatcagagaaacctgggcatgtctatgcgtgtggaacgttccaccctggatcaggtgaagaaacgttttgaggtcaacaagaagaagatggaagagaagcagaaggattatgattttgaggaaaggatgaaggagctcagagaagaggaggaaaaggccaaagcgtacaagaaagagaaacagaaggagaagaaaaggagggctgaggaggacttgacatttgaggaggacgatgagatggcagctgtgatgggcttctctggctttggttccaccaagaagagttactgaggctttctgtgcttggcctgactttggcctatgctggacctaactttgcgtgtgtgtgtgtgtagtagggggtcatttctttttgggtaatgggaaagttcttaagagtgtcaatggggagggatagagggtgggggctcatggtttccctctactttgggagagggcacagattgcagaggtaatgctgtggcatattgcttctgcctcagtgtatcactggagtcacaggaccctgcccacctgagttcccaataaagaaaaacctccccttctgaggctgctttcccaaaactccccctgcatctttatctcttcatctatcccacctcttgtctgaacatcccacctttatcctgtgttctgcctttgttttaattttaactcatgttcatcctgcaacagaagcattctctaggtcccagtttccagttgattgcatatccttgatcagccctttttcccatcctgccctatggttctctagccacctgtgcatgcatgtgtatttctgcctggttctatggtgtgtggatgtgtgtgcatgaatctgtcatatagagggggtccgagctggaatcctagagcattgctgccctggggcctgatgttcttggcttcctcagagcatgtaacaggaaattaaatgggatgagtgtttggtgtggtttgtgtctgatgagttttttaacattcaggtgtagattgtttcagcttctcttgtttcattttcctgaagatttatgtttttgtctaccttgtgagcaggcttttggaagaacctgtttgatgcaaaaaagaaaatgaaaaacaaaacaaaaaatccccaaaaccttattatgggagcccgtcggtcttagaagctgtttgacatgtataataaatggcattgactgggcctgttttacaaaaaaaaaaaaaaaaaaaaaaaaaaaaaaaaaaaaaaaaaannnnnnnnnnnnnaataagaaaagaaaggagagtacaactaattctaaggaacctggggcggcccgttatataaattaaaaaaaaaaccctccccccctccccttaaaccnnnnnnnnnnnnnn

SEQ ID NO: 13531 - DNA, 1200 bp, Homo sapiens
  misc_feature 1198, 1199, 1200: n = A,T,C or G
cgacccacccgtcccgcggggcctgtgacaccgcacgctgagctctgtgatgtagccgcttgcggagactgcaagcagccgcggcgcgcccggccctccctcttccgctgccgccgtgggaatggaaacatctgccccacgtgccggaagccaagtggtggcgacaactgcgcgccactccgcggcctaccgcgcagatcctctacgtgtgtcctcgcgagacaagctcaccgaaatggccgcgtccagtcaaggaaactttgagggaaattttgagtcactggaccttgcggaatttgctaagaagcagccatggtggcgtaagctgttcgggcaggaatctggaccttcagcagaaaagtatagcgtggcaacccagctgttcattggaggtgtcactggatggtgcacaggtttcatattccagaaggttggaaagttggctgcaacagctgtgggaggtggattttttctccttcagcttgcaaaccatactgggtacatcaaagttgactggcaacgagtggagaaggacatgaagaaagccaaagagcagctgaagatccgtaagagcaatcagatacctactgaggtcaggagcaaagctgaggaggtggtgtcatttgtgaagaagaatgttctagtaactgggggatttttcggaggctttctgcttggcatggcatcctaaggaagatgacctcatgttcattgttcctggttttttccagccagcagcctctacactccatcataggacatcgagtccctcctcctcttctcccatgccttcttccctgccatggcaaatctgagtggcttctctaagcatctgctggtacaagtcaatgtggcaccatgagcttcatggtggcagaagagacaatagtccttagctctcctcccagtacaccccctacttggccagtctgtaggccaacaagaaggttcctttacccccatgcaagacacttatgagaacacattacaagatggctgaccgtggaggatgagtggatcctgaaaggttgtcccaaactgttgatttggaaaagaaataagcacatagataaccttattgtgtgctgcatggaaaggaactgaatacatttgcctttaagcatgaaaaaaaaaaaaaaaaaaaaaaacttgggggaattaaggcgggggggggaaaagggggtatggaattgggcannn

SEQ ID NO: 13532 - DNA, 1525 bp, Homo sapiens
tccaccgcggtggcggccgcccgggcaggtacgcggggaggctggccggcggcgctgggaggtggagtcgttgctgttgctgtttgtgagcctgtggcgcggcttctgtgggccggaaccttaaagatagccgcaatggctgaaaatggtgataatgaaaagatggctgccctggaggccaaaatctgtcatcaaattgagtattattttggcgacttcaatttgccacgggacaagtttctaaaggaacagataaaactggatgaaggctgggtacctttggagataatgataaaattcaacaggttgaaccgtctaacaacagactttaatgtaattgtggaagcattgagcaaatccaaggcagaactcatggaaatcagtgaagataaaactaaaatcagaaggtctccaagcaaacccctacctgaagtgactgatgagtataaaaatgatgtaaaaacagatctgtttatattaaaggcttcccaactgatgcaactcttgatgacataaaagaatggttagaagataaaggtcaagtactaaatattcagatgagaagaacattgcataaagcatttaagggatcaatttttgttgtgtttgatagcattgaatctgctaagaaatttgtagagacccctggccagaagtacaaagaaacagacctgctaatacttttcaaggacgattactttgccaaaaaaaatgaagaaagaaaacaaaataaagtggaagctaaattaagagctaaacaggagcaagaagcaaaacaaaagttagaagaagatgctgaaatgaaatctctagaagaaaagattggatgcttgctgaaattttcgggtgatttagatgatcagacctgtagagaagatttacacatacttttctcaaatcatggtgaaataaaatggatagacttcgtcagaggagcaaaagaggggataattctatttaaagaaaaagccaaggaagcattgggtaaagccaaagatgcaaataatggtaacctacaattaaggaacaaagaagtgacttgggaagtactagaaggagaggtggaaaaagaagcactgaagaaaataatagaagaccaacaagaatccctaaacaaatggaagtcaaaaggtcgtagatttaaaggaaaaggaaagggtaataaagctgcccagcctgggtctggtaaaggaaaagtacagtttcagggcaagaaaacgaaatttgctagtgatgatgaacatgatgaacatgatgaaaatggtgcaactggacctgtgagaagagcaagagaagtaacagacgaagaagaagcctgcatccaaacaacagaaaacagaaaatgggtgctggagaccagtagtttagtaaacgcatgggttattcgttgtgaataggttttaaacgacttttgattgcggggctgttaagaggaagaccgagttaggtacacttcgatgtacacctgtgagagaggaaagatttgttgtagtgtagcttgtcttgtgttatgcaatgaggttcc

SEQ ID NO: 13533 - DNA, 1106 bp, Homo sapiens
  misc_feature 1, 2, 3, 4, 5, 81, 1100, 1101, 1102, 1103, 1104, 1105, 1106: n = A,T,C or G
nnnnncatatttgtttaagtcccttaaggatgacaagcaaacacttagtgttcttttgtcagccatcacaagaagaagtgngcattagatatccagaacagcagcctgctatccaatctgtttatctaacaataatagttaaggggagctctgcaggtcagcaaagctagtccaggattacaaactgccatacatgagctacatgtcaattagttggattatgtataagatagcattttatgaaataatgctcttaatacaaaaacccctatatgttactaaaagattaaacttaaaaggagggtataaaaaacattcacagaaaatatttattatgctactctttgtactatgtatgggaacagtatgtttgttaagtccaagagaaaagataattcactgacatgaaacacccaaatgtcttcattttaaaagtagtttagagatagcatcaggtaggccaaacaactgtactgggcccctgtagagattagggtttggtctattaaaaaaaatctttgcttgctggaactgcaagcttggcttccctgcaagctcaataggttctggagctcatttaccatgtcgctcgctggatcccagaaagttgcccatggtcagctaagtgacggaagactatacgactaagcctccagcgccgcttcacaccacgcggacgggacgtcataacacaccgatttctgattctaacaggacagctatcccgggggagggcagcaatttcttcatcagccacatcctgaagaatttttggcaaaatggtattcttcctgagtgaattaatacgtagcctctcatctgcgtattcataggccatttttcgtctcttcacatcgcgccacattctccagtctacatagtgacttcgaacttggcctgaagctgatgaaggaaccatcgagcactacaggtggcagagccgtgggggacccgtgggttatgagattcagcggtgaggggtagcggtgtggataaaagtagaggcctgacctgcttgaacgtccgcagcagcgagcccagcatgaaggccgccatgttgtccgctacaaaaaaccccgtgtacgtcggccgccacagcnnnnnnn

SEQ ID NO: 13534 - DNA, 3250 bp, Homo sapiens
  misc_feature 3238, 3239, 3240, 3241, 3242, 3243, 3244, 3245, 3246, 3247,3248, 3249, 3250: n = A,T,C or G
accaattgttccattcaaccagcaaaacaaaaaaatgattattaccgaggattcattgcccagcctagaagccatcttgaactattccattttcaaccgtgaaaatgacctgctggcccagtttgatgccatcccaggcaaaaaaggcactcgtgttctcatttggaacatccgcagaaataaaaatggaaaatctgagttggactttgatacagatcaatatgacatcctggtatcagactttgacacagaagaaaaaatgacctggcggtgttacctctgagctaccagaaacagaatattctttaagggcattttgtggtattctatacatgaagccacgcatgaaaatttttctgcgtcaaaagaaggtgactacccagatgattgccaagagcctggccaatgtagaatatgatacatataaacctaccttcacaaataagcaggtgagaatcacctttgggttctcttgcaagaatagtaaccagtttggaataatgatgtatcataacaaccgactcataaaatcttttgagaaggtggggtgccaggtgaagccaactcgtggagaaggtgtaggagtaattggagtcattgagtgcaatttcctaaaacctgcctacaacaaacaagactttgagtataccaaggagtaccggctaacaataaatgcccttgcccagaagctcaatgcttactggaaggaaaaaacatctcaagataattttgagacctcaactgtagccaggccaataccgaaggttcctgaccagacatgggttcagtgtgatgagtgtcttaaatggagaaagcttcctgggaagattgatccatccatgttacctgcaagatggttttgttattataattcccatccaaagtacaggagatgctctgttccagaggaacaagaactcattgatgaagacctgtgcttgggcaaagctaagaaacaagaacaaactgttgaggagaagaagaagatgcctatggaaaatgagaaccaccaggtattcagtaatccaccaaagatccttactgttcaagaaatggctggattgaataacaagacaattggatatgagggaattcatagccctagtgtgcttccttctggtggagaagaaagcagatcaccatctcttcaacttaagcctctggattccagtgttttacagttttccagtaagtacaaatggatcctaggtgaagaaccggtggagaaacgaagaaggctccagaatgagatgacaacaccttctctagattattccatgcctgctccttacaggagggtagaagcacctgttgcctacccagaaggggagaacagccatgataaatcgagttctgagagaagtacaccaccataccttttcccagaatacccagaagcaagcaagaatacaggtcagaatagggaggtttcaattctgtatccaggggccaaagaccaacgccaggggtccctgcttcctgaagaattagaagatcagatgccaagattggtggcagaagaatctaacagaggtagcacaaccataaacaaagaagaagtcaacaagggaccttttgtagctgttgtgggtgttgccaaaggtgttagagattcaggagctcccattcagctgatcccttttaacagagaggagcttgctgagagacgaaaagcagttgaatcctggaacccagtgccttattctgtggcctctgctgcaatccctgctgcagccattggggagaaagcaagaggctatgaggagagcgaaggtcataatacaccaaagttgaagaaccagagagagctggaagaattgaagagaaccacagaaaaattggaacgtgttttggctgaaaggaatttgttccagcaaaaggtggaggagctggaacaggagaggaatcactggcagtctgaattcaagaaagtccaacatgaattggtgatctacagtacccaggaggcggaaggcttgtactggagcaagaaacacatgggttatcgccaagctgaattccagattctgaaagctgagctggaaagaaccaaagaggaaaagcaagagttaaaagagaaactgaaggaaacagagacacacctggaaatgctgcagaaggctcaggtctcctaccggaccccagagggagatgacctagaaagggctttggcaaagcttacgcggctacgtatccacgtcagctatctccttacttctgtcctccctcacttggagcttcgtgagatcgggtatgactcagaacaagtggatgggatcctgtacacggtgctggaggcaaatcacatactggattgagcaccagactgtatacccttctcttctcttatcttctgtctgttctcttttctctccctccctcacgtctctctctctctctctctctctctctctctctctcaccctcacctttatgccttatatagagaatctctgtgtaaatcctggctcataatcagtctcctttttatcagttttggtgtggagaaagaggccagtttaaataggctttcaagagtctagggtcagaaaagcaatagtcactaagctaggtgacctgaaagctttaattttcatgacctggatatgtggtctattgtatatctttttctgaaatggtttgtattcatttaggttagatcaatcagcagatattgggtccggtataccaggtattattttggggtaagctaacaagtacaactcatgtttgcagccttcgaagatgtaacaatctcgttggaaacataagacatacatcacattatacacaaaagtgtatgatatgtacaactgagtggtacagatatgacatggaagatctgggggaggaagttcaaggaaggcaccacaccagaaatgggacctaaattaaggcttaaagaatgagcatggccacactgtcagtgagtgttctttaggtggtaggactatggttgatatttttcttcttcctatcttcctgcctttttcagattttcaatattaaacttgttattcttacattggaaaaaaataaattgtttcttaaaaagaggaaacaaaaaccaaacaacaaacaaaaaaacaaaaacatagaagggccgtcacggcaacctcatgcaaacaaacacaaccaacaacaggaacaggagcagatagtggcctctcgagactcaggcaagcggggagaacagggctcctaacaccaggatcccccagcacgacaaaccagtgcnnnnnnnnnnnnn

SEQ ID NO: 13535 - DNA, 431 bp, Homo sapiens
  misc_feature 429, 430, 431: n = A,T,C or G
cgtacgcgggggtgatgatggagacatacactggagtgatgcagctacaaaccaaggaacaccaaggaccaccagcaatgactagagctaggagagaggcatggaatagattctcccacagagctgccagaaggaaccagcattgccaacatcttatttcagacttctagcctccagaattgtgagagaataaatttttgttgttttcagccttccaatttgtgataatttgctatggtagccctaggaaaataatacatctggattccagctttccactcacatcatcgttttctccatccttcccatgtctacatattgttgttccagattaaagatatcttgatgtcacaggtgctgggaattgtttttgtaactctttctcttggtggctctgtggtgattgactcccaaggacaaaaggaggcnnn

SEQ ID NO: 13536 - DNA, 221 bp, Homo sapiens
  misc_feature 220, 221: n = A,T,C or G
acccctgaacttaaaataaaagttaaaaaaatgcaaagtgcttaggaaactctctttagtgcttatctcattgaaaagtattagaagctctttaagtgaccagagaagggcttgtgcttcttactttagagatgaggaaattaagtaacttgttcacagtcacctacttacagagaagtggagctggttctcatatacataatattctaagtactttaann

SEQ ID NO: 13537 - DNA, 5632 bp, Homo sapiens
  misc_feature 1, 5631, 5632: n = A,T,C or G
naattttctgcaaggatcatatctaagtgcactttttgctgatacttcatttctagacattgagtctcactctaccccccaggctgaagtgcagtggtgtgatctcggttcactgcaacctccgcctccaggttcaagtgattctcgtacctcagcctcccgagtagctgggattacaggcgcctgccaccatgcctggctgatatttatatttttagtagagatggagtttcaccatgttggccaggctggtctcgaactctggacctcagatcttgtagaaaatttcagctgtagcccttggactagaagctgaaataacagaagctgtgtacgatgcattagggtattgaagaaaattaacttttgaattaaatatttggaatataaggaaataaggaaagttgactgaaaatggggcggaagaaaatacaaatcacacgcataatggatgaaaggaaccgacaggtcacttttacaaagagaaagtttggattaatgaagaaagcctatgaacttagtgtgctctgtgactgtgaaatagcactcatcattttcaacagctctaacaaactgtttcaatatgctagcactgatatggacaaagttcttctcaagtatacagaatataatgaacctcatgaaagcagaaccaactcggatattgttgaggctctgaacaagaaggaacacagagggtgcgacagcccagaccctgatacttcatatgtgctaactccacatacagaagaaaaatataaaaaaattaatgaggaatttgataatatgatgcggaatcataaaatcgcacctggtctgccacctcagaacttttcaatgtctgtcacagttccagtgaccagccccaatgctttgtcctacactaacccagggagttcactggtgtccccatctttggcagccagctcaacgttaacagattcaagcatgctctctccacctcaaaccacattacatagaaatgtgtctcctggagctcctcagagaccaccaagtactggcaatgcaggtgggatgttgagcactacagacctcacagtgccaaatggagctggaagcagtccagtggggaatggatttgtaaactcaagagcttctccaaatttgattggagctactggtgcaaatagcttaggcaaagtcatgcctacaaagtctccccctccaccaggtggtggtaatcttggaatgaacagtaggaaaccagatcttcgagttgtcatccccccttcaagcaagggcatgatgcctccactatcggaggaagaggaattggagttgaacacccaaaggatcagtagttctcaagccactcaacctcttgctaccccagtcgtgtctgtgacaaccccaagcttgcctccgcaaggacttgtgtactcagcaatgccgactgcctacaacactgattattcactgaccagcgctgacctgtcagcccttcaaggcttcaactcgccaggaatgctgtcgctgggacaggtgtcggcctggcagcagcaccacctaggacaagcagccctcagctctcttgttgctggagggcagttatctcagggttccaatttatccattaataccaaccaaaacatcagcatcaagtccgaaccgatttcacctcctcgggatcgtatgaccccatcgggcttccagcagcagcagcagcagcagcagcagcagcagccgccgccaccaccgcagccccagccacaacccccgcagccccagccccgacaggaaatgggtcgctcccctgtggacagtctgagcagctctagtagctcctatgatggcagtgatcgggaggatccacggggcgacttccattctccaattgtgcttggccgacccccaaacactgaggacagagaaagcccttctgtaaagcgaatgaggatggacgcgtgggtgacctaaggcttccaagctgatgtttgtacttttgtgttactgcagtgacctgccctacatatctaaatcggtaaataaggacatgagttaaatatatttatatgtacatacatatatatatccctttacatatatatgtatgtgggtgtgagtgtgtgtgtatgtgtgggtgtgtgttacatacacagaatcaggcacttacctgcaaactccttgtaggtctgcagatgtgtgtcccatggcagacaaagcaccctgtaggcacagacaagtctggcacttccttggactacttgtttcgtaaagataaccagtttttgcagagaaacgtgtacccatatataattctcccacactagcttgcagaaacctagagggccccctacttgttttatttaactgtgcagtgactgtagttacttaagagaaaatgctttgtagaacagagcagtagaaaagcaggaaccaagaaagcaatactgtacataaaatgtcatttatattttccaacctggcatgggtgtctgttgcaaaggggtgcatgggaaagggctgttgatattaaaaacaaacaaaacaaaaaagccccacacataactgttttgcacgtgcaaaaatgtattgggtcaagaagtgatctttagctaataaagaaagagaatagaaaacacgcatgagatattcagaaaatactagcctagaaatatagagcattaacaaagtaaaattaatatattaagttataattggaatatgtcagaagtttctttttacattcatatcttaaaaattaaagaaactgattttagctcatgtatattttatatgaaagaaaacacccttatgaattgatgactatatataaaattatattcactacttttgaacacattctgctatgaattatttatataagccaaagctatatgttgtaacttttttttagagaatagctttatcttggtttaactctttagttttattttaagaggggaaaacaaaaatatcttgcaagcagaaccttggaaaaaaaaagccatgaacacttattctaaatgtaaattaaaagttgagccaaactctttgtgtatatagcatcttaaatatattatcacctttgatgtaagtacctatgtattgtatggtcaccagattaaaaagtatatttttgtggattgccgccaatctggggggaaaaggcgaggtcctttattaagtattcactgtttaatatttactattttgttaaatatactgtactttggattttaattattagcccagttttttcagaggattgtataaaggggtttctcccctcactggtggtgaatgtgtgatgttacattgtaatctttgtgctgtatgggttgagcatcattatatattttgtatgtgtacataaatagcaaagtggcaaaaaaaattggtgttaagttcatcctgcataagtataaaatgtgttgtaacagattttataaggcattatttaaaacttgccttttgtgaggaaaaaatgtagtagaaaaagctgacctaatttaattaatattagagaaaatggcaaaatagtagatgagcacaaaggttttataagtggtaaatgattaggggaaaataatcatggggaaagggatcttttttccttgaccctctgaaaacagaacgatgcagctggttacaaaatcctaccgttatcagctcttctgcacattgcagtgatgctttggtatgcggggagaaacactcttagggtgctggtccttggcatgactcttgccattctaattggaattagtgccaccctcagcttggattttgaacaaggccttattctttcaggaagacaactaatggatgatagcaagttcatccacttactgggcttgtgccatgagcaaaattcaaagtcctgtatatctttcattgtagatttttaaatactccttttcctaaaaaactcaagggtttaaaaattgctattttatattttaaatgatattgagcagctacctacaatttctatgtacattttgttccccccccaccaccacccccaaattacgttccttttgacattttcctcatctgctgtttgtgacaagtcatcagccagatttcctgactgacacataggtatgatcagtgcaggagagacctgcgcaccacaggctgcaaactggaggttctgttctcatggcagtttgggcagtaacttttgagagaggccaaaaaaaggaggatgacatgctgtctcctctcttcagtatagacattaggctcttattcagaaaggatttttctttaaaaatgtacttactttactgaactacttacaggcacatttcttcataaggccacacctaatccaaacaagacagtctcccaacactgaagttccaaaataatccttaccactttgtaaaccatttatagctttgaaagtgttaagtgattccttcgttattatttatgcatgttcatgaacttctgctgtacattggaataggagttaacacattcacatttactgtctattttcttgtgtgccttatgagatggcttttctgactgtatctcaatagtctttctttctatgcaggtttataatcagtacaactactgttttctaaaatactactactcaaggctcggagtttgtattcaagttacccttttcccatcctttcagtgtgggcatggagcatatggacttgacagacatctctcacccagacgcccacgtgtgaacacacccacatccacatctctgggtggaaaccagcctagagtggggacgacgctaatggtgttgctttagaaccgtcttttcttacccttttagactcgtgttttgtatgagacaccattgcaagaaaattttatccctccagaagtattttattactaaagaacaaaagcaaaaaaagcttaaattgcactggttaaagtacagtttccaacagctgtccttcctcagtactctaatggccactccaccgcgagtggaagtcactgttgtgtgtacacaggtggtcccaatcaaaactccatcttttgagcccaattatgtccattttgttatagactaaatcaggggtttgttctacaagaacaatacatgttttaccctttcctttaactagaaggataactagtaatgcatcaacataatttctgtattaaccatcatgcgcacaagaaatacatagtaaataaggaagctgaaaactcctggcattggatcttaagctagatgattagaatgtgaaaaagattttacaaatgtaaaacttctatttctctgtagaaactttcttcactttgctgtgcaagaagacactgctttgctatatttaaaatggcttttttaaaagagatttatgtatttggtaaatgtttgtagtcaacagttcacacaagaagctgtacacggtttgatcatgtaaaaccgtttggcggcacaagctggactttgttgccatccttgagatgaaccttttaagaaaaataagttaatctcaatttttccctgaatgtgttgtttttcttcattatacaataaatataatagtgaactttttatcaaatggtgaaaactgggggcggaaagaaggaggccagagcgcgtaatggttccaagcgcggggaccatgttgtgtttacttctggccataacacatactacctgttatctcnn

SEQ ID NO: 13538 - DNA, 873 bp, Homo sapiens
  misc_feature 1, 2, 58, 781, 872, 873: n = A,T,C or G
nncactattagggcgaattggagctccacgcggtggcggcccgagtaccaggcccaanataactttatgatgatggatgatgctgtcctctgcatgtgtttcagcagagatacagaaatgttagcaactggggcccaagatggaaaaatcaaggtgtggaagattcagagtggacaatgtttaaggagatttgagagggcacacagtaagggtgtcacctgtctaagcttttctaaggatagcagtcagatccttagtgcttcttttgaccagacaattagaattcatggtttaaaatctgggaaaaccctgaaggaatttcgtggccattcctcctttgttaacgaagcaacatttacacaagatggacattacattattagtgcatcctctgatggcactgtaaaggttaagtatttgctatcagtttattttgggatgtctaccccatctttgtcctttgaggagttttcagtggtgataatgggaatgattgtgctgtagtaaacctctttcctggctattttagctgtaattgaggtgagtctgagacaacaacagtattctgtgggtaattcccattggccttgggaccccaatctcaaaccttttcaatccaaacaaactttatcatgtgtaggaaaagaggaagggtgaagagtcctaaacttaagccatcccccattcacagatacacatggtggttaaatctgttttgccataggtatggtccacctgctaacagtcaaattcacgaaagtctcagtggcctaataaatangatctcttttttgttgcacagcctcactgcactcctggtccccagatttagggccttcctagtagcatttatagaggaataggagaggtgnn

SEQ ID NO: 13539 - DNA, 1469 bp, Homo sapiens
  misc_feature 1, 2, 3, 45, 1468, 1469: n = A,T,C or G
nnnccgccattcttaagtaaatcaactatttttcaacacttgaanaaaaatgaaacattatttagaaaacaatgagattacaagttccaaactcagccaggaatgtggctcacacctgtaatcccagcactttgggacacctaggtgggagcatcgcttgaagccaggagttcaagaccagcttgggcaacgtagtgagacccctatctctacaaaaaataaaaaaattagctgggtgtgatggcacacacctgttgtcccagctactcaagaagctgagatgggaggatcctgagctcaggaggtcaaggctgcagtgagccgagattgtgccactgcactgcagctggggtgacagtgcaagaccctgtctcaaaccaaaccaaaccacacacacacaaacacacatacacacacacacacacgaggtccaaatggtagcagggatccaaagggaacacagtatgtaggtcaaactggcagtaacagtgtacagcctttgacaaactagaaatattagagtaggccaaacacacctccaaactgtaaggctgtgcacaaacataaaaaatggcagccttccatctcctgcactggctgagtccatttacttgtgtacttgttctagtgagtggtgggactgtacatttttgaatagacctcaaaaatacttcattctgctgctgttcagttggctttttaaacctgtctgcagtaggacactgaaaacagcaagaacttcggggtgaacacccgctgatcctttaacaaggatttctggcaggaaactcacaaaaaggagaactgaaaatttagacatacagttggccattgtaaaaaacatcagtttcctctcatacattccaagtaaaccaagtaaaataagtgttggagtaacacttgcataaaagaatttaaggagtgatagctctttctgttctgccattcccaacattcctgggggaaaggagactcaatgagttaatactatttcactgagcccaagatggaaacttggtttgacctaaaacatctgattaatataggctagctgatttcttaaaaattcgttgcattgaaggatattttgcatgtctgtaacacctgtcaatacttgtttgtattgatttctgatattcttgcagctgactacgtgtaattgggcagatcagctttgcagtagattatgctgcatcctcgtggcaaaattctgtattcttagtgattgttacaaacccctttattgctgtctgagaaagtgaaagattgtgtatttctattaaaacatttacaatcaaaaaaaaagggggggcacagaaaccacagggcacacgctgcccacccatgataaaggccaccagggagcaaaacgagcaccgcaccaaacgcgcgaaaagcacgcgagcggagccaacgtggttgcacacacaccgtcgacaacgcacaccgcacgatagaaacaagagann

SEQ ID NO: 13540 - DNA, 1597 bp, Homo sapiens
gtccgggaggcagcgctctcaggacatctccaccatggcctggcctctgctgctcctcaccctcctcactcagggcacagggtcctgggcccagtctgccctgactcagcctgcctccgtgtctgggtctcctggacagtcggtcaccatctcctgcactggaaccagcagcgacattggtggttataactatgtctcctggtaccaacagcacccaggcagagcccccaaactcatgatttctgaggtcagtaatcggccctcaggggtccctgatcgcttctctggctccaagtctggcaacacggcctccctgaccatctctgggctccaggctgaggacgaggctgattattactgcggctcatatacaagcgtcaataatgtcgatgtgctattcggcggagggaccaagctgaccgtcctaagtcagcccaaggctgccccctcggtcactctgttcccgccctcctctgaggagcttcaagccaacaaggcccacactggtgtgtctcataagtgacttctacccgggagctgtgacagtggcctggaaggcagatagcagccccgtcaaggcgggagtggagaccaccacaccctccaaacaaagcaacaacaagtacgcggccagcagctatctgagcctgacgcctgagcagtggaagtcccacagaagctacagctgccaggtcacgcatgaagggagcaccgtggagaagacagtggcccctacagaatgttcataggttctcaaccctcaccccccaccacgggagactagagctgcaggatcccaggggaggggtgagggttgagaacctatgaacattctgtaggggccactgtcttctccacggtgctcccttcatgcgtgacctggcagctgtagcttttgtgggacttccactgctcaggcgtcaggctcagatagctgctggccgcgtacttgttgttgctttgtttggagggtgtggtggtctccactcccgccttgacggggctgctatctgccttccaggccactgtcacggctcccgggtagaagtcacttatgagacacaccagtgtggccttgttggcttgaagctcctcagaggagggcgggaacagagtgaccgagggggcagccttgggctgacccaggacggtcagcttggtccctccgccgaataccagagtgctgctgcttgtatatgagctgcagtaataatcagcctcgtcctcagcctggagcccagagatggtcagggaggccgtgttgccagacttggagccagagaagcgattagaaacccctgagggccgattactgacatcataaatcaggagtttgggggctttgcctgggtgttgttggaaccaggaaacatagttataactaccaatgtcattgaaggttccaatgcaggagatggtgatcgactgtccaggagacccagacacggaggcaggctgagtcagggcagactgggcccaggaccctgtgccctgagtgaggagggtcaggagcagcagagcccaggccacggtggagacgccccgagagcgctgcctcctgagaccccccccgcgttaattaattctagaagtattt

SEQ ID NO: 13541 - DNA, 1585 bp, Homo sapiens
ggccgccttcttctttacaggggccttctccgcaggaggcgcggcagcgggagcggcaggagcagtctcggacatgttgagaatcaaaaaacctcggccggccgcccgggcaggtcggcggcgttggcggcttgtgcagcaatggccaagatcaaggctcgagatcttcgcgggaagaagaaggaggagctgctgaaacagctggacgacctgaaggtggagctgtcccagctgcgcgtcgccaaagtgacaggcggtgcggcctccaagctctctaagatccgagtcgtccggaaatccattgcccgtgttctcacagttattaaccagactcagaaagaaaacctcaggaaattctacaagggcaagaagtacaagcccctggacctgcggcctaagaagacacgtgccatgcgccgccggctcaacaagcacgaggagaacctgaagaccaagaagcagcagcggaaggagcggctgtacccgctgcggaagtacgcggtcaaggcctgaggggcgcattgtcaataaagcacagctggctgagaaaaaaaaagcacagacacatccaccaccgactctaaccaccgcaccgcacgcagaacacgtcacacacccacaaaaaaaaataattgtgcggggcgctgcgcccaaaaaaggttttcgacccccctgtgggggggcgcgccccagtgtatgtcaacatccccacggtgttccaagaaaacctggcgaacaaacggcgcggttcccacaaaaaaggggggggagagcggggttgaaacccaggcgtccaggcaccgcgtaacagggccaagcagaaccacccgcgggaggagagaacaacacgcacacgccctcaccgcagcgagccgcacaacagccgaccacgcagcagcacgcgacggagtgagcagaccggcagattgcagacggcagaacaaggcagccacggcagacgccacggaagatcagaggaagcgcgagaggagcgcggcgcctaggggacgcagcgcaggcgcaagacgaacgaagcaggcgcaagggagaggagacaccgcgcactggccgccgcaaagcggactgtaggcacgcaagcgggcatcgaggtgggccagcggagcgaggggcgcggtgcagtgtagcgagagtgaggggatacaggatggagcgggaggccgactgcgcggtggggcgcgaatgtgttgcgctgcgtagtggcggtcggcgagggccgtgtatgcgtgagaagtgacgctcggagcctgagcgtctggcgggcggtgtagttggggcgtagcgcggaggtaagctggtagcgacgaagagtggcaacgatagtacgcgacgcagcgccgacggggaagcacgggacccaacggcacggagaccgacggagcgccacgccggcagcgcgggagacggcgaggaccggcgacacagacacgaaaccgccagcgcgccgccgcagagcacgaagcgaccaaacgacagcaacccaccgcaagcaacacgccccgcagacacgaaagcaccaaccaccgaccgccaccagaaggaacaacagcggcccccgaccacgaca

SEQ ID NO: 13542 - DNA, 895 bp, Homo sapiens
  misc_feature 893, 894, 895: n = A,T,C or G
atagggagtcgacccacgcgtccggttggagcaggagcaggagagggacaatggaagctgccccgtccaggttcatgttcctcttatttctcctcacgtgtgagctggctgcagaagttgctgcagaagttgagaaatcctcagatggtcctggtgctgcccaggaacccacgtggctcacagatgtcccagctgccatggaattcattgctgccactgaggtggctgtcataggcttcttccaggatttagaaataccagcagtgcccatactccatagcatggtgcaaaaattcccaggcgtgtcatttgggatcagcactgattctgaggttctgacacactacaacatcactgggaacaccatctgcctctttcgcctggtagacaatgaacaactgaatttagaggacgaagacattgaaagcattgatgccaccaaattgagccgtttcattgagatcaacagcctccacatggtgacagagtacaaccctgtgactgtgattgggttattcaacagcgtaattcagattcatctcctcctgataatgaacaaggcctccccagagtatgaagagaacatgcacagataccagaaggcagccaagctcttccaggggaagattctctttattctggtggacagtggtatgaaagaaaatgggaaggtgatatcatttttcaaactaaaggagtctcaactgccagctttggcaatttaccagactctagatgacgagtgggatacactgcccacagcagaagtttccgtagagcatgtgcaaaacttttgtgatggattcctaagtggaaaattgttgaaagaaaatcgtgaatcagaaggaaagactccaaaggtggaactctgacttctccttggaactacatannn

SEQ ID NO: 13543 - DNA, 703 bp, Homo sapiens
cgacccacgcgtccgcaattgcttagacatattctgagcctacagcagaggaacctccagtctcagcaccatgaatcaaactgccattctgatttgctgccttatctttctgactctaagtggcattcaaggagtacctctctctagaactgtacgctgtacctgcatcagcattagtaatcaacctgttaatccaaggtctttagaaaaacttgaaattattcctgcaagccaattttgtccacgtgttgagatcattgctacaatgaaaaagaagggtgagaagagatgtctgaatccagaatctaaggccatcaagaatttactgaaagcagttagcaaggaaaggtctaaaagatctccttaaaaccagaggggagcaaaatcgatgcagtgcttccaaggatggaccacacagaggctgcctctcccatcacttccctacatggagtatatgtcaagccataattgttcttagtttgcagttacactaaaaggtgaccaatgatggtcaccaaatcagctgctactactcctgtaggaaggttaatgttcatcatcctaagctattcagtaataactctaccctggcactataatgtaagctctactgaggtgctatgttcttagtggatgttctgaccctgcttcaaatatttccctcacctttcccatcttccaagggtacctcggccgccaccgc

SEQ ID NO: 13544 - DNA, 1492 bp, Homo sapiens
  misc_feature 1, 2, 3, 1488, 1489, 1490, 1491, 1492: n = A,T,C or G
nnnagagacggggtttcaccgtgttggccaggatggtctcgatctcctgacctcgtgatccgcccgcctcggcctcccaaagtgctgggattacaggcgtgagccaccgcgctgggcctagatcaaatctttatccatgcacattggaacacaggattactgggttgaaatcattctagttttgtcatttagatacttgtagatgaatctattttagcacaaggtataaataactcgggaggtcatctctatcttctttccttttgtgcatttggctataccacgtttaggtactaaaacagctttgcttatgttggccaggggaaaacatggcattctgtgcgcaaagctaatgatcgccagccctgccttggcccctcccttgtttatggtcattgtaagatgcccgcatgttaaggcttaagctgtcactgggctgggtgtaatacccgcttcattcctcctcccaccctcttacccgaaacatgaagggcactgtgctctattgagatctcgataagatcatcattttaacttgtattcaactgagggaggtaacatgatatctgggtgctggtggattgagacctcaagcatcaattcaaaattgctgtcgaaaatatgcactattttttttttccactctggctaagtgtaggctctgaagccagttttatagcttgatacattctggtgaaagatgtcttcatttttaatgaaagaacctacagttagtaggtgtcacctcagggtagaaattctgatagaaattctgattatttgaaactctgatagaaatcctagatgctagatttgaagaaaacctgggttttattgcatagatttcaccttttctggggcacatcttaccccaaaataattggggatttttttgttccttctccattccatggaaccttgtagggtgttgggattgggcctcccctcgccacccgccacatgtctttgtttttttctctcttttgtatgtggaaaaatgtatttttgtaccatatctcatacctggagagaaaccttttttctatcttcagggctgtagaatatattagcgtaacacttcactgaatgtgacgtaaaagcattctgatgaaaactggttctgttataattaagactcagtgtttaaaatatcttaatcagtgttaatttcccagtgtttcagtatcacagtaaatacttgttttactgagaacagaaaataatccagaaaaggaaaaggaccagccctctctagattgctggaattgtatggatgtgtggggcgtggttaggatctcttcttgaaacctagaaagatgctttgtgggtggaacctttctaatatatttcacgggggcaggcagctgtatcccccttggagccggggggtactcgggggtataaacacctgccaattaatcctttcaaaaaaaaaagggggcgaaactagggactccccatataagtcaattataagccctaaaatannnnn

SEQ ID NO: 13545 - DNA, 963 bp, Homo sapiens
agggagtcgacccacgcgtccgcagagttgagagacagaggcaccccggacagagacgtgaagcactgaataaatagatcagaatgactgaaaaagccccagagccacatgtggaggaggatgacgatgatgagctggacagcaagctcaattataagcctccaccacagaagtccctgaaagagctgcaggaaatggacaaagatgatgagagtctaattaagtacaagaaaacgctgctgggagatggtcctgtggtgacagatccgaaagcccccaatgtcgttgtcacccggctcaccctggtttgtgagagtgccccgggaccaatcaccatggaccttactggagatctggaagccctcaaaaaggaaaccattgtgttaaaggaaggttctgaatatagagtccacacctacaggactggggtgaaagtggataaagcaacatttatggttggcagctatggaccctcggcctgaggagtatgagttcctcactccagttgaggaggctcccaagggcatgctggcccgaggcacgtaccacaacaagtccttcttcaccgacgatgacaagcaagaccacctcagctgggagtggaacctgtcgattaagaaggagtggacagaatgaatgcatccacccctttccccacccttgccacctggaagaattctctcaggcgtgttcagcaccctgtccctcctccctgtccacagctgggtccctcttcaacactgccacatttccttattgatgcatcttttcccaccctgtcactcaacgtggtccctagaacaagaggcttaaaaccgggctttcacccaacctgctccctctgatcctccatcagggggagcaggttggcttaaaccgggctttcacccaacctgctccctctgatcctccatcagggccagatcttccacgtctccatctcagtacctcggccgcgaccac

SEQ ID NO: 13546 - DNA, 2361 bp, Homo sapiens
  misc_feature 1, 2, 3, 4, 5, 2359, 2360, 2361: n = A,T,C or G
nnnnnatgctaggtacgaggccggcggtgttaaatcggccgacgcgtccgaaccggctcgcgagcgcagctatggctgctggcgtaccctgtgcgttagtcaccagctgctcctccgtcttctcaggagaccagctggtccaacatatccttggaacagaagatcttattgtggaagtgacttccaatgatgctgtgagattttatccctggaccattgataataaatactattcagcagacatcaatctatgtgtggtgccaaacaaatttcttgttactgcagagattgcagaatctgtccaagcatttgtggtttactttgacagcacacaaaaatcgggccttgatagtgtctcctcatggcttccactggcaaaagcatggttacctgaggtgatgatcttggtctgcgatagagtgtctgaagatggtataaaccgacaaaaagctcaagaatggtgcatcaaacatggctttgaattggtagaacttagtccagaggagttgcctgaggaggatgatgacttcccagaatctacaggagtaaagcgaattgtccaagccctgaatgccaatgtgtggtccaatgtagtgatgaagaatgataggaaccaaggctttagccttctcaactcattgactggaacaaaccatagcattgggtcagcagatccctgtcacccagagcaaccccatttgccagcagcagatagtactgaatccctctctgatcatcggggtggtgcatctaacacaacagatgcccaggttgatagcattgtggatcccatgttagatctggatattcaagaattagccagtcttaccactggaggaggagatgtggagaattttgaaagactcttttcaaagttaaaggaaatgaaagacaaggctgcgacgcttcctcatgagcaaagaaaagtgcatgcagaaaaggtggccaaagcattctggatggcaatcgggggagacagagatgaaattgaaggcctttcatctgatgaagagcactgaattattcatactagggtttgaccaacaaagatgctagctgtctctgagatacctctctactcagcccagtcatattttgccaaaattgcccttatcatgttggctgcctgacttgtttatagggtccccttaattttagtttttagtaggaggttaaggagaaatcttttttttcctcagtatattgtaagagagtgaggaatacagtgatagtaatgagtgaggatttcttaaatatactttttttttgttctaggaatgagggtaggataaatctcagaggtctgtgtgatttactcaagttgaagacaacctccaggccattcctggtcaaccttttaagtagcatttccagcattcacacttgatactgcacatcaggagttgtgtcacctttcctgggtgatttgggttttctccattcaaggagcttgtagctctgagctatgatgcttttattgggaggaaaggaggcagctgcagaattgatgtgagctatgtggggccgaagtctcagcccgcagctaagtctctacctaagaaaatgcctctgggcattcttttgaagtatagtgtctgagctcatgctagaaagaatcaaaaagccagtgtggatttttagactgtaataaatgaggcaaaggatttctattccagtgggaaggaaacctctctactgagttgtgggggatatgttgtatgttagagagaaccttaaggagtccttgtatgggccatggagacagtatgtgataacataccgtgattttcatgaagaaattcttctgtcttagagttctcccctgctgcttgagatgccagagctgtgttgttgcacacctgcaaaacaaggcacatttccccctttctctttaaagccaaagagagatcactgccaaagtgggagcactaaggggtgggtggggaagtgaaatgttaggcgatgaattcctgagcaccttgtttttcttccaaggttcgtagctcctctctgcccttccaagcctgtaacctcggaggactatcttttgttctttatcctttgtcttgtttgagtgggtcagccccagaggaactgataagcaaatggcaagtttttaaaggaagagtggaaagtactgcaaataaaaatccttatttgtttttgtagacaggctatcataagcccacgggacattaaggggggctgacggcctcgcaccggcggcagggccgcccacggaggccggccaaggggcaacacctcactacacagcggtcgcgcaaaagacccccaacataacaggacagcagaaaagagacgacagacgaaaaaacaaccagcacctaagcacccggannn

SEQ ID NO: 13547 - DNA, 1123 bp, Homo sapiens
gtagagctagcgactgacgctcccgacgtgtcccagtgcctccgcacagcgtggtgagcgtactgtggtagtagtatgcgccgcggttcggtattatagccctcctttggggcccgcgttttcccctgttgtcaaaaacggggtgccagagaacgagttgtggccctggccccttgtcaaaacccttttgtcccgcccgccggaaatagaggcccgggagtgtgtgtgtgtgatatgtttgcggatcgaaccaggggaaatatttattgagggtttattgagtgcagggagaagggcttgatgccttggggtgggaggagagacccctcccctggaatcctgcagctctagtctcccgtggtggggggtgagggttgagaacctatgaacattctgtaggggccactgtcttctccacggtgctcccttcatgcgtgacctggcagctgtagcttctgtgggacttccactgctcaggcgtcaggctcagatagctgctggccgcgtacttgttgttgctttgtttggagggtgtggtggtctccactcccgccttgacggggctgctatctgccttccaggccactgtcacggctcccgggtagaagtcacttatgagacacaccagtgtggccttgttggcttgaagctcctcagaggagggcgggaacagagtgaccgagggggcagccctgggctgacctaggacggtcggcttggtccctccgccgaataccacagtgctgctgtcccacgcctgacagtaatagtcagcctcatccatagcctgggtcccgctgatggtcagagtggctgtgttcccagagttggagccagagaatcgctcagggatccctgagggccgcttgttatcttgaaagatgaccagcacaggggactggcctggcttctgctgataccagcaagcatatttatcccccaatttatctccagagcaggtgatgctggctgtctgtcctggggacacggacactgagggtggctgagtcagctcataggaggccacggatcctgtgcagtaagcaaggacgccgaggaagagagggatccatgccatggctgaggcacctccgatgctgcttcctgaggcccagccccgcgt

SEQ ID NO: 13548 - DNA, 900 bp, Homo sapiens
actcgtccgctcaagtcctgttccccagatctttaaaccaaactactttgtatttggtcattctggggcaagtatcaactgggccaaaggccactacacagatggcgcccagctggttgattctgtcctgaatgtggtacggaaggaagcagagagctgtgactgcctgctgggcttccagctgacccactcactgggcgggggcacaggctctggaatgggcactctccttatcagcaagatccgagaagaataccctgatcgcatcatgaataccttcagtgtggtgccttcacccaaagtgtctgacaccgtggtcgagccctacaatgccaccctctccgtccatcagttggtagagaatactgatgagacctattgcattgacaacgaggccctctatgatatctgcttccgcactctgaagctgaccacaccaacctacggggatctgaacctccgcaagttggcagtcaacatggtccccttcccacgtctccatttctttatgcctggctttgcccctctcaccagccgtggaagccagcagtatcgagctctcacagtgccggaactcacccagcaggtcttcgatgccaagaacatgatggctgcctgtgacccccgccacggccgatacctcaccgtggctgctgtcttccgtggtcggatgtccatgaaggaggtcgatgagcagatgcttaacgtgcagaacaagaacagcagctactttgtggaatggatccccaacaatgtcaagacagccgtctgtgacatcccacctcgtggcctcaagatggcagtcaccttcattggcaatagcacagccatccaggagctcttcaagcatctcggagcagttcactgccatgttccgccggaaggccttcctccactggt

SEQ ID NO: 13549 - DNA, 1265 bp, Homo sapiens
  misc_feature 1, 2, 3, 4, 5, 6, 7, 1264, 1265: n = A,T,C or G
nnnnnnncgagagtcttctagaattaattaacgccgtcgactacgaagccgggggcgcccggagggggcacggagagcggtgcccgcgtcagtgaccgaaggaagagaccaagatgaatacagagcccgagaggaagtttggcgtggtggtggttggtgttggccgagccggctccgtgcggatgagggacttgcggaatccacacccttcctcagcgttcctgaacctgattggcttcgtgtcgagaagggagctcgggagcattgatggagtccagcagatttctttggaggatgctctttccagccaagaggtggaggtcgcctatatctgcagtgagagctccagccatgaggactacatcaggcagttccttaatgctggcaagcacgtccttgtggaataccccatgacactgtcattggcggccgctcaggaactgtgggagctggctgcgccagaacggccaagtctgcacgaggagcatgtgaactcttgcactggaggaatcgcttacctgaacacagaacgtggtggggaaagacctgctgacacagggtcgctcctcttcacagctggcccgttggaagcaagagcggcgatctgggcttcccctgcatccagcggccatctctcgcctgacctggctggtctccctctatggggagcttactactaggagtctggcacttatggcaagacgcgaaccggacgatcagtattctcaacatgccagatactgtcctgggacgaccacgaccacgcaacacgtccaactgtcatgggaattggagccacagggaccctggtctaacacggaaacagactctccagctcccatttcgaagttatgaggtccagagagacatgttgccccaattgtgggtacttgcacttacaccgctatatctcctgcaacaaacaccgactcatatttggtatccagacaagcctcttgcgtagccccaactcgcccggacacaagtgtacctcgtcatgctgataaaacagaccaccgcacttcatcggcagactgggttggtggtggctatcgcaccacaacaacgcccccgtcacattttgcggctgcccgcagaatacttaatgacggcgcgggatgttagatccctacaaccaaccatacgtacagcatatgggttgcttccaagcacgaggtaccaaactctcatttacaactaacccgtgctggctgacacacacacacaacacacaacacaccctcctctgtcatcgacataatcnn

SEQ ID NO: 13550 - DNA, 1429 bp, Homo sapiens
gcgtccgccccgagcccccagcctagccgggaggggcgcgcggggctggggcccggggcggggccgggcggcgggacccactgctcctcccaccagagcccccgcgcggccccgggtctcccgggcagctgcggcggcggcgctggcaccccggccccggcgggccccggcggagcggcgggcaaaggtcccaggaaggtggcgtcagcatctgcagccgcgtcgacgttgtcggagcctccgcggaggacccaggagagccggactaggaccagggccctgggcctccccacactccccatggagaagctggcggcctctacagagccccaagggcctcggccggtcctgggccgtgagagtgtccaggtgcccgatgaccaagactttcgcagcttccggtcagagtgtgaggctgaggtgggctggaacctgacctatagcagggctggggtgtctgtctgggtgcaggctgtggagatggatcggacgctgcacaagatcaagtgccggatggagtgctgtgatgtgccagccgagacactctacgacgtcctacacgacattgagtaccgcaagaaatgggacagcaacgtcattgagacttttgacatcgcccgcttgacagtcaacgctgacgtgggctattactcctggaggtgtcccaagcccctgaagaaccgtgatgtcatcaccctccgctcctggctccccatgggcgctgattacatcattatgaactactcagtcaaacatcccaaatacccacctcggaaagacttggtccgagctgtgtccatccagacgggctacctcatccagagcacagggcccaagagctgcgtcatcacctacctggcccaggtggaccccaaaggctccttacccaagtgggtggtgaataaatcttctcagttcctggctcccaaggccatgaagaagatgtacaaggcgtgcctcaagtaccccgagtggaaacagaagcacctgcctcacttcaagccgtggctgcacccggagcagagcccgttgccgagcctggcgctgtcggagctgtcggtgcagcatgcggactcactggagaacatcgacgagagcgcggtggccgagagcagagaggagcggatgggcggcgcgggcggcgagggcagcgacgacgacacctcgctcacctgagcgccgcaccgcttcagggacggagacaggaccgggcgagccctggggcggcggccgctcctgcactttctcccctcccccacccggcacctggtggcaccgggccaggcccaggcgggtgctgcagcctggctggacagagcccaataagatccccaggctcaaaaaaaaaaaaaaaccggcttttgtgggtgcggaaaaggtttaagggcctggctttgtctgccctttttcagggatccgccaaagagta

SEQ ID NO: 13551 - DNA, 2985 bp, Homo sapiens
  misc_feature 1, 2981, 2982, 2983, 2984, 2985: n = A,T,C or G
ncgccgggttgaaatcggacgaggtaacgggagcagagtcgggggattgagcattcccgcagcctccatcttggaagcggccgccggcgcctagaactgtatttcagaaaaaagaaactacagttttagcatgcagaaaggaaaagggagaacaagccggatcagaagacgaaaactctgcggaagttctgaatcaagaggagtgaatgagagccacaagtctgaatttatagagctgaggaagtggctgaaagctaggaagtttcaagattcaaacttagcgcctgcttgttttccaggtacaggaagagggctgatgagtcaaacatccctgcaggagggacagatgattatttcgttgcctgagagttgcctgctcaccacggacacagtgattcgaagctacttaggggcatacattactaagtggaagcctcctccatctcctctgctggcgctgtgcacctttttagtttcagaaaagcatgctgggcaccgatctctttggaagccttacctggagattttacccaaggcgtatacctgccctgtttgtttggagccggaagtggtgaaccttcttcccaaatctttaaaagcaaaggctgaagagcagagagcccacgtgcaggagttctttgcttcctccagagactttttctcttctctgcagcctctgtttgcggaggctgttgacagcatcttcagctacagtgccctgctgtgggcttggtgcaccgtcaacaccagagccgtgtacctgaggcccaggcagcgggaatgcctttctgcagagccggacacctgtgcactcgctccgtacctggacctgctgaatcatagcccacatgtccaggtaaaagcagcgtttaatgaagaaactcattcttacgaaattagaacgacttcacgttggagaaagcatgaagaggtattcatctgttacggccctcacgataatcaacggctgttcctggaatacggatttgtttctgtccataatcctcatgcttgtgtttatgtctcaagagaaatacttgttaaatatcttccatcaacagataaacagatggacaaaaagatttctattttaaaggatcatggctatatagaaaatttgacatttggatgggatggaccatcttggaggctactcacagcccttaagttgttatgtctggaagctgagaaatttacatgctggaaaaaagtacttcttggggaggtaatttcagatacgaatgagaagacaagtttggacatagcccagaaaatatgctattatttcatagaagagactaatgctgtgcttcaaaaggtgtctcatatgaaggatgaaaaagaggccctgataaaccaactaactttggtggaatccttgtggacggaagagctaaagattctcagggcatctgccgagaccctgcacagtttgcaaacagcttttacctgatttcaccgaagcgcatttggtcacctcctctgaaacaaaagttaattttgaagagcatcatcatgggctggggtggtggctgcccccaggacatgcaggatttctgcagggggcagcacaggttctgggattgtgaggctgtgagtgaaggtggacaagctgtctggatggcaggtctaatgctcttccgaataaagtgctgaactgtgaggagagaggcggactgtgaggcagccaggagccagctgcgtccgtgtgtggtctgtcaccacggggcctgcttcttatctgacacagcagctatcagagtctagtggttgtgcttttaagatgctctgataccattgggttaaggggcagattggcggtgggtgtggggcagtgtgaggtagtcctggatccccgccagggtggcccagacgccagcccttccctgtgtggctgcactgaggtgggtgttgaagagccccctaggggacacacagcttccaggaggagggaatgtcctctaagcatgctcctggcctctcaaggtggcgcttgtctaattattcacttgggaagaatgactagctcagccagcggctctttctgctttgttctggcgactttcctgggcaggcctttccacctggggagctggctcatcctgcacagctgggccgtggtgggcctgtctgcttgattctggggttcagtgtaggtcagctgatggcgaaccatggtggtggtttggcttctgttcttattcttgagttttgataccacgcagaccttgggtggggagagcttcctgcacagctctcagcggcctgtggccttggaactgcctgcgtaagtaacggaggggctgctggtcctgttcaggcccgtgctggggacgccgcttagacaatgttgcccagagtcctgtttaccctcccagggttcattcttcccaagaactcaaattcctttctcattggagcctagtgaaaccaaatgaacgggacctgctggcctcaggaggcaggcagagtttaaaataaaactttctcatgatttcttgaacatctttccctgtttgtatatacactttgtgtttatttttcagtagctgcagtatattttttttcaatattcagtataatgcagtgtatttcatcatatgctgtatggagagtgggcagacttctgtggagggcccgatagtaaccatttgaagctttctggacctgtggtcttagtcccagcgattctgcagagcggccatcggcagcatgtcaaccatttgcatggctgggctccagggaaactactgacaacgacaggtggtgggccatagtttcctgacccctgtgctatgccagaatttctttttcctcttccctatgagtggacctaaatatgttaattccttttcacctttcaaaacggacagccccttgaacattaaaaacttcgcagaccctaaaaaaaaaaaaaaaactccgggacctatggcggggggggaaaaggggtttgaatgggcatgttcatagttgttccnnnnn

SEQ ID NO: 13552 - DNA, 2407 bp, Homo sapiens
  misc_feature 2407: n = A,T,C or G
aacggtctgcggcccagtgccgaacggtggcccccggcgaccccctcgcacccagcgcccggccctcgccggagcaccgcctcccacccccggccaccggtggttcggcctgaccccgccccggcgcgcgccatcacgtccgcccgacgccgcctgacgctgcccgtgccgcctgacgccgcccgtcgccggcgcgcaggacacggcgccgagggtggggcgcgggcgtagtggcgccgggagtcgcgggtgcgcgcaggccgtgagtgtgcgcttttgagagtcgcggcggaaggagcccggccgccgcccgccggcatgagctacgaccgcgccatcaccgtcttctcgcccgacggccacctcttccaagtggagtacgcgcaggaggccgtcaagaagggctcgaccgcggttggtgttcgaggaagagacattgttgttcttggtgtggagaagaagtcagtggccaaactgcaggatgaaagaacagtgcggaagatctgtgctttggatgacaacgtctgcatggcctttgcaggcctcaccgccgatgcaaggatagtcatcaacagggcccgggtggagtgccagagccaccggctgactgtggaggacccggtcactgtggagtacatcacccgctacatcgccagtctgaagcagcgttatacgcagagcaatgggcgcaggccgtttggcatctctgccctcatcgtgggtttcgactttgatggcactcctaggctctatcagactgacccctcgggcacataccatgcctggaaggccaatgccataggccggggtgccaagtcagtgcgtgagttcctggagaagaactatactgacgaagccattgaaacagatgatctgaccattaagctggtgatcaaggcactcctggaagtggttcagtcaggtggcaaaaacattgaacttgctgtcatgaggcgagatcaatccctcaagattttaaatcctgaagaaattgagaagtatgttgctgaaattgaaaaagaaaaagaagaaaacgaaaagaagaaacaaaagaaagcatcatgatgaataaaatgtctttgcttgtaatttttaaattcatatcaatcatggatgagtctcgatgtgtaggcctttccattccatttattcacactgagtgtcctacaataaacttccgtatttttaacaaaaaacaaaacaaaacaaaaaaaaaaaaactttggggggggctcgggccttggagaaagttttctaacccacttgggtgggggggcgggcccaaccatggtaagtcgacacgtggccagcgtcggtcccaggacaacccgcgcagacagacttggcggggtttccacccaaaaaaaaccccgcggacaccgcgggttggaacaatccagagggtcgaggccacagggttccacacggggccagggatcgtataacacgcggagggtgcgaaaaagcacaccacacgacgccagaccacagagtgacgacacgagcgacgacaccaaaatcctacgaacctataacctaatacatactatacatctactaactattatcatacatcatataccacgtcacacacaccgacgccgagcacaacatatacactatcactcatccaaacacatcatatcacaatcttcgtcaactatactccacatcatcacctcacaccaagcacgccaccacatcaaaaacactcaacaaccacacactcaaacaaagcagacaagcccaacagcaccactccaccacaaccaaacccaccatgttacataccgaccgcatggccgctgcaagatgccggagtggcggcaggacagcgagagcgcgagcgcgacagaagcggcggcgggcgagcggcggtggcggcaagcggcacgaagcgagcctcggcgcagggcgagcgaggagcgtgtggagggagagaacagcacgaactgcgtacagggacgcgcagtgcgcggacgtgctggaggcggaaccgctgctacgggaaggaaacatggcgcacagaggggccgctggaagcagacatgggcggggtaggacgaagaggcagagaagacgcacgcggaagcatgatgagcaagacgacaacgacagcagcaggacacgcgaggcagcgcgtctgccgcgcgcgagggccctcgagcggagctgaagagcgcgcacacagacgaggtcagacatgacagagagacggcgccacacagcggagagaaggcgcacccagagacaaagcagaggcaaagggaggaacgacacacacgcacgcgaggcagccgcgtgaatcgaacgcgagagcgagtgcgcagaggaagacctgagaaaggggtcgagtaaaggcagagcgcgagcggcagcgagacgcaaccgatcagcatgcacagcn

SEQ ID NO: 13553 - DNA, 1294 bp, Homo sapiens
acgcggggactcccgagctctactgactcccaacagagcgcccaagaagaaaatggccataagtggagtccctgtgctaggatttttcatcatagctgtgctgatgagcgctcaggaatcatgggctatcaaagaagaacatgtgatcatccaggccgagttctatctgaatcctgaccaatcaggcgagtttatgtttgactttgatggtgatgggattttccatgtggatatggcaaagaaggagacggtctggcggcttgaagaatttggacgatttgccagctttgaggctcaaggtgcattggccaacatagctgtggacaaagccaacctggaaatcatgacaaagcgctccaactatactccgatcaccaatgtacctccagaggtaactgtgctcacgaacagccctgtggaactgagagagcccaacgtcctcatctgtttcatagacaagttcaccccaccagtggtcaatgtcacgtggcttcgaaatggaaaacctgtcaccacaggagtgtcagagacagtcttcctgcccagggaagaccaccttttccgcaagttccactatctccccttcctgccctcaactgaggacgtttacgactgcagggtggagcactggggcttggatgagcctcttctcaagcactgggagtttgatgctccaagccctctcccagagactacagagaacgtggtgtgtgccctgggcctgactgtgggtctggtgggcatcattattgggaccatcttcatcatcaagggattgcgcaaaagcaatgcagcagaacgcagggggcctctgtaaggcacatggaggtgatggtgtttcttagagagaagatcactgaagaaacttctgctttaatggctttacaaagctggcaatattacaatccttgacctcagtgaaagcagtcatcttcagcattttccagccctatagccaccccaagtgtggatatgcctcttcgattgctccgtactctaacatctagctggcttccctgtctattgccttttcctgtatctattttcctctatttcctatcattttattatcaccatgcaatgcctctggaataaaacatacaggagtctgtctctgctatggaatgccccatggggcatctcttgtgtacttattgtttaaggtttcctcaaactgtgatttttctgaacacaataaactattttgatgatcttgggtggaaaaaaaaaaaaaaaaaaaaaaaaaaaaaaaaaaaaaaaaaaaaaaaaggaaaaaaaaaaaaaaaagcggccg

SEQ ID NO: 13554 - DNA, 2709 bp, Homo sapiens
  misc_feature 2708, 2709: n = A,T,C or G
tacgactactatagggagtcgacccacgcgtccgaaaatccaatacaggagtgacttggaactccattctatcactatgaagaaaagtggtgttcttttcctcttgggcatcatcttgctggttctgattggagtgcaaggaaccccagtagtgagaaagggtcgctgttcctgcatcagcaccaaccaagggactatccacctacaatccttgaaagaccttaaacaatttgccccaagcccttcctgcgagaaaattgaaatcattgctacactgaagaatggagttcaaacatgtctaaacccagattcagcagatgtgaaggaactgattaaaaagtgggagaaacaggtcagccaaaagaaaaagcaaaagaatgggaaaaaacatcaaaaaaagaaagttctgaaagttcgaaaatctcaacgttctcgtcaaaagaagactacataagagaccacttcaccaataagtattctgtgttaaaaatgttctattttaattataccgctatcattccaaaggaggatggcatataatacaaaggcttattaatttgactagaaaatttaaaacattactctgaaattgtaactaaagttagaaagttgattttaagaatccaaacgttaagaattgttaaaggctatgattgtctttgttcttctaccacccaccagttgaatttcatcatgcttaaggccatgattttagcaatacccatgtctacacagatgttcacccaaccacatcccactcacaacagctgcctggaagagcagccctaggcttccacgtactgcagcctccagagagtatctgaggcacatgtcagcaagtcctaagcctgttagcatgctggtgagccaagcagtttgaaattgagctggacctcaccaagctgctgtggccatcaacctctgtatttgaatcagcctacaggcctcacacacaatgtgtctgagagattcatgctgattgttattgggtatcaccactggagatcaccagtgtgtggctttcagagcctcctttctggctttggaagccatgtgattccatcttgcccgctcaggctgaccactttatttctttttgttcccctttgcttcattcaagtcagctcttctccatcctaccacaatgcagtgcctttcttctctccagtgcacctgtcatatgctctgatttatctgagtcaactcctttctcatcttgtccccaacaccccacagaagtgctttcttctcccaattcatcctcactcagtccagcttagttcaagtcctgcctcttaaataaacctttttggacacacaaattatcttaaaactcctgtttcacttggttcagtaccacatgggtgaacactcaatggttaactaattcttgggtgtttatcctatctctccaaccagattgtcagctccttgagggcaagagccacagtatatttccctgtttcttccacagtgcctaataatactgtggaactaggttttaataattttttaattgatgttgttatgggcaggatggcaaccagaccattgtctcagagcaggtgctggctctttcctggctactccatgttggctagcctctggtaacctcttacttattatcttcaggacactcactacagggaccagggatgatgcaacatccttgtctttttatgacaggatgtttgctcagcttctccaacaataagaagcacgtggtaaaacacttgcggatattctggactgtttttaaaaaatatacagtttaccgaaaatcatataatcttacaatgaaaaggactttatagatcagccagtgaccaaccttttcccaaccatacaaaaattccttttcccgaaggaaaagggctttctcaataagcctcagctttctaagatctaacaagatagccaccgagatccttatcgaaactcattttaggcaaatatgagttttattgtccgtttacttgtttcagagtttgtattgtgattatcaattaccacaccatctcccatgaagaaagggaacggtgaagtactaagcgctagaggaagcagccaagtcggttagtggaagcatgattggtgcccagttagcctctgcaggatgtggaaacctccttccaggggaggttcagtgaattgtgtaggagaggttgtctgtggccagaatttaaacctatactcactttcccaaattgaatcactgctcacactgctgatgatttagagtgctgtccggtggagatcccacccgaacgtcttatctaatcatgaaactccctagttccttcatgtaacttccctgaaaaatctaagtgtttcataaatttgagagtctgtgacccacttaccttgcatctcacaggtagacagtatataactaacaaccaaagactacatattgtcactgacacacacgttataatcatttatcatatatatacatacatgcatacactctcaaagcaaataatttttcacttcaaaacagtattgacttgtataccttgtaatttgaaatattttctttgttaaaatagaatggtatcaataaatagaccattaatcagaaaaaaaaaaaaaaaaaaggcggccgcgaatgtacccttcaactgttgaatgtttaatagtaaatcttatatgtccttatttactttttagctttctctcaaataaagtgtaacactagttgagann

SEQ ID NO: 13555 - DNA, 1656 bp, Homo sapiens
  misc_feature 1, 2, 3, 1655, 1656: n = A,T,C or G
nnnccgaggcgggcggatcacctgaggtcgggagttcaagaccagcctgacaaacatggagaaacctcatctctagtaaaaatataaaaattaggcgggcgtggtggcgggcacctgtaatcccagctacttggagacagaattgcttgaacccgagaggcggaggtggcagtgagctgagatcgtgccactacactccagcctgcgcaacagagcgagactccgtctcaaacaaacaaaaaagtcagatctgtgctagacgctgaaaggaattaatcagacaggatctcagtcttttaaagaactttcaaatacagagaagaggtggtaacaaatcattagtgtataatattgcaagcgaaaaaccagaattgtgtgctaagtactggggtaacacagagatggtaattaattctttctggagaaacagcagtgaatgtgacaacctgagtgagggtggaaagcaggagaatttctagactctgaatttcagaagcttccggaactaaaatgatgtggaagttgagtgagtctcggtgggatattgctgctgcacctggtcaaggccgttccgtcagtgttttcagacgccctgggaacgcggctgcagggtccggtcttcggtttgcacagctagaggccgcgcagcagcaaaggatgagcggaaccttggaaaaggtgctgtgcctgaggaacaataccatttttaagcaagccttttctctcttaaggtttagaacttcaggagagaagcccatctattctgtaggtggaattctactaagtatcagtcggccctacaagacaaagcccacccacggcattggaaagtacaagcacttaattaaagcagaagagcccaagaagaagaagggaaaagtggaagtgagagccattaatttggggacagattatgaatatggggttttaaatattcatctgactgcatatgatatgaccctggcagagagttatgcccagtatgttcacaacctctgcaactctctctccattaaagtcgaggaaagttatgcaatgccaaccaaaaccatagaagtgttgcagttgcaggaccaaggcagcaaaatgctcctggactcagtgcttaccacccatgagcgagtggttcagatcagcggtttgagtgctacgtttgcagaaattttcttggaaataatccaaagcagtcttcctgaaggagtcagactgtcagtgaaggagcacactgaagaagacttcaagggacgattcaaagctcgaccagaactggaagaactgttggccaagttgaagtagctactgtagaccctttcatgccagcagtggtcatattgagtgccaaagagaagagcttactgggtagttagagttcatcaggagacccaacccttagatttcataagtacccattcccatagccagtaatgtcctcactcctctgtggcttggctgtacttgccatttcttaccacttacctatgaggtaatgcttgttatcttccatctaataaaaatctgctgcagatgtgtatatgacaaacaaaaaccggggggaacatagacggggcggaaaaaaagacataaatgggacgagccaattgtccgcgccacctgtgtaagggcaacagggaccccaagaaggaaacaagacgacnn

SEQ ID NO: 13556 - DNA, 2077 bp, Homo sapiens
  misc_feature 1, 2, 2075, 2076, 2077: n = A,T,C or G
nnacgcgtgggtcgacccacacaattgaaaccccctctgcggtagaagccggctacatggaagattgacttaggcacaggaacttgctaatctctttctgtcacattcggattgctcctgctgccccacacacactaacccaaccatcttggggtggactccctgccagcccaactgttgtattttcagttcttccagtgtgaatcagttaatattctcgggaacgagggagaggttgatcctatgaggaaatcaaccacagtgaaaaggcttgggccgcttttgttttcacctccttttgttgaacaaatttgatttccggagtcagtcattttactgtcaagacatttcttcggcattctgcaacagtttccaacatggctagatccatcagaaactgaagccgtggagaacgctctcggggcctttgccacttcttggagtagaagccgacagagagctgtttggaaacttctccttcacacaccagttgaagactaggctttggaggttttcaaagcagacggtgcttggatgggcagggagaagtaacattctgcaaatcgccgtcagaggtcctgaggacacagacctacctggcttgcattccccttgctgaatggcgtgtgctgcagctgcccactgagggctcttttccctgggattctggacttcagagtaggacagcaggctgggaagatgctgagttccatcaagtgcgtgttggtgggcgactctgctgtggggaaaacctctctgttggtgcgcttcacctccgagaccttcccggaggcctacaagcccacagtgtacgagaacacaggggtggacgtcttcatggatggcatccagatcagcctgggcctctgggacacagccggcaatgacgccttcagaagcatccggcccctgtcctaccagcaggcagacgtggtgctgatgtgctactctgtggccaaccataactcattcctgaacttgaagaacaagtggattggtgaaattaggagcaacttgccctgtacccctgtgctggtggtggccacccagactgaccagcgggagatggggccccacagggcctcctgcgtcaatgccatggaagggaagaaactggcccaggatgtcagagccaagggctacctggagtgctcagcccttagcaatcggggagtacagcaggtgtttgagtgcgccgtccgaactgccgtcaaccaggccaggagacgaaacagaaggaggctcttctccatcaatgagtgcaagatcttctaaaccccaagagacttcacacaacacttatgtatgcaccccaaagactaatggggagagggagggccgggaagccaggaaagcttggtgttttctctgggtacaccccaagcagcgtctccttttggatacagttattgatgaggcttggccactggatgttttcactaactacactctacaagtgaactccttgcccaggccagttagaaaatcccttggggaactgtgatgaatattccatctttgattaaaaaagtgaaatagtctccataattttggacgatgaagtgagtttttcaaagaattccatatttaaagacacattttatttaactaataacaaaatgtattgcttttgtatatatttagttttcacacttggaaaatcttttcctacatcctcgaaaccataaactcctctgtgagtgaaatgcttgtacgaagctctgccatatgtttgtagtgttattattttcacctcaagtagaaagtctgttgaaaccacttggctgctggatttaaatgggtaatcaaatttaaaaatgaccataaatgaatctttgcaatttgttttctacttacctgttattcacagttggatataaaatacagttccataagatatcctaatactgcctaatgattttaaagttatcactatatttttctgaaatgataaaacatcattcatttatttactatattgtctttcactcaactccagttatgcactaaatattctcctctcattcaccaagattgattgaaacaccatctttcaggtagagaatcagactgcnnn

SEQ ID NO: 13557 - DNA, 2030 bp, Homo sapiens
  misc_feature 2020, 2021, 2022, 2023, 2024, 2025, 2026, 2027, 2028, 2029,2030: n = A,T,C or G
ccctttcgagcggccgcccgggcaggctaggtacgaggccgccatcttgggaatctgacggatcggaggcatttgtgaggaggcgcgaatcaagttagcggggggaagagtcttagacctggccagtcctcagggtgagggccctgaggaagaactgagggacctcccaccatagagagaagaaaccccggcctgtactgcgctgccgtgagactggtgctccaggaaccaggtggtgacgaactgggtgtgaggcacacagcctaaagtcagcacagcagaggaggcccaggcagtgccaggagtcaaggcctgttggatctcatcatccatatccctgttgatacgtttacctgctgctcctgaagaagtcgtcatgcctcccgttccaggcgttccattccgcaacgttgacaacgactccccgacctcagttgagttagaagactgggtagatgcacagcatcccacagatgaggaagaggaggaagcctcctccgcctcttccactttgtacttagtattttccccctcttctttctccacatcctcttctctgattcttggtggtcctgaggaggaggaggtgccctctggtgtgataccaaatcttaccgagagcattcccagtagtcctccacagggtcctccacagggtccttcccagagtcctctgagctcctgctgctcctctttttcatggagctcattcagtgaggagtccagcagccagaaaggggaggatacaggcacctgtcagggcctgccagacagtgagtcctctttcacatatacactagatgaaaaggtggccgagttagtggagttcctgctcctcaaatacgaagcagaggagcctgtaacagaggcagagatgctgatgattgtcatcaagtacaaagattactttcctgtgatactcaagagagcccgtgagttcatggagcttctttttggccttgccctgatagaagtgggccctgaccacttctgtgtgtttgcaaacacagtaggcctcaccgatgagggtagtgatgatgagggcatgcccgagaacagcctcctgattattattctgagtgtgatcttcataaagggcaactgtgcctctgaggaggtcatctgggaagtgctgaatgcagtaggggtatatgctgggagggagcacttcgtctatggggagcctagggagctcctcactaaagtttgggtgcagggacattacctggagtatcgggaggtgccccacagttctcctccatattatgaattcctgtggggtccaagagcccattcagaaagcatcaagaagaaagtactagagtttttagccaagctgaacaacactgttcctagttcctttccatcctggtacaaggatgctttgaaagatgtggaagagagagtccaggccacaattgataccgcagatgatgccactgtcatggccagtgaaagcctcagtgtcatgtccagcaacgtctccttttctgagtgaagtctaggatagtttcttccccttgtgtttgaacagggcagtttaggttctaggtagtggagggccaggtggggctcgaggaacgtagtgttctttgcatttctgtcccatatgggtgatgtagagatttacctgtttttcagtattttctaaatgcttttcctttgaatagcaggtagttagcttcagagtgttaatttatgaatattagtcgcacatgtattgctctttatctggtttaagagtaacagtttgatattttgttaaaaaaatggaaataccttctcccttattttgtgatctgtaacagggtagtgtggtattgtaataggcatttttttttttttttacaatgtgcaataactcagcagttaaatagtggaacaaaattgaagggtggtcagtagtttcatttccttgtcctgcttattcttttgttcttgaaaattatatatacctggctttgcttagcttgttgaagaaagtagcagaaattaaatcttaataaaagaaagccccacnnnnnnnnnnn

SEQ ID NO: 13558 - DNA, 1862 bp, Homo sapiens
  misc_feature 1, 2, 3, 1861, 1862: n = A,T,C or G
nnncccttggtggcgtagtgtgtgcttggcacattccgcctactagattagttgtggggtgccgacgtgttgaccctgctgattgagatatctcctgtctccctgtcatccaccccgaatttaatgaatgtacggcacgaaccagcctggcatgcggccaggttactgcttctcacttctcacagatatctcatcgatagaccgatttcggacgtttatctgccataggagctagtccccctaaaactgcttaatttttttccagtggcagtcactgtttccttatcaatagtatagcgtagtacctgattactatagatgatgtttctaccacctcatggtctgctcctaacacccatgtttcagctaaggtgattctctctgcctgctgcacagcccatatcatactattcctcaagttctcatgctactccaagctttatctggccttccttacagtctatcctttgccctttgttccatctacacaaaacaccttgctccccctttttcccattcctcaacccacccagcactcaattttgcaactagttatggaaagttcttcctatcataatttaaccagtaaccttccctcctttgaccacttcctgcttcatgaagccttcctgaataaagagaaaaaatacctcccagatttttgttaaagcaaactaatgcattggaccacaacatttatgcatagtgttgctacctagctttctagatttctctaaaactgccgcaactatgcatgtgcacttgtttgtccatgtcagtgtcatctgctttagattgtaaggacaaggagaggacctgttgaccttgtgctatacagggctcatcatactatgagcatatgggcagttaatactattgtattataaagatgagtaattatatttgcatttaaagaactgcttttaattgtattcagttgaatgtgtatgtctagattggcagctccactggccaaagataatccatcttccctgccattagggtaaagggcctgttcgcacacagtagtccattttcccaatacacgggaatgtggcagtggcttctgcttattgcaggtaagtgcccatggagggcataacactataccaggtgtgtggaatatggacgagttcctattggcagctttaactgctctacctgtcaccacatgcagctgcgttgctctgtggaacttctggaccacaagagacagacgaaattcagatgagactggacagaaagaaaaccaacctaaatcctgtaaatgtattattctattccaacccttcttctaggactcagaagaaactaagaaatccagggttcacacttcagtataaggttttcattgtttctgcataagaacacctgttcttgacaagatgattcatagggcagaaccaagatggacattaaactctccttctttaaggtaaatgaagagggtgcctgacaaatatgtcattttgagcacaggtttaagtgagcaggaagagtcattcattttagcatttccattattgtataaagaagagctgggccgggtgcagtggctcacacctgtaatcccagcactttgggagacctaggcaggcagatcatgaggtcaattcaaaaccagcctggccaacatggtgaaaccccatctctactaaaaatgcaaaatttagcctggtatggtggcaggtggctgtaatcccagctactcaggaggctgaggcaggaaaattgtttgaacccagaaggcagaggttgcagtgagctgagatcatgccactgcactccagcctggacgacagagtgagactcctctcgaaaaaaaaaagcccggcgcagtggctcatgcctgtaaacccann

SEQ ID NO: 13559 - DNA, 1736 bp, Homo sapiens
  misc_feature 1, 1734, 1735, 1736: n = A,T,C or G
nacgaggagcagccaaaaaagggaaagaaaaacatgagcctgatgtctcctcaaagtcgtcttcagtgttagactccagtttagaccacagacataaacagaaagtcttacatgacacaatggatctgaatcatctcttgaaagcttttctgcaattagataaaaaaggaccacaaaaacatcactttgatcagccttcagtagcacccgggaaaaactactctttcacaagagaagaggtgagacagatcgatcgggaaaatcagaggcttttgaaagaactgtcaagacaggcggaaaagccaggaagcaaaagtacaattcctagatcggctgatcatcccccaaagttatatcacagtgctctcaacagacagaaggaacaacaaaggattgagagagaaaacttggctttattgaaaaggcttgaggccgtgaaaccaacagttggtatgaaacgttcagaacaactgatggactatcatcgcaatatgggctatctcaactcatcaccattgtcaagacgggccagatccactcttggccaatatagcccattaagagcttccaggacatccagtgctacgagtggtctcagttgtaggagtgagcgatcagcggttgacccctccagtggccaccctcgaagaagacctaaaccccctaatgtccgtacagcttggttataaaacacttttttactttaaacattgttcacacaacttttcttgaagtgctcgtgcatattcctataattctctgtgtaaacatctagaataccgttttagcaattgaaggtgtacaacagtgagttgtaatgtattgttattcagtgcaaaattattgtcaaaaaacgatttaatgtaaaaagtgtttcctgaggatgtatttatatgagatgtatgtgttcttaatagagaaatagtggtatgcatgtgtatcttctaattattcagttgtcatgctgtcaaaatagtagtgatagtatcattgcatgtcgtacccaagatggtcactatatagttttcaatttgtgttattttcatttctttataagtgttataccatgagctcagctcctaaatttggctggctttgtttttcatttgctttagaacttatgtggcatgacatagctcgattgtatgagatttaacacttattatgaaacaaatcttgaaatttgttttcactggtagagctgatctagatttgatgagcagattgagagacgcttctattggagcaattcttgtaattcaccagaggtatctagttgttgtataagtgcactgagttagatcttaaaagtttgatcaatcattccaaaccatttcaaatatgaatattagaaagttcaacttagaagcttcccttttgtgtttcatgccttcaggtaaagctctatttatgactctagaacagaggtaggctagagcagtctctaactcgtgaaagttaagggccactaagtgcaacccagcattgtgacagaaaatgcaccacccgcagagaagcggaagcaaccgaaggggccaacagccacagacaaccgacagcagaccagaacgacaccacagcaggccacacgcccgagaacaacacgaagacaacaaagacaaggacaaacaccaagagcgcagacacacaccacacacacacaagcacacaccgaccacccgcaacacaaaacacgaaagcgcaaaacatcacgccacactgcaacgcaccgcnnn

SEQ ID NO: 13560 - DNA, 6538 bp, Homo sapiens
  misc_feature 1, 2, 6537, 6538: n = A,T,C or G
nnattatctgcccaagcacagtgctgttggccaagcctccagcagctgacgggacccagctgtagtgaggttgcagtgattgagtaggattggcctgcttcaaagcagaggtttctcatgggaatatgcttattaaactcccactggtgcagaaaccatgaacagaggatgaacaagtgaagttgcaatctcctccatcacagctcagttccccaacaacaggatcacaagctggagatgcctttaaggaagatgaagatccctttcctcctactgttctttctgtgggaagccgagagccacgcagcatcaaggccgaacatcatcctggtgatggctgacgacctcggcattggagatcctgggtgctatgggaacaaaactatcaggactcccaatatcgaccggttggccagtgggggagtgaaactcactcagcacctggcagcatcaccgctgtgcacaccaagcagggcagccttcatgactggccggtaccctgtccgatcaggaatggcatcttggtcccgcactggagttttcctcttcacagcctcttcgggaggacttcccaccgatgagattacctttgctaagcttctgaaggatcaaggttattcaacagcactgatagggaaatggcaccttgggatgagctgtcacagcaagactgacttctgtcaccaccctttacatcacggcttcaattatttctatgggatctctttgaccaatctgagagactgcaagcccggagagggcagtgtcttcaccacgggcttcaagaggctggtcttcctccccctgcagatcgtcggggtcaccctccttacccttgctgcactcaattgtctggggctactccacgtgcctctaggcgtttttttcagccttctcttcctagcagccctaatcctgacccttttcttgggcttccttcattacttccggcccctgaactgcttcatgatgaggaactacgagatcattcagcagcccatgtcctatgacaatctcacccagaggctaacggtggaggcggcccagttcatacagcggaacactgagactccgttcctgcttgtcttgtcctacctccacgtgcacacagccctgttctccagcaaagactttgctggcaaaagtcaacacggagtctacggggatgctgttgaggaaatggactggagtgtggggcagatcttgaaccttctggatgagctgagattggctaatgataccctcatctacttcacatcggaccagggagcacatgtagaagaagtgtcttccaaaggagaaattcatggcggaagtaatgggatctataaaggaggaaaagcaaacaactgggaaggaggtatccgggttccaggcatccttcgttggcccagggtgatacaggctggccagaagattgatgagcccactagcaacatggacatatttcctacagtagccaagctggctggagctcccttgcctgaggacaggatcattgatggacgtgatctgatgcccctgcttgaaggaaaaagccaacgctccgatcatgagtttctcttccattactgcaacgcctacttaaatgctgtgcgctggcaccctcagaacagcacatccatctggaaggcctttttcttcacccccaacttcaaccccgtgggttccaacggatgctttgccacacacgtgtgcttctgtttcgggagttatgtcacccatcacgacccacctttactctttgatatttccaaagatcccagagagagaaacccactaactccagcatccgagccccggttttatgaaatcctcaaagtcatgcaggaagctgcggacagacacacccagaccctgccagaggtgcccgatcagttttcatggaacaactttctttggaagccctggcttcagctgtgctgtccttccaccggcctgtcttgccagtgtgatagagaaaaacaggataagagactgagccgctagcagcgcctggggaccagacagacgcatgtggcaaagctcaccatcttcactacaaacacgcctgagagtggcactggggaaacataactccatctacaccttggatttggactgattctccattttatcacctgaaggcttgggccagagctcaacagctactcaactggaggggtgagggggataaggtctgtagtatacagacaggaagatggtaggtttatgccttctgtggccagagtcttggactcatggaaatagaatgaatagaggggcattcacaaggcacaccagtgcaagcagatgacaaaaaggtgcagaaggcaatcttaaaacagaaaggtgcaggaggtaccttaactcacccctcagcaaatacctatgtcaacagtataagttaccatttactctataatctgcagtgatgcaataaccagcataataaaaaggcaatcacataaaaaagagtttagtcgtctaaacataagtaactttaaggtgaatgaaagatcttctttaggaataatagatgatggtaagttccactttggttattggaaggcaagtcattattactggtattagttaaaacacatatcaaatgcttgctcttcatcatatatatagttatgcatacatacacacacacacatacagtatattctttcctcaaaagggttaagatgtctaaaatagggacctagaagcttaacactatttaagtaaatacagtagaagctcacaaatagatttctttgcacaatgattttttgcaaaattttacagtaataataatcccaaggcaaatctctcctgaactgctttccattccataatttgtagtataattcttggattccactgttttctttggggaatggaagttctgaattaaaagcccactgtggagatgctgtggttcatggaatctcttccagtgtaattcagaatcattggcctagaaagtctctgatatttggaggggaacaaaaatcactcacaagcaatccatgatctatacacataagcataatttcctttagttctagttagtcatcagagaacagtcatgtatgcaagttttgtgactgagaaatttctgtgcttccaatccacaatgagatgcatgattttgttttcatcccatttcccccaagcccctgtaaatcagggaaaatgcgcaactgatcgcctaggagagggcctcgtagtggcacagctggagatagtttcaaagtctaaaccaccagcccatcctgaggaaagcctcctatggaatgtaaagtgcaatcatttcttcagatataagactttccccaacaatgtgattggattcctttatggcaaaatcgagagaagctgccatccacctgcttatgcatttatctcttttgtggacttgtctgaccaccttctatttgcccagagtttgctcaattccaagacagtgcccatgaatgggacacctgtaatgtaacccacacagcggtttgcagagaatgttagccatgacttgggctttctgaaagttggctataatttctctatccctacccacaaccctgggaagttggagcaagaggggcatactattgggctgggaggatttgacagcatttccccagttgccctttaagttcttctatttcaaacgttaattttgcttctctttctaaaaaaaaaaaaaaaaaagaaagagaagaaagaagtgattcctaccccctacctccagagttgttgaaagctgaaaagcatacaagattcttccttttaacttggatttctcgttccagaaattgtgggataatctgtattcttgctttagaaaacattcttagagagggtactagcttactgatgatgtgttaggattgctactgatgctgtcatgtggaaactatttaaaggcactattataaatttatcctataagatgacaatgtttactcaaagtctaacatattcaatgcaagtaagactttctgaaaacacttgatgatgtggaaatgctgcaggattaaataacttgaagagcctttatagattatatgaatgcctatttgtgtctagaaccagttatttaacctgtaaaatgtcaatagcaaatgaaggatgaagtatatctctagatgcaaatacattgagtttaaaagtgcctcaaaataattgagatcacatttcaggacatttggaaatcaggtcgatttgtggtaactgtagtcatcttaaatttcaaaccatttaccatctgaaagttttgatttgaatgtaaaacaggaaattggaattcctttgtccaggagaaacctcacaaaccttctttaaggcatagttttgttgtttgtttgcttgtttgttgcaggctgtaaggcatggctgcttgtttacaaagcatctcattcatattacctgtggagttgcatatccaaaccttagtgagttttgaagctttaagcaaattcttttaaaaaattcttgtatttctagcattactagatattaaaagttaagcaaatagattaatgacgtatacataggcatcatttcacaaggtcagtaatgctgcaggaaaagcaaaattgcaatctacgtatctatggtactaaggaagtcctgtttttcaaaaatggaagcccacttctcagatttttctgaagggcatacaatgaaaagtgaaggggaaacacacacacgcaaaaaaacaagtatttggcttgtcacaggaatctgattgcattaagtgaaaggattatttagaatatgttaatgcaaagctaaaataaaattttccttggcaattaaaaatgctgtgcgctaataccctgctttctatcgtgactcaattcaacaatgtggggaatgtttactacatttccaacttgatgtcaagcaatggggaatacaagttccagttctgcaaagattcgtcaactttcttagctcaagagagaggctgagaaatgcagagaagaataagacataaaatagctccgacctccatgatccgagagtgggaaaaggcccgattattacccataaggcacactctctaaggccttttaaggggcctacaaaaatgttttattttataatcagaagaaaaggaaatgaacattggggattgaaaatcatattggtatttgcaccaacatagtcataaaatagtatgttaatatgtttttactttatatatttatatattaaaatatatttaatatgttttgcctttgtggcccatgaaagtcttactgggccctggggaaggtatcctaccctggtgaagcagctgctttgctctacaaatacctggggcagaaatttgatttgaaaagtattattctctcttctctttgtttcaactggattcctttggaaaaccaaactagtatcagaacaaaccccgaaacagtaagaaattggagtgagaagggcatggtattgggactaggatcggctctcattcgatcgagctattctcttaaaatgacaaaaagtgtccataaagaggctgctggagagtgcgtggccatagggagccgacatgcccgggaggaaaggtgttgattacatggatacttctaaaagctaaagccttgttgccttctctttaatgcctagagaatgggatgtgtgatgcaaatgctcaaaacctcttaaatcatagctgtctgacctctacggacctcacatccatctgaggcttcatggacaaagattctccacttggccaaactttagccaagctcctcaaccttctcccaggcccaatctgggcacttccttgtaaaatctagttttggcaagaagtctattaggtcagtttagcaagaacacctaacccccccatatctgttcaacctcagtatctgatcaggctcctcagcctccaccatcccccaggtgatgtctggtcaactggcctaccttcagctagaatcctgttaggtcggtttagatgaatgctccctgatatttcctcttggtaatcttccatccactgcccctgaccctgttccctgtctataaatccccagttttccatggtgtattcagagctgagtccagtctctctcccctactacaagtccccattgctgtggtccccgtacctgtcatgatggtcctaaataaagtcttactgtgctttaataggtagcattgaaaaatttttttctttgacatcattcatgacaacatgaaacctattgggacagcatgactgtgcagggtctttagagctcagctttctgaggccctgagcattcttggttttccgacatcgtgaacctgttctgtgttgcaagatatcactcaagccagtgttgcttaataccatctctttgtgtaatagatctgaataaagtaattgtaatacaccaatattttactttgttgagtattattttaatgggagcctttccaatgaaggaaacatcagctttccttgttagaatgcaagcagcttaaaaactacccatgtctttctggaaaggaaacattgccatgtaactatgtatcagttttctaagaacttcatgggccttccann

SEQ ID NO: 13561 - DNA, 1802 bp, Homo sapiens
  misc_feature 1, 2, 3, 6, 1800, 1801, 1802: n = A,T,C or G
nnngcncggccgcgtacgaccccgcgtccggtctggcagcggatagaggacacgaccaagatggcggcggtgtctggcttggtgcggagaccccttcgggaggtctccgggctgctgaagaggcgctttcactggaccgcgccggctgcgctgcaggtgacagttcgtgatgctataaatcagggtatggatgaggagctggaaagagatgagaaggtatttctgcttggagaagaagttgcccagtatgatggggcatacaaggttagtcgagggctgtggaagaaatatggagacaagaggattattgacactcccatatcagagatgggctttgctggaattgctgtaggtgcagctatggctgggttgcggcccatttgtgaatttatgaccttcaatttctccatgcaagccattgaccaggttataaactcagctgccaagacctactacatgtctggtggccttcagcctgtgcctatagtcttcagggggcccaatggtgcctcagcaggtgtagctgcccagcactcacagtgctttgctgcctggtatgggcactgcccaggcttaaaggtggtcagtccctggaattcagaggatgctaaaggacttattaaatcagccattcgggataacaatccagtggtggtgctagagaatgaattgatgtatggggttccttttgaatttcctccggaagctcagtcaaaagattttctgattcctattggaaaagccaaaatagaaaggcaaggaacacatataactgtggtttcccattcaagacctgtgggccactgcttagaagctgcagcagtgctatctaaagaaggagttgaatgtgaggtgataaatatgcgtaccattagaccaatggacatggaaaccatagaagccagtgtcatgaagacaaatcatcttgtaactgtggaaggaggctggccacagtttggagtaggagctgaaatctgtgccaggatcatggaaggtcctgcgttcaatttcctggatgctcctgctgttcgtgtcactggtgctgatgtccctatgccttatgcaaagattctagaggacaactctatacctcaggtcaaagacatcatatttgcaataaagaaaacattaaatatttagtttggacttgaatatcaagtcgttgaaatttatttgaaatacttgctggcactgcacctggatttgtactgcaagacctgactattcataacggaaaacgatttctaaagcaacagcaggtatttttgtacagggaagtttaaatgtgtttgtgtatggaaaactctccactctcctcccctagatgccatgcttccttttgtctgttacggttgccatgttctttgaataacaaattatataacattttatcctctctcaccacaaggacaaagtatggatgtggcagagtcctgatgaaagatgtatccaaacaagataacttatatgtataaaattaaagcatataatatacactttactgttagtttgttttgataaggaataaaggaatttctaacatgaaaaaaaaagaagatccaaaaaatagaacagaaaaaaactgtatagcgggaataacttgcctgccccgccaagcagcaaagtgtctcctctagtgtttctaactcatggactgcacccatttctgcctgccccacaagctctaggcttgacagttcaaggtacgatcctcttcctttcttcttccttcttcctcctaggcaagaagcttgcaaaattctgggcctaagcaagtggcttcttcctgggacccaacannn

SEQ ID NO: 13562 - DNA, 1221 bp, Homo sapiens
  misc_feature 1, 2, 3, 4, 5, 1220, 1221: n = A,T,C or G
nnnnnctgagtttgtggcgcgcttagtgatgggatggccctgtgcaggacgccgacacgaaaagatgaagagttcaatccgttgctgtctgaactcacagtgtagcaggcgagatagacgggaagatcggtagggtgggagatgccggaaaggcttcccgtgagactggataagaaatcaaaaatctggtgaaattgccggcaagagggagttaaggacattccaggcagaggcaagtccagattcctaagatgaggacacagcatcctgggccactgtcactaatacaaatttgcctctggagggactctacggaagataattcccctgaaatttggagagttgaattaagctaggactgattctggctggaatttgtggtggctacgtaccctagagggcctcaaggaaacccacggttcaagacagccctgacagattctggagtctagaacagaaatggatttgaacatgggcaaggccaaccacccagttcacggcctgtgtacagcaaagattacgttacagcctgagagctaagcctggaagctctttcatccatccgtttgtccatctatccatccatctgctcatccatccctccatctgctcaacaaacgttagagaatcaatccttgtgtcagatactggggctgccctcaaggagcttttatagagttcagggtacagccaggtgggggagacagatcactataaaaacctaccactataatccaaaggacaagagcaaaaatagtaaagaggagagaagacccaaatttgcctggtgggtcagagagggctttctagaagaggtaaaaaatcttcggggctatcacttcaccttgcctggtggataaagggaggactttccagatacagtggacagaatgtgcagaggcaggagccatgagtggcagaggcaggggagggactgcagagacaggttggagccaaagcacgtggcactggagccatagccaaaggaacaaactgtgagacctgggacttgaatttggaggtggtgaaaagtgacaaggtcttcacagaagagtgattttttcaacttagggaaggctgaccccagaccaatgctgccaaagtgtggtctgtgggctgttagcagttcgtgacgatgtaagtacaggaattgagattaagcatttagacacctacagcactttgatagtcattttactttttaaattttgagctggcann

SEQ ID NO: 13563 - DNA, 2100 bp, Homo sapiens
  misc_feature 1, 2, 3, 4, 5, 6, 7, 11, 13, 14, 17: n = A,T,C or G
nnnnnnngcancnnttngaagtgtcccctcctacttcttgctgcctcacggttgctgttgcagacccaggagtctctgaaggcttccgcggctttggggccggttgtgagatgccaggcagaggccgctgcccggactgcggctccacggagctggtggaagactcgcactattcgcagagccagctggtgtgctccgactgcggctgcgtggtcaccgagggggtccttaccactaccttcagcgacgagggcaatctccgagaggtaacatattcccgaagcacaggggaaaacgaacaagttagtcgcagccagcaacgaggtctccggcgagtgagagacctttgtcgagttctgcagttgccaccaacatttgaggataccgcggttgcctactaccaacaggcatatcggcactctggcatccgagcggccaggctgcaaaagaaggaggtgttggttgggtgctgcgtcttaatcacctgccgacagcataactggcccctaacaatgggggccatctgcacgctgttgtatgcagatttggatgtgttttctagcacttacatgcagatagtgaagctcctgggactggatgtgccatctctgtgcttggcagaactggtgaagacctattgcagcagcttcaaactgttccaagcttcaccttctgtgccagccaaatacgtggaagacaaagagaagatgctgtctcgaacaatgcagttggtggagctggcaaatgagacgtggctggtgaccgggaggcatcccttgcccgtcatcactgctgcgactttcctggcttggcagtcgctgcagcctgcagatcggctttcatgttcccttgcccgattttgtaaattggcaaatgtggacctgccctacccggcgtcctcccgcctgcaggagctgctggctgtgctgctgcggatggctgagcagctggcctggttacgagttctgagacttgacaaacggtctgtggtgaagcacatcggtgaccttctccagcaccgccagtcactggtccgctctgcctttcgggatgggacagcagaagtggagacccgagagaaggagccaccggggtggggacaggggcaaggagaaggggaggtgggaaataattccttaggtttaccccaggggaagcggccggccagtcctgcccttctcttgccaccctgcatgttgaagtccccgaagcggatctgccctgtaccccctgtctccactgtcactggagatgagaacatttctgatagtgaaatagaacagtatttgcgtacccctcaggaagttagggactttcagagagcccaggctgctagacaggctgccacgagtgtccctaaccctccctgatggatatccactgggagcacttcatcctgttctgacagcttgataacattcctgttataaccaaggatggaagtgtacaccagtccgtaggtattgcttttcttgtttgaaggaaccaagaggggctctgccattagttggaccctgggtcctggagtaaagtcaggagtgcagggatgactataggtaggagagattcccatcccttggtgtgggagagcaagttgcctatgtccatgttctgtgagatggctttcctcatagatggatgggaaaatgtcaggctctttgctgctggtttgaattggacacactgctgcggctcctcctgcaggcctgagggggcttccctctgcttgtggagtggttggcattcccagcagtatcaaccctcagaggagcgggaactggggaattctggccctacgtgcattcacaggcaatgatgggtttgtgtgtatggtgtcatgagatcctctacctcataacaaaaggacagtgggtagactaaggcagtagctcaaagggctttgcaaaattttaatatattaaaacaagaggcatctgctagaaaacattctattgtataaaacccgagttctttaaaagatcctggataatttttgtttgattattcattgaagaaacatttattttccaattgtgtgaagtttttgactgttaataaaagaatctgtcaaccatcaaaaaaaaaaaaaaaaaaaaaagt

SEQ ID NO: 13564 - DNA, 500 bp, Homo sapiens
  misc_feature 500: n = A,T,C or G
acgcgggggaggtggatttgagagatacctcccctccttctgctcagctgccttgcagtaattaaactctttctctgctgcaacacccctactgttctccgtgtattggcttttctgggcagcaggaaggaaaagctgatgcgatgctctcagtgccgcgtcgccaaatactgtagtgctaagtgtcagaaaaaagcttggccagaccacaagcgggaatgcaaatgccttaaaagctgcaaacccagatatcctccagactccgttcgacttcttggcagaattgtcttcaaacttatggatggagcaccgcggccgcccgggcaggtacccctggcagacaaaagttcctgttttttgtatagaagacttccccaaccagtctgtgaagaactcgttttttcccacaggtccatgggacctccgggccaggaggacacacacaccttggggtgtgggggcactgtatgccgttctcaaacaactgaaatgatgttgcn

SEQ ID NO: 13565 - DNA, 3027 bp, Homo sapiens
  misc_feature 1, 3025, 3026, 3027: n = A,T,C or G
ncacgcgttcgactattacagcggattcccaggcaatggtgaagatcgaggacatggctgtgtccctcattctggaggaatggggatgtcagaatctggctcggaggaatctcagtagggacaacaggcaggagaattatgggagcgcatttccccagggtggtgaaaacaggaatgagaacgaggagtcaacctcaaaggctgaaacctcggaagattcagcatcacgcggggagacaacaggaagatcccagaaagagtttggagagaaacgtgaccaggagggcaaaacaggagaaagacagcagaaaaaccctgaggagaaaaccaggaaagagaaaagagattcagggccagctataggaaaggacaaaaaaaccatcacaggagagagaggtccaagggagaaggggaaaggattgggaagaagcttcagtctgagctccaacttcaccacccctgaagaagttcccacgggaacaaagtctcacagatgtgatgaatgtggtaaatgcttcacgagaagttcaagccttatccgccataaaataatccacactggagaaaagccctatgaatgtagtgagtgtgggaaagccttcagtcttaactccaaccttgtcctgcatcagaggatccacacaggagagaaacctcatgaatgtaacgagtgtggcaaggccttcagccacagttccaatctcatcctccatcagcgcatccactctggagagaaaccttatgaatgtaatgagtgcgggaaggccttcagccagagctcggacctcaccaagcatcagagaattcacacgggggagaaaccctatgaatgtagtgaatgtggaaaagctttcaaccgaaactcatacctgattttgcatcggagaattcacactcgagaaaagccctacaagtgcactaagtgtggcaaggccttcacccgcagctccaccctcactctgcatcacagaatccatgccagagagagagcctctgagtacagcccagcctcccttgatgcatttggcgcgttcctgaaaagttgtgtgtaaaggaagaatttgccatcaagccatttcccccttttgtttctaaaattatttcagagatgtgtgctcctggagggaaaaagaaatacagcctcaacagattaaaaaacaaaagtcacacttaaggatccttctagtcacatcagcagtgttctgcctttatgtagtagttgggcatataatccttccacacagcccctgcagggaaaggctaatcttcacggcatcaatcccacgtgcagcatttcccaccacaagcagcaaaagcaccacgccatcagtgcaacatagtccagtacttttccagtcacatcgcagtgcatcacctattcacagggccacatcattcggcactcgttctggaccaacccaccacaccataacatcaagcttagcacaccagcatccacaggcattatgcgcatcccaacgcacacagttgcattcactgtgcaggtggtatcagggcattgcatcactttatggacattgtcaaacacagcacaggccaccatccacctcttttgtcgccccacacccatccacataggccatttacagttgatcttaccacacaacacaacaaggcacggtgcacaccatggtagcaacacaaaacacagaagaacaaaacagccacaaatatcgcgcgacaacgcattggccttaggcataccacacatagtgatacaggtaacgatacaactcattacacgtggaacgtgcacactgcttcttggttcacttcagttcacttcagaacattccacccattggaggactacacggcagcaataaccaacgacacagactggacactctggcttatcgcacaccacatatccctacacgtgaacacatctggttaggccgatacacacatccacacggtacattcaaacaacaccaccacaccacacgcaactatatcacattacttcattccattctacacaccagacagacaatagacaggaagaggagagaaatcggttcgaccacaaccacaaggaataccataaagcgacaggatatgacccccacacaaagtagtgcaccgtgtgacacacacacaaaaaagcgcgggcgaggccacatggcggcccaccaatggcgaccacaaacaaaattcaccaccatcgacacgcaaattccaacgcacaccatcaacattgcgaaaaacgaggggcgacaacaacgaaaacgcaacacaccccgacaccaagacctacactcacaatcatcacccacataccgatgggaaaagagtacccccatctagcacaggcaacactacatcgcgcacaccacaccgcgtactacaacaggtgcacaagatgacaagactgcgcaagccacacaggagtctaacacgcaagcaagcgacagacgctgcaacaccacccaacgagcagcatacaacaaccaccgaatacacagaggagaacaccacatggcactcagatcaacacagtgaaagaacaaaacaccgacccaggtaaaacaccagcccacaaaccacagacaaacactgccgaagctgtgacaccgaggcacacacatcaagcaaccaacaccgcaagcacacaacgcaacaaaggatggacacaaccaagatgcgggcactgctcacagcacacaaagagcggcaaccgcttccatagcatacacactaaaaacgagctatcaaataactatttaataatacacactactacttacaatttataatactacaaaaaatagaataaagataacacagacacgaaaacacgacataatcacaaacgcaagcaaactcatctcatccacctctacatcatatcacattaaagacaaaactacacatcacaacagaacacatacacaaccacaaaactcaaataaaaaaaataacatctaataacaaaaactcaccaacagaaacaacaaaaaagacatctctcgatactctatatctacatcaaccacactannn

SEQ ID NO: 13566 - DNA, 2008 bp, Homo sapiens
  misc_feature 2008: n = A,T,C or G
aggtacgcggggacatcacagaagtagaggcagaccttgcttcatgagcaagctcatctctggaacaaactggcaaagcatctctgctggtgttcatcagaacagacaccatggcagagcatgattaccatgaagactatgggttcagcagtttcaatgacagcagccaggaggagcatcaagacttcctgcagttcagcaaggtctttctgccctgcatgtacctggtggtgtttgtctgtggtctggtggggaactctctggtgctggtcatatccatcttctaccataagttgcagagcctgacggatgtgttcctggtgaacctacccctggctgacctggtgtttgtctgcactctgcccttctgggcctatgcaggcatccatgaatgggtgtttggccaggtcatgtgcaagagcctactgggcatctacactattaacttctacacgtccatgctcatcctcacctgcatcactgtggatcgtttcattgtagtggttaaggccaccaaggcctacaaccagcaagccaagaggatgacctggggcaaggtcaccagcttgctcatctgggtgatatccctgctggtttccttgccccaaattatctatggcaatgtctttaatctcgacaagctcatatgtggttaccatgacgaggcaatttccactgtggttcttgccacccagatgacactggggttcttcttgccactgctcaccatgattgtctgctattcagtcataatcaaaacactgcttcatgctggaggcttccagaagcacagatctctaaagatcatcttcctggtgatggctgtgttcctgctgacccagatgcccttcaacctcatgaagttcatccgcagcacacactgggaatactatgccatgaccagctttcactacaccatcatggtgacagaggccatcgcatacctgagggcctgccttaaccctgtgctctatgcctttgtcagcctgaagtttcgaaagaacttctggaaacttgtgaaggacattggttgcctcccttaccttggggtctcacatcaatggaaatcttctgaggacaattccaagactttttctgcctcccacaatgtggaggccaccagcatgttccagttataggccttgccagggtttcgagaagctgctctggaatttgcaaggcatggctgtgccctcttgatgtggtgaggcaggctttgtttatagcttgcgcattctcatggagaagttatcagacactctggctggtttggaatgcttcttctcaggcatgaacatgtactgttctcttcttgaacactcatgctgaaagcccaagtagggggtctaaaatttttaaggactttccttcctccatctccaagaatgctgaaaccaagggggatgacatgtgactcctatgatctcaggttctccttgattgggactggggctgaaggttgaagaggtgagcacggccaacaaagctgttgatggtaggtggcacactgggtgcccaagctcagaaggctcttctgactactgggcaaagagtgtagatcagagcagcagtgaaaacaagtgctggcaccaccaggcacctcacagaaatgagatcaggctctgcctcaccttggggcttgacttttgtataggtagatgttcagattgctttgattaatccagaataactagcaccagggactatgaatgggcaaaactgaattataagaggctgataattccagtggtccatggaatgcttgaaaaatgtgcaaaacagcgtttaagactgtaatgaatctaagcagcatttctgaagtggactctttggtggctttgcattttaaaaatgaaattttccaatgtctgccacacaaacgtatgtaaatgtatatacccacacacatacacacatatgtcatatattactagcatatgagtttcatagctaagaaataaaactgttaaagtctccaaactaaaaaaaaaaaaaaagggcggccgcn

SEQ ID NO: 13567 - DNA, 8493 bp, Homo sapiens
  misc_feature 1, 8482, 8483, 8484, 8485, 8486, 8487, 8488, 8489, 8490,8491, 8492, 8493: n = A,T,C or G
nccgcagccgcagctactgtgacttctccgattgtgtgagctttgttggagcctgcgtacgtggatttatcgctgccacggtctgcgtagttccagaggtttaaccataggatagagaaaccaggaatgtaatgaggaaatcaaaatggatccaagtatgggtgtgaattctgttaccatttctgttgagggtatgacttgcaattcctgtgtttggaccattgagcagcagattggaaaagtgaatggtgtgcatcacattaaggtatcactggaagaaaaaaatgcaactattatttatgaccctaaactacagactccaaagaccctacaggaagctattgatgacatgggctttgatgctgttatccataatcctgaccctctccctgttttaactgacaccttgtttctgactgttacggcgtcactgactttgccatgggaccatatccaaagcacattgctgaagaccaagggtgtgacagacattaaaatttaccctcagaaaagaactgtagcagtgacaataatcccttctatagtgaatgccaatcagataaaagagctggttccagaactcagtttagatactgggacactggagaaaaagtcaggagcttgtgaagatcatagtatggctcaagctggtgaagtcgtgctgaagatgaaagtggaagggatgacctgccattcatgtactagcactattgaaggaaaaattgggaaactgcaaggtgttcagcgaattaaagtctccctggacaatcaagaagctactattgtttatcaacctcatcttatctcagtagaggaaatgaaaaagcagattgaagctatgggctttccagcatttgtcaaaaagcagcccaagtacctcaaattgggagctattgatgtagaacgtctaaagaacacaccagttaaatcctcagaagggtcacagcaaaggagtccatcatataccaatgattcaacagccactttcatcattgatggcatgcattgtaaatcatgtgtgtcaaatattgaaagtactttatctgcactccaatatgtaagcagcatagtagtttctttagagaataggtctgccattgtgaagtataatgcaagctcagtcactccagaatccctgagaaaagcaatagtggctgtatcaccggggctatatagagttagtatcacaagtgaagttgagagtacctcaaactctccctccagctcatctcttcagaagattcctttgaatgtagttagccagcctctgacacaagaaactgtgataaacattgatggcatgacttgtaattcctgtgtgcagtctattgagggtgtcatatcaaaaaagccaggtgtaaaatccatacgagtctcccttgcaaatagcaatgggactgttgagtatgatcctctactaacctctccagaaacgttgagaggagcaatagaagacatgggatttgatgctaccttgtcagacacgaatgagccgttggtagtaatagctcagccttcatcggaaatgccgcttctgacttcaactaatgaattttatactaaagggatgacaccagttcaagacaaggaggaaggaaagaattcatctaagtgttacatacaggtcactggcatgacttgcgcttcctgtgtagcaaacattgaacggaatttaaggcgggaagaaggaatatattctatacttgtggccctgatggctggcaaggcagaagtaaggtataatcctgctgttatacaacccccaatgatagcagagttcatccgagaacttggatttggagccactgtgatagaaaatgctgatgaaggagatggtgttttggaacttgttgtgaggggaatgacgtgtgcctcctgcgtacataaaatagagtctagtctcacaaaacacagagggatcctatactgctccgtggccctggcaaccaacaaagcacatattaaatatgacccagaaattattggtcctagagatattatccatacaattgaaagcttaggttttgaagcttctttggtcaagaaggatcggtcagcaagtcacttagatcataaacgagaaataagacaatggagacggtcttttcttgtgagtctgtttttctgtattcctgtaatggggctgatgacatatatgatggttatggaccaccactttgcaactcttcaccataatcaaaacatgagtaaagaagaaatgatcaaccttcattcttctatgttcctggagcgccagattcttccaggattgtctgttatgaatttgctgtcctttttattgtgtgtacctgtacagtttttcggaggctggtacttctacattcaggcttataaagcactgaagcataagacagcaaatatggacgtactgattgtgctggcaaccaccattgcatttgcctactctttgattattcttctagttgcaatgtatgagagagccaaagtgaaccctattactttctttgacacaccccctatgctgtttgtgtttattgcactaggccgatggctggaacatatagcaaagggcaaaacatcagaggctcttgcaaagttaatttcactacaagctacagaagcaactattgtaactcttgattctgataatatcctcctcagtgaagaacaagtggatgtggaacttgtacaacgtggagatatcattaaagtagttccaggaggcaaatttccagtggatggtcgtgttattgaaggacattctatggtagatgagtccctcatcacaggggaggcaatgcctgtggctaagaaacctggcagcacagtgattgctggttccattaaccagaacgggtcactgcttatctgcgcaacacatgttggagcagacacaaccctttctcaaattgtcaaacttgtggaagaggcacaaacatcaaaggctcctatccagcagtttgcagacaaactcagtggctattttgttccttttattgtttttgtttccattgccaccctcttggtatggattgtaattggatttctgaattttgaaattgtggaaacctactttcctggctacaatagaagtatctcccgaacagaaacgataatacgatttgctttccaagcctctatcacagttctgtgtattgcatgtccctgttcactgggactggccactccaactgctgtgatggtgggtacaggagtaggtgctcaaaatggcatactaataaaaggtggagagccattggagatggctcataaggtaaaggtagtggtatttgataagactggaaccattactcacggaaccccagtggtgaatcaagtaaaggttctaactgaaagtaacagaatatcacaccataaaatcttggccattgtgggaactgctgaaagtaacagtgaacaccctctaggaacagccataaccaaatattgcaaacaggagctggacactgaaaccttgggtacctgcatagatttccaggttgtgccaggctgtggtattagctgtaaagtcaccaatattgaaggcttgctacataagaataactggaatatagaggacaataatattaaaaatgcatccctggttcaaattgatgccagtaatgaacagtcatcaacttcgtcttccatgattattgatgcccagatctcaaatgctcttaatgctcagcagtataaagtcctcattggtaaccgggagtggatgattagaaatggtcttgtcattaataacgatgtaaatgatttcatgactgaacatgagagaaaaggtcggactgctgtattagtagcagttgatgatgagctgtgtggcttgatagccattgcagacacagtgaagcctgaagcagaactggctatccatattctgaaatctatgggcttagaagtagttctgatgactggagacaacagtaaaacagctagatctattgcttctcaggttggcattactaaggtgtttgctgaagttctaccttctcacaaggttgctaaagtgaagcaacttcaagaggaggggaaacgggtagcaatggtgggagatggaatcaatgactccccagctctggcaatggctaatgtgggaattgctattggcacaggcacagatgtagccattgaagcagctgatgtggttttgataaggaatgatcttctggatgtagtggcaagtattgacttatcaagaaagacagtcaagaggattcggataaattttgtctttgctctaatttataatctggttggaattcccatagctgctggagtttttatgcccattggtttggttttgcagccctggatgggatctgcagcaatggctgcttcatctgtttctgtagtactttcttctctcttccttaaactttacaggaaaccaacttacgagagttatgaactgcctgcccggagccagataggacagaagagtccttcagaaatcagcgttcatgttggaatagatgatacctcaaggaattctcctaaactgggtttgctggaccggattgttaattatagcagagcctctataaactcactactgtctgataaacgctccctaaacagtgttgttaccagtgaacctgacaagcactcactcctggtgggagacttcagggaagatgatgacactgcattataaaaggccatggagagtgctgccagtttaacttgtcatgcactgacacagcattcatgatgttaccttcacttttcaaaatattgtagaaggatttttctcatgctcttatattagggattctatttgagttgcgtttatctgttggcaaaaatatctttttcaaggcatcagctctgaacctagctttatttaaactgaatttccagtatatttttgttttcactaacaacagataaggtagagcagtgaggtttacaacaagccctacaattagagattgctgaactgctgctaaagtgattttttttttatttgaccaaaaaaaaaaaggcccaagaagaagaaaatgaaaaatttgaagatttgagagcatgaagatattcatgcttttgaactcaaaatattgaagatactctcaagcctgtatccctgcccactggggagcaatgactttcaaagcactgtgtataaaacatctagttttagaagggaaacagttgaaactgtttaaaaatagatgtgccttatttattgcaggctttctttcccccattctccctgcatccttgtccttgcaggtgcttttttagatgctccaatatgtcttcttttgttattttctttcgagctaaccagtttagggtggtttttcattgattaaaaataactgacaactgttctaatattttgctcctttttaaattttgtagctcaaaagaccttaaaggtctgtagggttccctgcctcccatctttccactgttgtaaaaagtatatcaaattattccttcaagtttcctagctctgtgctcagtttcagttcactcctgccaagttggactctaagttattcttcatgtagtctgctgatctcagtctggaaacttaacattatgagccttttctgctcaaaaaattttcaaagattaaaactattatacatatacaggtcatataaaattacctggattcactaaatttgtttgttgttgttgttgttgttgttgttgttgttgagacagagtcttgttttgcagcccaggctggagtgcagtggcaccatcttggctcactgcaacctctgcctaccggattcaaggaattctccctgcctcagcctcctgagtagctaggattacaggtgcctgccaccacacccggctaattttcatatttttcagtagagacggggtttcgccatgttggctagcctggtcttaaactcctaacctcaggtgatccacccgccttggcctcccaaagtgctgggattacaggtgtgagcctccatgcccagcctaaatttgtattttttgaattgagtataacactttgctagtatatataatttaatagattttatttatctttttagtgtttcagataacctctcaaaaagactttaaaataatgctattacacaaaagctgcatttaccaaaaaatacaagtaaaatcataatacagaaactaaaatttccctaggttatgacgctttttagctaaatatatactcttctctagtttaaaacatttgaacttgcctagttagtgtggttggcaaatttaggagcttgttcccattgccaaatggatttagaaattcccttgtgagtgcctggtagctaatacactggtcagagatctggtacttgtaagactatttaaatttctttgttagttgcaagatggatttcatatgcagaatatgtaaatgaagaggactcataagtaaattcctaacattttgttcccattaccagaagcaaagctgctgctaacccaacatctggcacataggatttgtactcggtaaatgttagttcttttctccccttgaggtcagtaataaatacaaaaaaatcatttttctagagcagagtcttaaaatcaggtgggggtaggggatggagttcttcctttcctaccccttttctcttttatcctttcatatatacacatgcaaagtttacaaccttattccatgctgtctttcagatttagaaaagatctaatttctgtctcagctgtcttaaagagagatccaagcttttgatgaaggtgctattaatctagaaaggcaaacccatttcactgaaatatcaatgggtttgcatatctaggccctttttttagaccaatgcctatgccatcctccatgctttcagtttgagttttattatttattattttaattccagtggcccatcttataatacaacttgtttcttctagaagacagagctgatagggtaaatgttgaaaaaagaagcatgcctccttctccctcccacccacctcaagcagttgaacacagccagttattcttccattattatgtgtaccttggagtcatcctcttggtcttgtattcatattgtgggacagtgggaatagcagcttgtagtattgaaataatcaaagagataatttcagctcttacaacaagaacagaaaacatgctaattagaaaaagtcctgctttaagtaatatgtagccacatttgaatcctctaccacaagtcttttttgcaatcttgaactttcattagcttcaaagagaagctgtatttacaggagaaagaggtgattatggagggaatcaaaaatactgctttcagttagtagctagctttaagtcaggagttagtaatgagaaattttataaatgtgtatttctgtgtattcacatacatatatatatacacacatatatatgtacatacacatacatacatattaccatactgaagggaaatggatttatatttgaatttgatatttgaatatttgaagttctctatttatatttcatttatcactcttctgtattcactcagcaaccatgcccttagtctgaagataacaaggatactttaatatccagtgccggttcagactcacctatgtggcaccttaaacttaaatatccaaagatgccttttgaatttcaaagattaaaacacagctagagtagtagtattgtagtctcaagatgtatggtgtgtcatttgtgaaaatagaaacgttatttttcctagtttagtatcaacattttagaatgtcaaatttgatgccttgtgaacaagtaattttatattgtgctttaattttttaaaaagtattctttattcatatgtatagaatgcttaaaatagcactgtagacaagatgtttccaaaactttaagtgcgcatatcttttctgtatacagcttaaaatcaaaaatgtatgttaagagaattttttctattacttatggatcatgctttaaaatgatttttcttgatatttattttactccattttgtttttttctctgggtgaggcatctggttactggttattttaaaaagaataaagacattcctggaatcactccttttgggtttttgtttgttttgtttcttttctacatttttaagtattattttacaaaatagaaaaaatatagattcatgccaaattattacctatttttacactaactttctgcagtccctccatctggtatgagtaaccagatagagcacaaagcatgagttcttgttcttcagttaaaagagcttctttcacagtgttgataacaaatgccttttgtagccaaaaccaggcgtctcaaccttacgtttttagttaaagaaatgtttagctaaacgttgttgaacattgattgtttggtaccgaaaacagcagtggacgatgttgtgcaatatccatctactgtagttaagatattcagtagtttgtttttcataagcatgtaattgatcatatttctgccaaggatgtgccttcaactttataattatagtgttgtaaatcggacgcgtgnnnnnnnnnnnn

SEQ ID NO: 13568 - DNA, 1502 bp, Homo sapiens
  misc_feature 1, 1494, 1495, 1496, 1497, 1498, 1499, 1500, 1501, 1502: n = A,T,C or G
nagtgtgctggaattcggctttcgaccgcacgcccgcggggtccgcgcgttgctgcgttgtgaggggtgtcagctcagtgcatcccaggcagctcttagtgtggagcagtgaactgtgtgtggttccttctacttggggatcatgcagagagcttcacgtctgaagagagagctgcacatgttagccacagagccacccccaggcatcacatgttggcaagataaagaccaaatggatgacctgcgagctcaaatattaggtggagccaacacaccttatgagaaaggtgtttttaagctagaagttatcattcctgagaggtacccatttgaacctcctcagatccgatttctcactccaatttatcatccaaacattgattctgctggaaggatttgtctggatgttctcaaattgccaccaaaaggtgcttggagaccatccctcaacatcgcaactgtgttgacctctattcagctgctcatgtcagaacccaaccctgatgacccgctcatggctgacatatcctcagaatttaaatataataagccagccttcctcaagaatgccagacagtggacagagaagcatgcaagacagaaacaaaaggctgatgaggaagagatgcttgataatctaccagaggctggtgactccagagtacacaactcaacacagaaaaggaaggccagtcagctagtaggcatagaaaagaaatttcatcctgatgtttaggaggacattgcgcctgggaacaaactaaaaaacgaggtggactcgccaccgggatataaaaagtccacacccataacatacttaacaaatttgtggacaacgaataggggaacgataatacaatcgagcagcaataatctacagcacacatgagaagaacaacatctgttcgcaacacaaacacaacgagcgctgggcgcacaatgaagagcacgaggcgacactgacttccttgcatccttccctgctcttctcttattacgtacttctcgatctgctctcgcgcgcaacggcggacgcagagagcagagagagacagaaagagagagcacaaacaagaggagcggaacatcagcgcgacacacgaagagcaaccaagcaagaagagagcagacgagggcagcgagaaccacacaacgacggagaacgaagagagcgagacacgggaggagcgacagcgtagacgagagcgcagcacacaaagaacagggagcggcgagcacaacgaacaaggagacacaagagccaagcagagaccacagacaagaacaacacaggcgcacgacgacgagagaccgacaacacacgcacagggaacgaacgacaggacaagaccagggagtgaaagagcagcagagacgacagaggccaaaccaacgagaacagacaagaagagcgaaacagagcaccaagaacggacaagcaagagcaacacacgaggccgacgcagagcctaagacaacagagacagacgagannnnnnnnn

SEQ ID NO: 13569 - DNA, 2396 bp, Homo sapiens
  misc_feature 1, 2, 3, 4, 5, 6, 7, 8, 9, 10, 11, 12: n = A,T,C or G
nnnnnnnnnnnnatcctctcgcccgtcgtgagcccctcttgtgtgagccgcccctttggcgctccctggacccccctctttggttgtttttgtcgacaccacctgttgtgcttccccccgccgctgtctttttttcttgtggggggacgccccccctccttgtgttgttgccacaagggtttttctttgagagcctgttgtgacccgttttctttctcttttgggcgccccgcgccccccccggtgtgtgtttataacgccttctctctctggcgcccggggcgcgcctccccacgcgtcgttttttcttgctcgtgctttgctgttgtggtctgttcagtcgtgtggccatgcgtgttttgttttttttttttttttttggaatgattaaagatgtctttataaagtttttttcaagacttcattctaaatacacagaataaaaaatggtgtcagctcacttgtaagacaccaaccagattttccttatactgtctcaaaatttaaagatcaatttccccagagggtgtgcaatgcatcataaaatggcccttttttgaggatgggagaggaagggttgggcaggatggaatattaaattgtaacatgataaacatgcaagactgttatccaatctagataatttatatacattttgatgacttaggaaaacaaagcaatcatttgtgacaagcctaaaaagcttgacatatttaacatacttaggaactttttttgtgcggtgggaattctctaattgtatcatgtgggccttttgaaagtaacaaacagaaggccagtctgttgcaagtttgctgctgaacatcacattccaccctaagaaaacacaaggtggattgcatcgagggtggataccttaccttagcacagaaggaaaaagtatgtcagtgcaaagtatggactaaactgctttcaggaaaaaagttgtaaaaattgatacaggttggaaaagggaattttccttcccggcttggagtcctcccaatttaaggcagaacccatccactccaatttctgcagtttaaaactttctctacttatttagttttctcctctgagttcaaccgctgctggattcgtttggcataactttgtgccatggagtgaatgatagtttgattgttgtacccgcttccgctgttgcctcggcgcgtttccctgtggtgtgcccatttcgcttttgtggtgaagcttctgccgttgagcctccaggtactcctgaaatggcttctgcagagatggacctatgccggggacagcaccaatgaaagccaccatttgctccactatgtgcttgctgaatgttattataacaaaaattttctggatatgcatttttattattgcttttccaattagggttgcaccaaagaaggtccaaaaaggtaccagaaagtgtccacacgttattccagccagatcaaataaaggatttggaattgaagcacaggccaaaattccaaaaaatccaactttctgtactagtttttgaactgccagtttggcccgggaggcaaagtcttgtgcagactctgcatgttccagcatctcttcaaattcctgatactcttcatcatctggttcagcacctgagaggcgagctgctctggccatgaaatatggaggcagctctccgattgctgtaccgataccccacatgcaggcttcaatcctaacttttgagatgatactccacaaagaaatggttccttcagtgccctcttcatctggacaaataatctgatcaggatagggtggttcgggaaaattaactgaattgcattcataagcagctaatgtaactgaggctatatgtggacccagataaagcagaaaggtgtgcagccctgttccaagcccaacagaagacaaaattcctaagcctatccagtaggcatacaaaagaaactgtttctctatacgttgcacatactgttgatgcactccttcaacataatacgtagctataagcacagcaagcagcagtaaaaaagacaccacaatgctttgacgatgccataattttgaggtccattccttcaagattacaaggatttccagagaaaaatactgcaaggtaatgagcggctgtctccacaggacaatattctgcctttcttcccgctccctcctcttcttttcattcactgaagaggggtctgtgaaatttccattatgatgttccttgttcattgctacacgtctctggtcacaattttttccattctctgccatttcatagatcagtaactcttgaggagccgctccgaccccggctgctccggatctcaggatcctggaagctgctccttacggactctcacacccgccgctgggctccagacaaccggaacccccccgcgcgcccgcccgcc

SEQ ID NO: 13570 - DNA, 1215 bp, Homo sapiens
  misc_feature 1, 9, 16, 1213, 1214, 1215: n = A,T,C or G
natcgaccncccttgnctcggttcgcgcgccattgtgttggtacccgggaattcggccattatggccgggagagtttggggatctacagcagccaaaggcttgtccctgactttatatggctgcgcctggcgagcgactgagtcgtccgtgaggaaaaagaggcgaggcttttccgagatcgtctcagcgatggcgcttcggtcgcagttttgggggttctcggtttgcaggaaccctgggtgcaggttcgcagccctgtcaaccagctccgagccggcagcgaaacctgaagtggaccctgtggaaaatgaagctgtcgccccagaattcaccaaccggaacccccggaacctggagcttttatctgtagccaggaaagagcggggctggcggacggtgtttccctcccgtgagttctggcacaggttgcgagttataaggactcagcatcatgtagaagcacttgtggagcatcagaatggcaaggttgtggtttcggcctccactcgtgagtgggctattaaaaagcacctttatagtaccagaaatgtggtggcttgtgagagtataggacgagtgctggcacagagatgcttagaggcgggaatcaacttcatggtctaccaaccaaccccgtgggaggcagcctcagactcgatgaaacgactacaaagtgccatgacagaaggtggtgtggttctacgggaacctcagagaatctatgaataaatggaagcattaattgttttgaacatgtaaatataaatctgtcagccactacagccatcaaaagagagcatctggaagaacagccagcttggaagttttacagcaataatgttgcagtggaatattatttgtagttaaggtcatcctcctcccctttctgtttttttaaatcaagaactacgttctgcccctctcttgggcttcagaagcatctaagaaaagcagtcatcaattataattaactttcaaagggcaagtcagaagttgtttataaattacaaaataaaggcatattatgaactcttaaaaaacaaaaaaaacaaaacacacaaacagggcgcgccaagattaacggggcaattcggtccctctgtcagggccagatacataaacgcgggcaacacggtgagagctggacttgagccctctgggtaggcccactcgtaatgtggtagcgcgggggaatcacaagcaacccagaannn

SEQ ID NO: 13571 - DNA, 5845 bp, Homo sapiens
  misc_feature 1, 2, 5666, 5843, 5844, 5845: n = A,T,C or G
nnccccttgcccctaccgtctcctttaacacagtcacgtgagggacgcgcgcgggggcagctgggagtagtactgccggttggtcagggttcggcctcaacatggcggttccggccgggcagtgaccaaggttttgccgtccgaaggactaagtggtgactgtcggcgtctccacctatcggggtggaatgcgagcacgcggggacgagcgctgagaagcggcggtgacgggaaggggggggtcagtggattgtgccccagaaaccgaagcggcggcgtctgttccttcttgtttctaggctccagtgcgttcggggccccgcccggccgggccaggccggcgggcggcggcggtagctgctgcagccgcaggataacctcgcagggtgggccggagggcgggcgccgccgctgcctgtgctgcggcgatggcccagtgtgtacaatcagtgcaggagctaatcccggactccttcgtcccctgtgtcgctgcgctgtgcagcgacgaagccgagcggctcactcgtctcaatcacctcagcttcgcggagctgcttaagcccttctcccgcctcacttccgaggttcacatgagagatcctaataatcaacttcacgtaattaaaaatttgaagatagcagtaagcaacattgtcacccagccacctcagcctggagccatccggaagcttttgaatgatgttgtttctggcagtcagcctgcagaaggattagtagctaatgtgattacagcaggagattatgaccttaacatcagtgccactactccatggtttgagtcttacagagaaacctttcttcagtcgatgccagcatcggatcatgaatttctgaaccactatttagcatgtatgttggtagcgtcatctagtgaagctgaacctgtggaacagttttcaaagttgtcacaagaacagcatcgaattcagcacaacagtgattattcctaccccaagtggtttataccaaatacacttaaatactatgtacttttacatgatgtaagtgcaggagatgaacagagagctgaatcaatttatgaagaaatgaaacagaaatatggaactcagggttgctatttacttaaaattaattctcgaacatctaatcgagcatcagatgaacagataccagatccttggagtcagtatctccagaaaaatagtattcaaaaccaggaatcatatgaagatggcccttgtactataacttcaaataagaattctgataataacttgctttcattggatggattagataacgaagtcaaagatggcttaccaaataactttagagctcacccacttcagttggagcaatccagtgacccttctaacagtattgatggcccagatcatctaagatctgcttcatcgttacatgaaacaaagaaaggaaatactggaataattcatggtgcatgtttaacacttactgatcatgatagaattcgacagtttatacaagagttcacatttcggggccttttgccacatatagagaaaacaattaggcaattaaacgatcagctaatatcaagaaaaggtttgagtcgatctctattttctgcaactaaaaaatggtttagtggcagtaaagttccagaaaagagcattaatgacctgaaaaatacatctggcttgctgtatcctccggaagcaccagaacttcaaatcaggaaaatggctgacttatgttttttggtgcagcattatgatttggcttacagttgctatcatactgcaaagaaagattttcttaatgatcaagcaatgctttatgcagctggtgccttggaaatggcagcagtgtctgcttttcttcaaccaggagcacctaggccatatcctgctcattacatggatacagcaattcagacatacagagatatctgcaagaatatggtgttggctgaaagatgtgtgttgcttagtgctgaacttttaaaaagccaaagcaaatattcagaggctgcagctctcctaatacggttgaccagtgaggattctgatcttcgaagtgcacttcttttggaacaggcagcacattgctttataaacatgaaaagtcccatggttagaaaatatgcatttcatatgatattggcaggccatcgatttagtaaagcagggcagaaaaagcatgctttacgctgttattgtcaagccatgcaagtttacaaaggaaaaggctggtctcttgcagaggatcacattaatttcactattgggcgccagtcctatactcttagacagctggataatgctgtgtctgcttttaggcatattctaattaatgaaagtaaacaatctgctgctcaacagggggctttcctcagagaatatctttatgtttacaagaatgtaagtcagctgtcaccagatggtcctttgccacagcttcctttaccgtatattaacagttcagcaacacgggttttttttggccatgacagacgaccagcggatggtgaaaaacaagcagctactcatgtaagtcttgatcaagaatatgattctgaatcctctcagcagtggcgagaacttgaggaacaagttgtttctgtggttaacaaaggagtaattccatccaattttcatcccacacaatactgtttgaacagttactcagataattcaagatttccacttgcagttgtagaagaaccaattacagtggaagtggcttttagaaaccctttgaaagttctacttttgttgactgatttgtcattgctttggaagtttcatcctaaagatttcagtggaaaggataatgaagaagttaaacaactagttacaagtgaacctgaaatgattggagctgaagttatttcagagttcttaattaatggcgaagaatcaaaagtggcaagactaaagctctttccccatcacataggggagctgcatattctgggagttgtttataatcttggcactattcagggctctatgacagtagatggcattggtgctcttcccggatgtcacacaggaaaatattccttgagtatgtcagtccgagggaagcaggatttagaaattcaaggtcctcgacttaacaacacaaaagaagagaaaacatctgttaaatatggccctgatcgacgtttagatcccataatcacagaagaaatgccactgttggaggtgttctttatacattttcctacagggcttctctgtggagaaatccgaaaagcatatgtagaatttgtcaatgtcagcaaatgtccacttactggattgaaggttgtttctaaacgtccagagttctttactttcggtggtaatactgctgttctaacaccactaagtccctcagcttctgagaattgtagtgcttacaagactgttgtgacagatgctacctctgtgtgtacagcactcatatcatcagcttcttctgtagactttggcattggcacaggaagtcaaccagaggtgattcctgttccccttcctgacactgttcttctacccggagcctcagtgcagctgccaatgtggttacgtgggcctgatgaagaaggtgtccatgaaattaactttttgttttactatgaaagtgtcaaaaagcagccaaaaatacggcacagaatattaagacacactgcaattatttgtaccagtcggtctttaaatgtacgggccactgtctgcagaagtaattctcttgaaaatgaagaaggcagaggaggcaatatgctagtctttgtggatgtggaaaataccaatactagtgaagcaggcgttaaggaattccacatagtgcaagtatcaagtagtagcaaacactggaagttacagaaatctgtaaatctttctgaaaacaaagataccaaacttgccagtagggagaagggaaagttttgctttaaggcaataagatgtgagaaagaagaagcggccacacagtcctctgaaaaatatacctttgcagatatcatctttggaaatgaacagataataagttcagcaagcccatgtgcagacttcttttatcgaagtttatcttctgaattgaaaaaaccacaagctcacttgcctgtgcatacagaaaaacagtcaacagaggatgctgtgagattgattcaaaaatgcagtgaggtagatttgaatattgtcatattatggaaggcatacgttgtggaagacagtaaacagcttattttggaaggtcaacatcatgttattcttcgcactataggaaaagaagccttttcatatcctcagaaacaggagccaccagaaatggaactattgaaatttttcaggccagaaaacattacagtttcctcaaggccatcagtagagcagctttctagtctcattaaaacgagtcttcactacccagaatcatttaatcatccatttcatcaaaaaagcctttgtttagtaccagtcactcttttactttccaattgttctaaggctgatgtagatgtcatagttgatcttcggcataaaacaacaagtccagaagcactggaaatccatggatcattcacatggcttggacaaacacagtataaacttcaacttaaaagccaggagattcacagtctgcagctgaaagcatgctttgttcatacaggtgtttataaccttggaactcctagggtatttgccaagttatcggaccaagttacagtgtttgaaacaagtcagcagaattccatgcctgccctgatcatcatcagtaatgtgtgacaacttggaaatttgtactgaaatccacaataatcagtttttgctggatgggttttacagcagtatttgatatacctaacttgttatggaggttgattgatatctgatccctgcaaaatactttgacttgtcattttgttgatgatgcaaagcacgttggactgagaatacttaacattctttttctgtatttctttaaaccctgagaataatttacatgctcataatacaggatatcagcatatttgtgcaccttattaagccccatcttaagaaaacacaaagtctaagtctgctgttacaacttgtcaatggtatacgaatattaggagatgattctgagaaaggaaaggccttgttggcagtactcctgttaagccattagtctctaaattccagctttactgtgaagttctatagagtgttaaatacaaattttcctgtcttgcttcacacagttccttaaaatcagttttgaactttggtcatagagtcttcatatttcagtatttggtggtccctatgacttatacataactttgtaaaaagaaaaaaaaattttttctgatgctttgaatatagttttgaaaggagttttgacttttttcccctcattcatctcagtatagagtgcgctatttcacaatacgatttttgtcattaaaattaccatattctttattatataacgttaactattgagttgatctgtttaaaatataaatctcaagttaattaaaaataagcttttcaaaaatgtattatatttataacaaatatactgtaaatagaataaagacatgctattcactgtcaaaaaaaaaaaaaaaaaaaccaaaaaaactttgggggccgcctgggcctcgaaaaggtttttaaaacccttcggtggggggcgggggcccacagaggtacactgtgaccctgggnccacaaggcgtgtcccacaagagaacaccggggacaagagcaaggccgcgggatttttctcaccagtaaaaaaaaacggcgggggggaccccaggggttcctgaacaaattcacaaaggggccaggaggacataaggggactctacaccaggagcgccaaaggaagcggatataagnnn

SEQ ID NO: 13572 - DNA, 1519 bp, Homo sapiens
  misc_feature 1502, 1503, 1504, 1505, 1506, 1507, 1508, 1509, 1510, 1511,1512, 1513, 1514, 1515, 1516, 1517, 1518, 1519: n = A,T,C or G
cccccgactcctaagtcctgccgccgccaccatgtccgcctcggctgtcttcattctggacgttaagggcaagccattgatcagccgcaactacaagggcgatgtggccatgagcaagattgagcacttcatgcctttgctggtacagcgggaggaggaaggcgccctggccccgctgctgagccacggccaggtccacttcctatggatcaaacacagcaacctctacttggtggccaccacatcgaagaatgccaatgcctccctggtgtactccttcctgtataagacaatagaggtattctgcgaatacttcaaggagctggaggaggagagcatccgggacaactttgtcatcgtctacgagttgctggacgagctcatggactttggcttcccgcagaccaccgacagcaagatcctgcaggagtacatcactcagcagagcaacaagctggagacgggcaagtcacgggtgccacccactgtcaccaacgctgtgtcctggcgctccgagggtatcaagtataagaagaacgaggtcttcattgatgtcatagagtctgtcaacctggtggtcaatgccaacggcagcgtccttctgagcgaaatcgtcggtaccatcaagctcaaggtgtttctgtcgggaatgccagagctgcggctgggcctcaatgaccgcgtgctcttcgagctcactggccgcagcaagaacaaatcagtagagctggaggatgtaaaattccaccagtgagtgcggctctctcgctttgacaacgaccgcaccatctccttcatcccgcctgatggtgactttgagctcatgtcataccgcctcagcacccaggtcaagccactgatctggattgagtctgtcattgagaagttctcccacagccgcgtggagatcatggtcaaggccaaggggcagttttagactcagtcagcggactttgaagtgccactatctccgggtgtacccagcgatgccgactccccaagattcaagaccagtgtgggcagcgccaagtatgtgccggagagaaacgtcgtgatttggagtattaagtctttcccggggggcaaggagtacttgatgcgagcccactttggcctccccagtgtggaaaaggaagaggtggagggccggccccccatcggggtcaagtttgagatcccctacttcaccgtctctgggatccaggtccgatacatgaagatcattgagaaaagtggttaccaggccctgccctgggttcgctacatcacccagagtggcggctgggagagaaactctctgcttccctcgcccttggagctttccccatccccctgattttatatgaagaaatagaagaggggcttgaagtccccctcgcgagtgccttcttgcaattacctgccttagcgggtgttgcgggtccctccttcacagccgctgagcccagaggtcccgctggcccctcctctgaattttaggatgtcattaaaaagatgaatcnnnnnnnnnnnnnnnnnn

SEQ ID NO: 13573 - DNA, 1444 bp, Homo sapiens
  misc_feature 1420, 1421, 1422, 1423, 1424, 1425, 1426, 1427, 1428, 1429,1430, 1431, 1432, 1433, 1434, 1435, 1436, 1437, 1438, 1439,1440, 1441, 1442, 1443, 1444: n = A,T,C or G
cgacccacgcgtccggttttcaatcctggggaagccagaaaaacagcgatttatactcttaatgggtactttctgactgaattttatgaactcattctgaagaggctgacgattttactgtctcatttttttcctttctccagaatgggttctgggtgggtcccctgggtggtggctctgctagtgaatctgacccgactggattcctccatgactcaaggcacagactctccagaagattttgtgattcaggcaaaggctgactgttacttcaccaacgggacagaaaaggtgcagtttgtggtcagattcatctttaacttggaggagtatgtacgtttcgacagtgatgtggggatgtttgtggcattgaccaagctggggcagccagatgctgagcagtggaacagccggctggatctcttggagaggagcagacaggccgtggatggggtctgtagacacaactacaggctgggcgcacccttcactgtggggagaaaagtgcaaccagaggtgacagtgtacccagagaggaccccactcctgcaccagcataatctgctgcactgctctgtgacaggcttctatccaggggatatcaagatcaagtggttcctgaatgggcaggaggagagagctggggtcatgtcccactggccctatcagggaatggagactggacctttcagactgtggtgatgctagaaatgactcctgaacttggacatgtctacacctgccttgtcgatcactccagcctgctgagccctgtttctgtggagtggagagctcagtctgaatattcttggagaaagatgctgagtggcattgcagccttcctacttgggctaatcttccttctggtgggaatcgtcatccagctaagggctcagaaaggatatgtgaggacgcagatgtctggtaatgaggtctcaagagctgttctgctccctcagtcatgctaaggtcctcactgaagcttctctctctggagcctgaagtagtgatgagtagtctgggccctgggtgaggtaaaggacattcatgaggtcaatgttctgggaataactctcttccctgatccttggaggagcccgaactgattctggagctctgtgttctgagatcatgcatctcccacccatctgcccttctcccttctacgtgtacatcattaatccccattgccaagggcattgtccagaaactcccctgagaccttactccttccagccccaaatcatttacttttctgtggtccagccctactcctataagtcatgatctccaaagctttctgtcttccaactgcagtctccacagtcttcagaagacaaatgctcaggtagtcactgtttccttttcactgtttttaaaaaccttttattgtcaaataaaatggagatacaaaaaatgnnnnnnnnnnnnnnnnnnnnnnnnn

SEQ ID NO: 13574 - DNA, 4395 bp, Homo sapiens
  misc_feature 3330, 3331, 3332, 3333, 3334, 3335, 3336, 3337, 3338, 3339,3340, 3341, 3342, 3343, 3344, 3345, 3346, 3347, 3348, 3349,3350, 3351, 3352, 3353, 3354, 3355, 3356, 3357, 3358, 3359,3360, 3361, 3362, 3363, 3364, 3365, 3366, 3367, 3368: n = A,T,C or G
  misc_feature 3369, 3370, 3371, 3372, 3373, 3374, 3375: n = A,T,C or G
atgatggcaccacgcgtccggctaagcgaggagtccgagtgtgtgagcttgagagccgcgcgctagagcgacccggcgagggatggcggccaccgggaccgcggccgccgcagccacgggcaggctcctgcttctgctgctggtggggctcacggcgcctgccttggcgctggccggctacatcgaggctcttgcagccaatgccggaacaggatttgctgttgctgagcctcaaatcgcaatgttttgtgggaagttaaatatgcatgtgaacattcagactgggaaatgggaacctgatccaacaggcaccaagagctgctttgaaacaaaagaagaagttcttcagtactgtcaggagatgtatccagagctacagatcacaaatgtgatggaggcaaaccagcgggttagtattgacaactggtgccggagggacaaaaagcaatgcaagagtcgctttgttacacctttcaagtgtctcgtgggtgaatttgtaagtgatgtcctgctagttccagaaaagtgccagtttttccacaaagagcggatggaggtgtgtgagaatcaccagcactggcacacggtagtcaaagaggcatgtctgactcagggaatgaccttatatagctacggcatgctgctcccatgtggggtagaccagttccatggcactgaatatgtgtgctgccctcagacaaagattattggatctgtgtcaaaagaagaggaagaggaagatgaagaggaagaggaagaggaagatgaagaggaagactatgatgtttataaaagtgaatttcctactgaagcagatctggaagacttcacagaagcagctgtggatgaggatgatgaggatgaggaagaaggggaggaagtggtggaggaccgagattactactatgacaccttcaaaggagatgactacaatgaggagaatcctactgaacccggcagcgacggcaccatgtcagacaaggaaattactcatgatgtcaaagctgtctgctcccaggaggcgatgacggggccctgccgggccgtgatgcctcgttggtacttcgacctctccaagggaaagtgcgtgcgctttatatatggtggctgcggcggcaacaggaacaattttgagtctgaggattattgtatggctgtgtgtaaagcgatgattcctccaactcctctgccaaccaatgatgttgatgtgtatttcgagacctctgcagatgataatgagcatgctcgcttccagaaggctaaggagcagctggagattcggcaccgcaaccgaatggacagggtaaagaaggaatgggaagaggcagagcttcaagctaagaacctccccaaagcagagaggcagactctgattcagcacttccaagccatggttaaagctttagagaaggaagcagccagtgagaagcagcagctggtggagacccacctggcccgagtggaagctatgctgaatgaccgccgtcggatggctctggagaactacctggctgccttgcagtctgacccgccacggcctcatcgcattctccaggccttacggcgttatgtccgtgctgagaacaaagatcgcttacataccatccgtcattaccagcatgtgttggctgttgacccagaaaaggcggcccagatgaaatcccaggtgatgacacatctccacgtgattgaagaaaggaggaaccaaagcctctctctgctctacaaagtaccttatgtagcccaagaaattcaagaggaaattgatgagctccttcaggagcagcgtgcagatatggaccagttcactgcctcaatctcagagacccctgtggacgtccgggtgagctctgaggagagtgaggagatcccaccgttccaccccttccaccccttcccagccctacctgagaacgaagacactcagccggagttgtaccacccaatgaaaaaaggatctggagtgggagagcaggatgggggactgatcggtgccgaagagaaagtgattaacagtaagaataaagtggatgaaaacatggtcattgacgagactctggatgttaaggaaatgattttcaatgccgagagagttggaggcctcgaggaagagcgggaatccgtgggcccactgcgggaggacttcagtctgagtagcagtgctctcattggcctgctggtcatcgcagtggccattgccacggtcatcgtcatcagcctggtgatgctgaggaagaggcagtatggcaccatcagccacgggatcgtggaggttgatccaatgctcaccccagaagagcgtcacctgaacaagatgcagaaccatggctatgagaaccccacctacaaatacctggagcagatgcagatttaggtggcagggagcgcggcagccctggcggagggatgcaggtgggccggaagatcccacgattccgatcgactgccaagcagcagccgctgccaggggctgcgtctgacatcctgacctcctggactgtaggactatataaagtactactgtagaactgcaatttccattcttttaaatgggtgaaaaatggtaatataacaatatatgatatataaaccttaaatgaaaaaaatgatctattgcagatatttgatgtagttttcttttttaaattaatcagaaaccccacttccattgtattgtctgacacatgctctcaatatataataaatgggaaatgtcgattttcaataatagacttatatgcaggctgtcgttccggttatgttgtgtaagtcaactcttcagcctcattcactgtcctggcttttatttaaagaaaaaaaaggcagtattccctttttaaatgagctttcaggaagttgctgagaaatggggtggaatagggaactgtaatggccactgaagcacgtgagagaccctcgcaaaatgatgtgaaaggaccagtttcttgaagtccagtgtttccacggctggatacctgtgtgtctccataaaagtcctgtcaccaaggacgttaaaggcattttattccagcgtcttctagagagcttagtgtatacagatgagggtgtccgctgctgctttccttcggaatccagtgcttccacagagattagcctgtagcttatatttgacattcttcactgtctgttgtttacctaccgtagctttttaccgttcacttccccttccaactatgtccagatgtgcaggctcctcctctctggactttctccaaaggcactgaccctcggcctctactttgtcccctcacctccaccccctcctgtcaccggccttgtgacattcactcagagaagaccacaccaagnnnnnnnnnnnnnnnnnnnnnnnnnnnnnnnnnnnnnnnnnnnnnnacagcccacttccattgtattgtgtgacacatgctctcaatatataataaatgggaaatgtcgattttcaataatagacttatatgcaggctgtcgttccggttatgttgtgtaagtcaactcttcagcctcattcactgcttctggcttttatttaaagaaaaaaaaaaggcagtattccctttttaaatgagctttcaggaagttgctgagaaatggggtggaatagggaactgtaatggccactgaagcacgtgagagaccctcgcaaaatgatgtgaaaggaccagtttcttgaagtccagtgtttccacggctggatacctgtgtgtctccataaaagtcctgtcaccaaggacgttaaaggcattttattccagcgtcttctagagagcttagtgtatacagatgagggtgtccgctgctgctttccttcggaatccagtgcttccacagagattagcctgtagcttatatttgacattcttcactgtctgttgtttacctaccgtagctttttaccgttcacttccccttccaactatgtccagatgtgcaggctcctcctctctggactttctccaaaggcactgaccctcggcctctactttgtcccctcacctccaccccctcctgtcaccggccttgtgacattcactcagagaagaccacaccaaggaggcggccgctggcccaggagagaacacggggaggtttgtttgtgtgaaaggaaagtagtccaggctgtccctgaaactgagtctgtggacactgtggaaagctttgaacaattgtgttttcgtcacaggagtctttgtaatacttgttacagttgatgtcgatgctcactgcttctgctttgtctttctttatattttaaatctgaaggttctggtaacctgtggtgtattactattttcctgtgactgcttttggtttgtgtttttcctttatactgccctttgaccctattcatgtctgtacccactatgcacagattaaacttcacctacacactcc

SEQ ID NO: 13575 - DNA, 668 bp, Homo sapiens
gcacgagcccagctgaataaagcccttccttctacaactcggtgtctgagaagttttgtctgcggctaatcctgctacgtttcttggttccctgacggggaaacgaagtaactgatggacagccgaagcagccccttatgcggcttaggcctgccctgtggagcatcctgcgggggactccggccagcctgagtgacaggatccaaagagcactcccgggtaggaaattgccccagtggaacgccttgccagaacagcgcatagcaggcccctgtggaggattaacacagtggctgaacaccgggaaggaactggcacttggagtccagacatctgaaacttggtaagactagtctttgtaacttgcttactccatccatttgagtggaagcgtggcctgatcacccatggcgtgcccttatcggcactttgatttagttttggttttggttttgacttggtttgaattgcttgacagcaccagtcttgggaacttgcccactccatttgagtggaagcgtggcctgatcacccatggcatgcctttatcggcactttgattttggttttggttttgacttggtttgattacttgacaggactggtcttgggaacttgcctactccatttgagtggaagcgtggcctgatcacccacggtgtgcctgt

SEQ ID NO: 13576 - DNA, 415 bp, Homo sapiens
  misc_feature 1, 2, 3, 4, 5, 6, 7, 391, 392, 393, 394, 395, 396, 397, 398,399, 400, 401, 402, 403, 404, 405, 406, 407, 408, 409, 410,411, 412, 413, 414, 415: n = A,T,C or G
nnnnnnngaatataaagtccgggaagagaacaagtatcggagagatgcaggagaaaacaaaaagccattttacaggacaatttgaaggatcacagtctgtattaacagttttgccattcatataattcaaatcatatttgattttcaggtttatttatttgaatttaacttccacatgccatattatataggaataactggagaagtgatggctccttttgtctcttagttccaataacttgaaatatttttttccacatatttcagttttgttcatgaatattcaagaagacatcctcagcttgctgtctcagtaattctaagagttgctaaaggataccaggagttattggagaagtgtttccagactgaaaaccctcttgaatgccannnnnnnnnnnnnnnnnnnnnnnnn

SEQ ID NO: 13577 - DNA, 936 bp, Homo sapiens
  misc_feature 1, 2, 3, 4, 5, 6, 7, 936: n = A,T,C or G
nnnnnnncaggtacaaaaattagctgggcatagtggcacatgcctgtagtcccagctactcgggaggctgatgaacaagaatcacttgaacctgggaggaggaggttgcagtgagctgagatcgtgccactgcactccagcctgagcgacagagcaagactgtctcaaaaaaataaaaaagaaaaaaataataaaaaggaaaacaaagcctttagaaaaacaaagcctttgaaaaaggatgtaaaattgaatatatagatacaattatttttaaaaagttttatagaaaaatatcctggattgttgatgttgttttaatatattttaatcatttttgtataatgtcatgtataatatgttataatgaaagtaaaaaaaaaaaaaggtcttagcagagcaggcagaaaaatgccaaactcagtgccttttagttattttgatatgtgggaagatcatgcataaggctccttttagctcattgcttgagctaggaaggttaatccccctgaaggtcaccttggaaagggtactatcagcacagaaaaacagtgagaaccatcctaaatttcagcaaggatttgagaaagatccaaatttcacataatgatgaatcttcacacctctctgccctatgattttccgtaattttcgatcatctatgcattgttcaaatttatacctgcagactattcatttaattttactccttacaattataatagactaagacagatatagaagctacttatttacactagaaattaatttaatagatgaaaaatattgagcaatatttggaatataaaatttacaaagcatattataatacctaaataatacttaacctaatatagtgcaattttacaatatttatttagcttgctgtctaaaattctggtttctttaactttcggacgcgtggtcgactccctatan

SEQ ID NO: 13578 - DNA, 239 bp, Homo sapiens
  misc_feature 234, 235, 236, 237, 238, 239: n = A,T,C or G
acgcggggagaggtgaaaggctgtaggaggagcaatatgtgggaaagatcagaagttcagttttggacatgccaaatattacttggccaaatggttgggtggatgattggggatcaggagtcatcctgataaaattggcatgcagatagtattaaaaaactccagactggatgagatcaccaagtgtagatagaaaagagagactgaattgtgaatgctccagcattaagcagnnnnnn

SEQ ID NO: 13579 - DNA, 593 bp, Homo sapiens
  misc_feature 592, 593: n = A,T,C or G
accttacaggggttaggtagctttcttcaggtgaattagagagttgctggcagtgagttcaatgttaatgatatcaacagtgtatattaaataaggcatttttaaacagaaacataaaataagtttatgtattgatggttgaccaatatgtgaccagaggcttgcaggaacctaaccctccctgtatttcccgtaggagtagtggttcaatattcactaattcaggttctcagtgactttataaaacataactgctgtgaataacaagactctactgtgtgttattctatatttgatgtccactgtcataggacagggtatattgtaatcaaaattggaattcctagaattagccttccaagccttctttctttctttctttcttttttgagacggaattttgctcttgttgcccaggctggagcacaatggcccaatgttggctcactgcaacctccgtctcccgggttcaggcaattctactgcctcagcctcacgagtagctgggattacaggcatgtgccaccacgcccagctaattttgtatttttttagtggagacggagtttctccatgttggtcaagctggtcnn

SEQ ID NO: 13580 - DNA, 217 bp, Homo sapiens
  misc_feature 1, 2, 3, 213, 214, 215, 216, 217: n = A,T,C or G
nnnaccttctcatggcactgactttatatgctcctctggctgactcacactgaggttccttggtatctgatcagtttcactttctctgctccagcaaaccttcttcattctagtactctgtttgagtgccaaagcggctgttactgtaagactaaacgaaggaggactaatgcataaatgaagaccaagacaaaagaatttgtttaaaagaannnnn

SEQ ID NO: 13581 - DNA, 688 bp, Homo sapiens
tgctccagcctgctcagaagaactatttctaacaatgttttttaatagtattttactgggtccaagtggaggagaacttgatgaccttctccatgtcttctctaggtcaacatcgggcaaggtagccatcctcagaaggtcaaagtgtttgggccaggtgtggagagaagtggtctgaaggcaaatgaacctacacacttcacggtggactgtactgaggctggggaaggtgagaaagggctttgttcaacccagtgatcattgctccttggggaaggcagttcttttcataacgtttcaattccttttgaactaggaagtagtccatctgaataggtaatcatctactgagcctctgagtcattccttagtgatatctttgctaatccatcatccctttccccaaatccttactctttctcaggtttcttactagaaacttcccaattgctttttgagggtgttaacctgagctggaagagattgcacaggacatgttgtttcttgtaagctggtgctaataagctggtctgttccaggtgatgtcagtgttggcattaagtgtgatgcccgggtgttaagtgaagatgaggaagacgtggattttgacattattcacaatgccaatgatacgttcacagtcaaatatgtgcctcctgctgctgggcgatacactatcaaagttctc

SEQ ID NO: 13582 - DNA, 2244 bp, Homo sapiens
tctgaccaccgcgcaacgacacgatgcacaacacacccacacccccacccacctcacctacggctatgcacgaggccgcggtgttaatcggcccaggcctgagcactcatggatcctcctgcacaagaacatgaaacacctgtggttcttcctcctcctggtggcagctcccagatgggtcctgtcccaggtgcagctgttggagtcgggcccaggactggtgaagccttcggagaccctcacgctgacctgcgctgtctctgggttctcactcaacaatgctggaatgggtgtgagctgggtccgccagcccccagggaaggggctggagtggattggggaaatctctgttagtgggatcaccaactacaactcgtccctcaagagtcgagtcaccatatcagtagacaagtccgagaaccagttctccctgaagttgttttatgttaccgccgcggacacggctgtgtattactgtgcgagacatcataaagcccgatattacgaaattttgactggtccggcgggccgatgcttttgatatctggggccagggaaccctggtcaccgtctcctcagggagtgcatccgccccaacccttttccccctcgtctcctgtgagaattccccgtcggatacgagcagcgtggccgttggctgcctcgcacaggacttccttcccgactccatcactttctcctggaaatacaagaacaactctgacatcagcagcacccggggcttcccatcagtcctgagagggggcaagtacgcagccacctgcacaggtgctgctgccttccaaggacgtcatgcagggcacagacgaacacgtggtgtgcaaagtccagcaccccaacggcaacaaagaaaagaacgtgcctcttccagtgattgctgagctgcctcccaaagtgagcgtcttcgtcccaccccgcgacggcttcttcggcaacccccgcaagtccaagctcatctgccaggccacgggtttcagtccccggcagattcaggtgtcctggctgcgcgaggggaagcaggtggggtctggcgtcaccacggaccaggtgcaggctgaggccaaagagtctgggcccacgacctacaaggtgaccagcacactgaccatcaaagagagcgactggctcggccagagcatgttcacctgccgcgtggatcacaggggcctgaccttccagcagaatgcgtcctccatgtgtgtccccgatcaagacacagccatccgggtcttcgccatccccccatcctttgccagcatcttcctcaccaagtccaccaagttgacctgcctggtcacagacctgaccacctatgacagcgtgaccatctcctggacccgccagaatggcgaagctgtgaaaacccacaccaacatctccgagagccaccccaatgccactttcagcgccgtgggtgaggccagcatctgcgaggatgactggaattccggggagaggtttcacgtgcaccgtgacccacacagacctgccctcgccactgaagcagaccatctcccggcccaagggggtggccctgcacaggcccgatgtctacttgctgccaccagcccgggagcagctgaacctgcgggagtcggccaccatcacgtgcctggtgacgggcttctctcccgcggacgtcttcgtgcagtggatgcagagggggcagcccttgtccccggagaagtatgtgaccagcgccccaatgcctgagccccaggccccaggccggtacttcgcccacagcatcctgaccgtgtccgaagaggaatggaacacgggggagacctacacctgcgtggtggcccatgaggccctgcccaacagggtcaccgagaggaccgtggacaagtccaccggtaaacccaccctgtacaacgtgtccctggtcatgtccgacacagctggcacctgctactgaccctgctggcctgcccacaggctcggggcggctggccgctctgtgtgtgcatgcaaactaaccgtgtcaacggggtgagatgttgcatcttataaaattagaaataaaaagatccattcaaaaaaaaataagatgaatagaaaaaaactcgagggggggcacggtacccaattcgccctatagtgagtcgtattacaattcactggccgtcgttttacaccgtcgtgactgggaaaacacctgacgttaccccaacttaatcgccttgcagcacatcccccctttccccagctggcgtaata

SEQ ID NO: 13583 - DNA, 1596 bp, Homo sapiens
  misc_feature 1, 2, 3, 4, 5, 6, 7, 8, 9, 10, 11, 12, 13, 14, 1484, 1497,1554, 1578, 1585, 1591, 1596: n = A,T,C or G
nnnnnnnnnnnnnngccatcagctgggcacttctgcctctcagcccttacctgatgctaaaataatgtgcctcggccacaaaaaagcatgcaaagtcattgttacaacagggatctacagaactatttcaccaccagatatgacctagttttatatttctgggaggaaatgaattcatatctagaagtctggagtgagcaaacaagagcaagaaacaaaaagaagccaaaagcagaaggctccaatatgaacaagataaatctatcttcaaagacatattagaagttgggaaaataattcatgtgaactagacaagtgtgttaagagtgataagtaaaatgcacgtggagacaagtgcatccccagatctcagggacctccccctgcctgtcacctggggagtgagaggacaggatagtgcatgttctttgtctctgaatttttagttatatgtgctgtaatgttgctctgaggaagcccctggaaagtctatcccaacatatccacatcttatattccacaaattaagctgtagtatgtaccctaagacgctgctaattgactgccacttcgcaactcaggggcggctgcattttagtaatgggtcaaatgattcactttttatgatgcttccaaaggtgccttggcttctcttcccaactgacaaatgccaaagttgagaaaaatgatcataattttagcataaacagagcagtcggcgacaccgattttataaataaactgagcaccttctttttaaacaaacaaatgcgggtttatttctcagatgatgttcatccgtgaatggtccagggaaggacctttcaccttgactatatggcattatgtcatcacaagctctgaggcttctcctttccatcctgcgtggacagctaagacctcagttttcaatagcatctagagcagtgggactcagctggggtgatttcgccccccatctccgggggaatgtctgaagacaattttggttacctcaatgagggagtggaggaggatacagtgctactaccaactagtggataaaggccagggatgctgctcaacctcctaccatgtacaggacgtctccccattacaactacccaatcccgaagtgtcaactgtgtcaggactaagaaaccctggttttgagtagaaaagggcctgggaaagaggggagccaacaaatctgtctgcttcctcacattagtcattgggcaaataaggcattctgtctcttttgggctgctgccttcagcacagaggaggccagaactctattccggggcaccaggggttaaccatctcttcagttgaaccagagttgacaaggcctatgggaaatgcctgatgggattatcttcagcttgtttgagcttctaaagtttctttcccttcattctaccctgcaagccaagttctgtaagagaaaatgcctgagttctagctcaggttttcttactctgaatttagatctccagacncttcctgggcacnattcaatttaggcacaacatataccttccatgaagcacacacagactttttaaagcnaggacaatgactgcttgaatttangcctttnggaatnaagcn

SEQ ID NO: 13584 - DNA, 284 bp, Homo sapiens
acgcgggaagcagtggtaacaacgcatagtacgcgggggcccttgttctctagaagcaaggagccctctgaccccttcttttaaacaaattcttttgtctttgtcttcatttctgcatttgtcctccttcgtttagtcctacagtaacagccacaatggcacccaaacagagacttgaatgaagaaggtctgctggagcagagaaagtgaaactgatcagatgaacgaggaaccccaggacgagtcagccagaggaggatataaagtcagtgccctgaggaggt

SEQ ID NO: 13585 - DNA, 404 bp, Homo sapiens
  misc_feature 404: n = A,T,C or G
actttttttttttttttttttttataacagagacagagaaacagggtcttgctgtgctgcccacactggtctcattctcctggccttatgcaatcctctcgcctcagcccccacagagtgctgcattacagcagagtgctggcattacaggggcgagccaccatgcctggccagagctcctttaaagagcaagtttttccagtgtgaagttataaaatagcttacttaatgtgttgtgcatgcatgtgtagctatttaaacctgtggacacaacatcagtgctcactggcactcctggtttgggatcttaccctcttgaactgagacgcggtctcacaatctgaatggaagtgacgtgtcacttcggtaggcagaagtggttcgagagtacggaagtcgagagn

SEQ ID NO: 13586 - DNA, 2510 bp, Homo sapiens
  misc_feature 675, 676, 677, 678, 679, 680, 681, 682, 683, 684, 685, 686,687, 688, 689, 690, 691, 692, 693, 694, 695, 696, 697, 698,699, 700, 701, 702, 703, 704, 705, 706, 707, 708, 709, 710,711, 712, 713, 714, 715, 716, 717, 718, 719, 720, 721: n = A,T,C or G
  misc_feature 722, 723, 724, 725, 726, 727, 728, 729, 730, 731, 732, 733,734, 735, 736, 737, 738, 739, 740, 741: n = A,T,C or G
cttcgacccacgcgtccggcatgatgagtccttttgcttttaggcttttgacttctggttttagactttctttagcttctgttgttagacaacattgtgcaagcttggtttttataagtttgcatggattaaactgaacttaatgaaattgtccctccccccaaattctcagcacaatttttaggcccacaaggagtcaagcacctcaaggagatcttcagtttgaacttggtgtagacacagggatactgatgaatcaatattcaaattagctgttacctacttaagaaagagaggagaccttggggatttcgaggaagggttcataagggagattttagctgagaaataccatttgcacagtcaatcacttctgaccaagttatcagaaaaaggagaaaagaatgtctccccactaaatgttctagggtggtgagaaatctagggtggttatctaaatcaacaatatttagatattccaatatctaaatattgttggaaatactctcctgaagtgttcattgaactctaagagagacagcttgtgtatcagtggcagggtttaaggttcattttttattcccatattaatcctttaatatttagacaaatttccttctgagtttaaggataaaatgggatgggttctgcctgggcctggccctcatggggacnnnnnnnnnnnnnnnnnnnnnnnnnnnnnnnnnnnnnnnnnnnnnnnnnnnnnnnnnnnnnnnnnnngggctctcaggtttaccactctctccccatcttcccaggtttaggaggcaggcctctccctttcctaccctcccacccgaaggtgagtcactagagtgttacaagcttactggcagggaacactacaaattaacaaacagtaagttaccaaaaggggatacacccttataaaagggtacagaaagaacctaagaagcagggaactgttacacgctgaacaactgacaggcaaagggtgaggcacaagtgctctctccaccccccagctctaggcactagttcttcctgtaacttgctccactagctcccggccaggcccgggcaactttccactctgaggcatctgccttacaatgctttaagtctaaagtactagctttatagcagccagaggagctttagtcacactttcaagctgagctccaaaagggcagctgataacattaccatacaaccaggatttctgctgacatgtgcatcccccctgccaccttcactggaaccttttttccctgcccttccttaaatcactactcataagctatgatttattttttcggtaaataatattcaaactaaatccggaatgcagtgaaagacctggtgagaccccccctcctcatcttttacacacttgagaagacaaactttcccacatttctaaacagttatggcgtgtacctttggtgagtgaaacagttgccggtggtaggcctagctgacggtttaagccaagtcactggcaataaaacccagaaagaaaaaaagggacaaaatcctatttcatccaggaatgattcagcaagagctgttctttcattttcttaccaaatgcttaggaactagacttttaaggacatataaaatcacctgaaatatcatcaaaagctaggccacaaagggtactgaggagaggaggggaagaaatttacaatgaccttaaaaattagctgccggcacaggtttccttgttagccaattatcagcagggctttagtcactctccacccacattttaatccccatgtggaaaaatcccaacatgaaatattcttctgaacatttggacgctcacaataagtcacaggacaaacacacacacaaacacacacacaagtaaactaatgtttaatgtatcagaatactcaaaatgctaactaccacccagcagccaagcagctcatcatcccagtgttcgcagctgtaatttaatcttgtgtttgctagccactatacattttgttgtaagacatctgggtttaagctctactaactattcaggtgggttaccaccgcatcactactgtgcatgtgtgcctgtgtgtggttataaaggagacatctagataaatggacataacttagttacccaaaccatctccatggcctattaattcaacatcacaaataccccgtttcatccgaagttctgagttctgtataaagaactcaatgttaaagagtacatgcatgttcaggcttaaggccacaggctgttcaagaatcagggacgcgtagtctgtcactagccaaccgtttgaccttgagcaagtcacttcaccttcataggcttggggcacacatctgtgatgtctaaaccccccaagattagctcaggaagtaaacttttttctttttcttttaaggcaggatagacaaataatgagctttaaagtgcatgtttacagaaatgatcaagggtttaacaatgaaaaaaaagtttagtcctcttacccagactccctctttggaatgcacaggacatgtac

SEQ ID NO: 13587 - DNA, 562 bp, Homo sapiens
  misc_feature 562: n = A,T,C or G
acacaggggtgttagtttcatagtatgaaagttatgtgtgtcctgcagaaagttacgtcaaaagacttatttgaagcactcatatttgagggagactgcaagtttgattgctctttagtggtcccaatcaggtattaggcttttttttttctgtatctttattctatttttctttctagatccccaaaaatgcggagggaaaagtgatcaagttgtatctgatgtgagtggctttatgtattaggatacaatgtatatggggaaaagattataaatttagcatgataatacctaaacagtgcctgcctttttctggttatatgagctggacaagtcatttaaaatcactcagcctcagtttctttacctgtaaggtagacttaatgactatttcttttctcacagagttactatgggaatatacttggaataatgaatgcatataaatgttgctataaagaataaatataaggacttaaaattattttggcattctgaatagaaatgtattctcaataggagtgactggattattcttggtttattttgaaatagcaaaacn

SEQ ID NO: 13588 - DNA, 1308 bp, Homo sapiens
  misc_feature 1305, 1306, 1307, 1308: n = A,T,C or G
accttgggtctgaaggggtcactcgagcgctctgctatctctgcagctaaaacgggtgtcaggttttcagctgctactaaagataatgagcataagcgttcactgaccaagactccagccagaaagtctgcacatgtgaccgtgtctgggggcaccccaaaaggcgaggctgtgcttgggacacacaaattaaagaccatcacggggaattctgctgctggaaagctaaaaccatgggggcaatctaaagaaaataattatctaaatcaacatgtcaacagaattaacttctacaagaaaacttacaaacaaccccatctccagacaaaggaagagcaacggaagaaacgcgagcaagaacgaaaggagaagaaagcaaaggttttgggaatgcgaaggggcctcattttggctgaagattaataattttttaacatcttgtaaatattcctgtattctcaacttttttccttttgtaaatttttttttttttggctggtcatccccactttagtcacgagatctttttctgctaactgttcatagtctgtgtagtgtccatgggttcttcatgtgctatgatctctgaaaagacgttatcaccttaaagctcaaattcttggggatggtttttacttaagtccattaacaattcaggtttctaacgagacccatcctaaaattcgtgtttctaaatttttaatgtcaagttcccaagtttcccccgtgcgtggttctaatattaacagaacgtgcagtcttctgctagccaatagcatttacctgatggcagctagttatgcaagcttcaggagaatttgaacaataacaagaatagggtaagcggggatagaaagggcacctcttcactctctatagaatatagtaacctttatgaaacggggccatatagttgggttatgacatcaatattttacctaggtgaaatggtttaggcttatgtaccttcgttcaaatatcctcatgtaatggccatctgtcactcactatattccccaaaataaaattctaaattcaaaaaaaagaaaaaaaacaacaaagaaaaaaaaaaaggggggggagaaaaaccccggggggccatttagggaaccgttttttgagaaaggggccaaaagggggtaaaaaaaggaagggggtgtaaagagggggggaaaaccgggtatgggagaactccgcggggaatgggacccacaaaagcggtaatttttcttgtccttagcggtatgtgaaattatgaagaaaagtagtcgatgatacggataagaagaaaaatagatattaaannnn

SEQ ID NO: 13589 - DNA, 3704 bp, Homo sapiens
  misc_feature 1, 2, 3, 4: n = A,T,C or G
nnnngcacggaggagttccgggggccaggcggccgccgcgagtctggtatcctgagcttcgtgagttgagcgctgctgctccgcggtggagtcaccgcaccgctcccgggatcatggtgttctacttcaccagcagcagcgttaattcatctgcctacactatttacatgggaaaagataaatatgaaaatgaagatctgatcaagcatggctggcctgaagatatctgggagagaatatagaagacatcccaaaggaagtgctgatggactgtgcccaccttgtgaaggccaatagcattcaaggctgcaagatgaacaacgttaatgtggtatatacgccgtggtctaacctgaagaaaacagctgacatggatgtggggcagataggctttcacaggcagaaggatgtaaaaattgtgacagtggagaagaaagtaaatgagatcctgaaccgattagaaaagaccaaagtcgagcggttcccagacctagcagcagagaaagaatgcagagatcgtgaagagaggaatgagaaaaaagcccaaattcaggaaatgaaaaagagagaaaaagaagaaatgaagaagaagagggaaatggatgaacttaggagctattcatcactaatgaaagttgaaaatatgtcttcaaatcaggatggcaatgattcagatgaattcatgtaaaaggagaaaaggagaaaaggacctttgaaagatgtgaatgtagagacaattgcagaccttttggtttcatctgtgttctgaagtataaaatacaaccaaaattctaccttcatcctacccagaaattattgattttcaagttttaaaaaaattgtaccttttttgctgacagaaaaggatcagatatgtataaaatagttgaacttgacagcatataacttaaagtgaaaatgtttttgccagaacatgtcttggtaccttgtgaaagcaggctgcccttgttcttgagatagactttaaaatgaaccagctctgaaaagtacttctgctgctctggtctatccctgaaaacagatgtcttgaaacacttttcatattcttaaaataatcttcacttctgttaagaagaacatgttggtgggtaattatgcgaatgtttccctgtccctgatttctcgattaggcgtatgggttttgaaaaagagatttttcagaagattgtcagcttcagtattcacgttccatcgtgtcatctgggtctgttagtgtagtgaccctcagtgcagtctgtcccagcgtttacgtccttgcttcctctgagcagaggcctccatcttagtatcaacatatttaaagaaattgatggtgttcatcaagctggggcctgtggcagttgttgcctgagcaccaagtaacccaagccacctatgtgacaacttctgggcccaggagtaatttctcagcattgagggtaaaataggatggagtgctctgttgatcatttgggagatgtaggttacctgatttgtgccttaggatgcagcgtgaagcagaagtccatattgcaattatgattttagaaggaactaagcattttactcacacccacagcagcaagaatgacctcctgcagcagatattccacctgtaatagcactttggaactgtgggcaaaaccaaaaggctagtgtttccatttattccatgttggtgtatggggttgaactggaaaattccctgaggcaaaactcactggccaaattttgagagggtatagaaaatgactttagagatgagtggttttgtgtatgtgtctgatgatattcagtctgatgttccgcaattttaaaagttataataaaataccatttttttaatctggaaaaggacattgatatatgaattcttagaatttgctattaaaaagggtagcccccattccacaagctggttttgagggtgatcttgctctaaaaaacctcattcatcataggctcagtctgacaggttctgtacggggctatcatctttctcctcctctgctaaatgcctctttcttccagctgctcactgggtcaaagggatgtcctttctcagatgtattcttgatacatctcagatgtattcgtagctgtgctccttccatacttccaaggagtccggcttctacagaattcctctgtacctcacactgcaacacatgtagatagcgcttttgaaaaatacatatatttttactatagtatgagaggtcctggggctcaaactttaaacatttcctaactcagcttacactggtttaaaatgtccaggtctctgctgaattctcttgttgaattcatagctctccaacctcctctgtgttgattcctatgcccctaaccctgcagcctctttgttttatttttttccccatctctgttggtcccagggaaagcaaggaaattttcttttgaggacttataggttgattgcccacaggtcaaactgttggcattgaactcctctcatttcttgccattggattgtttcctaaacgttggataggagaattcgaaattgttgctatttttatgagctgtgcccttgatcaaatctgtgctgtgggtctgagtcattttgccaatgtcgtcttcagtttcaacactctgatcagcatgcaggcgaggggcatgtttaatttacttcactaactgctatattctatagctttagacttcatatttcttatccacctttgtctaggctcacgatctttgggcaagggagctttgtcaccgtggttgggctagaacaaatattgagaagtttaccaacacagatgttgagaagtttattgaaaggcactgacattagcagaataagtgatggacattagttgaaccccttcagtgtctatgtgttttattgtattgtctttaactcgttcttgaagcacagatttcagcgagcctttcagctattcagtgccagcggttttccccactcaggaaagatggtgtgagccatacacacagcaggattagacggggagagtttcagctgcagcttctagtttaagaccaaagcccttcctcccgctgctgcatctgtctgagaggggaagctcttgttttccaagctggaaccgtttatgaggaaaactgagcagggtggcaaaatggaaaaggaacaattttctagtttttcctacgcgtgatattgacgcgtgctttttctttgatttgaggtacagcatgtaaataacaaatttccatattcaaaatgatcatattagagtgactgagtgaccttttgattttgaagcagactaaaatctgaccagaccacaatgaaaagtataaaattagaaacttaaattccaagctaaatttcagctttgacccacctaactccagtgaataggtggcagctcagaaacaaggacagcactgctgctgccagagcaagctcacatccagctggcacttcgtgagagctccttcctgccgggcacgtgtgagttcagcgtgggcaagagacttttatgcacattctgtcattcaaaagggaaatgatgccaaccccagatgcagcatgtcctgaatgaatgatctgtaaaatacaataataaaagcttatagtttgagtagaactgtgtgtgtgagagagatttcacttcttattttctcccgcaagttccagtctcactgatgggatgtgcctgcttgttttaggcaagtggggagacggaggt

SEQ ID NO: 13590 - DNA, 897 bp, Homo sapiens
  misc_feature 1, 2, 3, 4: n = A,T,C or G
nnnnaagaatcaggggagaagggacacaagcccttgaatgcatgccaacacgtgaatcctcaaatcaagactcaaaccatgcagtttaacctctcaagttgcccacttggccctcttccaagtgtactttacttcctttcattcctgctctaatactgtttagtacattttcactcctgctctaaaacttgcctcagtctctcactgtgccttatgcccctcagctgaattctttcttctgagcaggcaggaattgaggttgctgcagacgtgtatgcatttgccaccagtaacatactttggtgccacatgactaggatatgttctctagtgctaacatgttcgtttacagttcttaggactccctgatagaaaaaaacacaaaaaaaaacacaaaaaaacccaaccaaccaaacaaacaaacaaaaaaaaacacaggagtttctcccaaaaagaagtctgcagtgtcttttctgttttctctgaaggtatcccagggtgttagatttctgttgtttttcccttatgtggcaccgaagttggcaagaagaaggaagtgctgatataaataaatagggaaatgaacagagagactacatgtggttagcaggagtttaggatgagagaaatttagtggaccgagaaatagtctaaatatcagttttaatttgtgaaagaaaaataaaaacctgggaccccaattcactatgcctaaaggaaaaaaattaagctaaaagctgaatcatgcaagaagctgttttttcctttgttcttaagcagagcactacagataaaaaggtgaaatatctccccaggtagctactctatgttcacctgaacttatgtaaagttctgatttactgagcatgagaagaacacataattgactattcctgt

SEQ ID NO: 13591 - DNA, 893 bp, Homo sapiens
  misc_feature 1, 2: n = A,T,C or G
nnaggtattttaaacaccggaggccttattacttttaaattatacaacattttttgcataaatttttttataacattttttctttcacgacttttgccgacaattcttcaatgtgtctcaactttctgacttattacaaacattttttttctttaaacaccagttagtttatttcaggacaagaatttaccatataacactctttttacataaattctgtctccccccacttttttttttgaagataaccattcctttttttttttttaaagcaaactttctttatgcctttggactagactgtctaaggccacaagattagaagttaccataatacatgttacactgttaactttaagcaaacttcacttttgttgaaaaccttgtaagtttgggatttcaattatcctttgctattaagaccttgtttagtctaaattaacttagaattggtatagatggcctttttttctctctactggtctttccttgcctctgccagccgcttatgctgctgttctcttaactacgttggcggggcaagggggtataaaagcagctgtaactttctatgtatggaaactggtctgggtgccttggcttacgggttaccttgtgtcatacctttgaaacaagggacctgtccaggcttccttctgatggccaacccacctctaatgctggccagtctatttcacacaaagttctaagttttcctggtgtcacagtaacactgtaatctcccttaaattctttcttgaatttttttttaacatagttcctagtggggtgggcttatttgtacctgacccatgcttcttcgagacaaaacaccacacccacaccacacacatgccacaaaaaaaaaaaaaaaaaatgagcggccgcaagct

SEQ ID NO: 13592 - DNA, 2241 bp, Homo sapiens
  misc_feature 1, 2, 3, 4, 5, 6, 7, 8, 9, 10, 11, 12, 13, 14, 15, 16, 17,18, 19, 2241: n = A,T,C or G
nnnnnnnnnnnnnnnnnnnacctctggttggagaaatgccaggttaaaggatagcaaatggcttaagcacaatggcacttctggttattcggcagagtgtccagtaagtccataaagttccaccgctataccaccacacatccgctcggggatgagcaagggctgactgattgataagctcttgaaaattcttaagctcactgcatcccttcaggtctccaaggaatgctaagtctgcctccctgccgtgagagacacgaagtgaacttagtgttgggagatggaagctggatggccctcaggggctgacccgcagggtgccagacttcggaatatagcggagagagcttggcatgacttattactccaggctgtagaatcctggaaaagagctaccatgcagcccacacctggtcgactggaggaccaccttagtggaagggggacaatcagggcctctggcctgccatgtgcacaagcataacaattgcttttgtttaacgtgcagatggaatatttgatccatttcaaccaggcatttgcatcttggtatgctgtcttaattgccaaagtttgttttaagtctttaacttctatgatcctttagtaaaatgaatgtttcctttagcacctatttttattagtttttagaccaaagaaagctaaacaccattttatatttaataatgcttcttgtatgatttttataccagataagctaaattttacctttatattagtgtgttattaatgttaaacttaattttaataaaaccttgtagacatatttatccaatttttcatgtttgaccataaggtaagattttatagactctttttaaccttttataatttttgttaaagagcaggttgatgctttaagaaaaacctgttgcatttttactttaatgtctagttcacagaaaaactggatgacacctttttaactttagctaatatgtttacacacagaattttctttacaattaatgttttaaaacttgcttaaacttttaaaacaatttttttaactttttaatgtaggtaaaaatccacatttttatgcccttttataatcttttttaccaaaggtatattttacttttcttatacaccttgcacataaactgtttttttaaaatagtactcaggaggccttattacttttaaattatacaacttttttgcataaatactttttataactttttctttcacgacttttgcagacaatttttcaacatgtcttaactttctgacttattacattttttttttaaacaaccagttaatttatttcaggacaagaatttaccatgtaacactctttttacataaattctgcctctccccgtttttttccttttttttttttctttttgaagataaccattccttttttttttttttaaagcgaactttctttatgtctttgaactagattgtctaaggccacaagattagaagttaccataatacatgttacactgttaacttttagcaaacttcacttttgttgaaaaccttgtaagtttgggatttcaattatcctttgctattaataagaccttgtttagtctaaattaacttagaattggtatagatggcctttttttctctctgctggtctttccttgcctctgccagctgcttatgctgctgttctcttaactactgtgggggggaagggggtctaaaaccagctgtaactgtctatgtatggaaactggtctgggtgccttggcttacaggttaccttgtgtcatacctttgaaacaagggacctgtccaggcttccttctgatggccaacccacctctaatgctggccagtctatttcacacaaagttctaagttttcctggtgtcatagtaacactgtaatctcccttaaattctttcttgaaatttttttttaacatagttcctagtggggtgggcttactttgcgcctgacccatgtttttttttttttcctgagacaaaataccatgctcacaccacacatactcaccacaagacaaagaacgggtaaagagggcacacacacttttaccgtttataccaaaccaaaatcacgaaattcaaaatccgagtaccaaaaaattcaagccaagtcaaaaccaaaaccacagtatccagcaattcaaatcaaaaacaaaaccccaaaaaaaaaaaaaaaaaaaaaaaaaaaaaaaaaaaaaaaaaaaaaaaaaaaaaaaaaaaaaaaagggcggccgcn

SEQ ID NO: 13593 - DNA, 1370 bp, Homo sapiens
  misc_feature 1, 2, 3, 4, 5, 6, 7, 8, 9, 10, 1365, 1366, 1367, 1368, 1369,1370: n = A,T,C or G
nnnnnnnnnngtattgagtgaaactatatgttaaatgtattagagaatgtaggtggtatagaaattgatttttcttggtgtagaacaactcagttcggcaaagtttaaaatttgattaaacaagagaagtggttcaggttgaagatggacttgttaggaagtgatcaagtcctttaagtacttgtttctttttcaggttgtgatgtggccattccgaattttgttgagagtttggtttataattgtctcttttgtcttgttagtaaacattcatttgcaacagttttgaaggtgctgagtggaaaaccgaaacacatggttattgcgtattggacctagaatgaaataattgcctcaatatttaacaacaagccattcttatctcaaagatttaaattcccgaatgtcccattcgcaaatcatatgcaattgaagtgagcagcatgagcatctgggtcatgagggccttcatttacgtaaatttgtcactaaaacccagtagtagctctacaaaatcttaaactgctgcagtgctcaaggagatggaatatctttgtcattggtgctgaggagagcatttcggtagaagacagttgcgcctgaagattgagtgtaaatcattcaaaccagtggttctcagtgttggctgtatacactttgtagtcactttggaatgttggaagacacatcgatgcttgggttccgtatgccaagattctgatgttggtctggaatatgagctggtcataaggatttttaaaaactttctggtcatttcaatatgctgccaaggttgagaaccactgttgtaaaattcaccttgagttttctcatctgcaaaatagaaaaaaaaaaatccttgctccctcccttcactacctcacaaggatattgagggtaaaggagaaaataatgggaaagtgcttgtgccgtggatgaaaagtgctattaaaagtcaaaggagtgttctgtttcaattcatagtatgatcagggaaagtgtaactgagtatactttgttgacttgggaaacctggagcactttctttggttggttaacgaagcatgcagatgtggaagcagacgttactattatccctactatggtcttctgtcatactgagacaggctgttttaattacctggttttacataggaaagaagaaatattaaggcttaaagtttgtaatgatcaatggctcataattcattaaatcttttcatacaatgggcgagggctcgcaaagggcacattatactcatgagctgagttaacgtatatcgccgtagagagcgatgggtcgaatgaaaccaaatgagttccacaattaaaaggggatgcatcgtctaattggagtgaatagannnnnn

SEQ ID NO: 13594 - DNA, 412 bp, Homo sapiens
  misc_feature 75, 188, 189, 321, 322, 392, 393, 394, 395, 396, 397, 398,399, 400, 401, 402, 403, 404, 405, 406, 407, 408, 409, 410,411, 412: n = A,T,C or G
acccatatactaaccagtttggggcacataaatgttacaagggagaaaaaaagatttagactagcatgtgaattntcatcaagcagagaccaccttgtgttaaaaaggcaaaacttggtggggtgtgagaggaagtgaaaaaaaaggaaaacgtatagaaaaagtgacctggagtggctcaactgttnntatcattatcagcctcctttttttgggagacggagttctccgcttcttgtctacccaggcttggagtggcagaggctacttatctcggcttcactttgcaagcttccgccttcctggggtttcacaaccatnntctcctgcctcaaagcctcccgagtaagctgtggactactaggcgcccacacaccaacgcccagcttaannnnnnnnnnnnnnnnnnnnn

SEQ ID NO: 13595 - DNA, 443 bp, Homo sapiens
  misc_feature 443: n = A,T,C or G
acagataatacgcaaagccctaaaacaagcctcaaaaaacttaaaatgattaaaatcttacaaagtattttcaaaagtataatgaactgaaattaaaaatagcagaagaatattttggaaattcacaaatatatggaaattgaacgatgcattcctatataaccattgggtcaaaaaatcaaaatgggaattagaaaataagataaatgaaaataaaaattcaacatacccaaatttaggggatttaggacaaacagtgctcaaatggggaatttatgtctttaaatgcataaaatgaacaaatttctagaaagacgtaacttatccaacacagtccctggactatgggcaactcatgtcagcattctgccatcgatagggatcttgagaagcccgccaacacatctcaatcagtcttctttcaagtttcagatgtctggacn

SEQ ID NO: 13596 - DNA, 623 bp, Homo sapiens
  misc_feature 1, 2, 332, 623: n = A,T,C or G
nncgtccgctccgggctcagtttgaccacagtatctagctatggcggcagtgacctggagtcgggctcgatgctggtgtccgagtgtcctgcaggtcttcagattacaagtggctaaactgcacttgggcagaccaacaatgagagccagtcagcaggactttgaaaatgcattgaaccaggtgaaactcttgaagaaggacccgggaaacgaagtgaagctaagactctatgcactgtacaagcaggccacagaaggaccctgtaatatgcctaagcctggtatgcttgactttgtcaacaaagccaagtgggatgcatggaatgccctgngcagcctacccaaggaaactgccaggcagaactatgtggatctcgtatccagtttgagttcctcatctgaagccccgagccagggaaagcgtggagctgatgagaaagcccaggagtccaaagacatcctggtaacttctgaagatggcatcacgaagatcacgttcaatcggcccaccaaaaagaatgccatatccttccagatgtatcgggatattatactcgcacttaaaaatgccagcactgataacactgtcatggctgttttcacaagaactggtgactactacn

SEQ ID NO: 13597 - DNA, 401 bp, Homo sapiens
  misc_feature 1, 2: n = A,T,C or G
nngattcaggttacagaacttgaggtcagaggattctcttgaatgatgtaaaggctcccaatcaaatcacaggagtccttagaatggagaatctttttggctaaatcagagtagcttcatttttgtagttgctcccagcatcaacttctccttgataaactaggtggtgagtccatgaggtgactggcattgaagacctgtgtatctcatagtccttgagttaaaaggaagatggcggcattgattcaaggtagggaatcatgaatatcctgtaaaggaaccaccattgtagcaggacgagctgcagacaaaacccctcagacaccgagttgtagaaggaagggctttattcagctgggagcatcagcaagctactgtcttaaaatctgagctccccgcgt

SEQ ID NO: 13598 - DNA, 764 bp, Homo sapiens
agcaacaattcgagctgctgtgacagaggggaacaagatggcggcgccaaaggggaagctttgggtccaggcccaactggggctcccgccgctgctgctgttgactatggcgctggccggaggctcggggactgcagcggccgaagcctttgactcggtcctgggagacacagcgtcctgtcaccgggcctgtcagctgacctaccccttgcacacctacccgaaggaagaggagttatacgcatgccagagaggctgcaggctgttttcaatttgccagtttgtggatgatgggcttgatttaaatcggaccaagctggaatgtgaatctgcgtgcacagaagcatattcccaacctgatgagcagtatgcttgtcatcttggctgccaggatcagttgccatttgctgaactgagacaagaacaactcatgtccctgatgccaagaatgcatctcctcttccctctgactctggtgaggtcgttctggagtgacatgatggactctgcacagagcttcataacctcttcatggactttttatcttcaagccgatgacggaaaaatagttatattccagtctaagccagaaattcagtatgcaccgcagttggagcaggagcctacaaacttgagagaatcatctttaagcaaaatgtcctatctgcagatgagaaactcacaagcacacaggaactaccttgaagaggaagaaagcgatggctttttaagatgtctatctcttaactctggatggattttaa

SEQ ID NO: 13599 - DNA, 1971 bp, Homo sapiens
accagactcgtctcagcccaagttcagccttctcagccaaacgccgaccaaggaaaactcactaccatgagaattgcagtgatttgcttttgcctcctaggcatcacctgtgccataccagttaaacaggctgattctggaagttctgaggaaaagcagctttacaacaaatacccagatgctgtggccacatggctaaaccctgtcccagtatcacaagcagaatctcctagccccacagaacactattgtctacggaaggagcagcaggaggaggcagagcacagcatcgtcgggaccagactcgtctcaggccagttgcagccttctcagccaaacgccgaccaaggaaaactcactaccatgagaattgcagtgatttgcttttgcctcctaggcatcacctgtgccataccagttaaacaggctgattctggaagttctgaggaaaagcagctttacaacaaatacccagatgctgtggccacatggctaaaccctgacccatctcagaagcagaatctcctagccccacagaatgctgtgtcctctgaagaaaccaatgactttaaacaagagacccttccaagtaagtccaacgaaagccatgaccacatggatgatatggatgatgaagatgatgatgaccatgtggacagccaggactccattgactcgaacgactctgatgatgtagatgacactgatgattctcaccagtctgatgagtctcaccattctgatgaatctgatgaactggtcactgattttcccacggacctgccagcaaccgaagttttcactccagttgtccccacagtagacacatatgatggccgaggtgatagtgtggtttatggactgaggtcaaaatctaagaagtttcgcagacctgacatccagtaccctgatgctacagacgaggacatcacctcacacatggaaagtgaggagttgcaatggtgcatacaagggccatccccgttggcccaggacctgaacggcgccttctgcatggggaacagccgtgcggaacggaccagttatgaaacgcagtcagctggatgaccagagtgctgaaacccacagccacaaggcagtccagattatataagcggaaagctaatgatgagagcaatgagcattccgatgtgattgatagtcaggaactttccaaagtcagccgtgaattccacagccatgaatttcacagccatgaagatatgctggttgtagacccaaaagtaaggaagaagataaacacctgaaatttcgtatttctcatgaattagatagtgcatcttctgaggtcaattaaaaggagaaaaaatacaatttctcactttgcatttagtcaaaagaaaaaatgctttatagcaaaatgaaagagagcatgaaatgcttctttctcagtttattggttgaatgtgtatctatttgagtctggaaataactgatgtgtttgataattagtttagtttgtggcttcatggaaactccctgtaaactaaaagcttcagggttatgtctatgttcattctatagaagaaatgcaaactatcactgtattttaatatttgttattctctcatgaatagaaatttatgtagaagcaaacaaaatacttttacccacttaaaaagagaatataacattttatgtcactataatcttttgttttttaagttagtgtatattttgttgtgattatctttttgtggtgtgaataaatcttttatcttgaatgcaaaaaaaaaaaaaaaaaaaaaaaaaagaaaaaaaaaaactttgttggggggctgcgggccctggaaaaagtttttaaaaccatttggttggggggggggggcccaagtaggtttaggtggacctggggcaaaggggccccaaggaaaacggggcaggaaaaggggtgggttttttccccaataaaaagggcggggggacgcgggggttggacaactcagtggg

SEQ ID NO: 13600 - DNA, 884 bp, Homo sapiens
  misc_feature 1, 2, 3, 4, 5, 6, 7, 8, 9, 10, 11, 12, 631: n = A,T,C or G
nnnnnnnnnnnnggtgagactttatttaatgcacatctgtcttaaatacctgagaaacttggcgacgaccctataaacagtgaagcaaacacttcagctgtttcaaatactgtttagtaaagcttgaatactttattaacttgcagccagaataaaccaattccagtgggatcctatttttaaacctggcacgagttttatatacatgttagcccagttttatatacatgttagcccattccattttctacaaggtgaattctgccgataaaatccaataaatttggagaaactaataaaaaaaaagatacctgtaattactaatggccagtagtcaattctggaagggtaataacagaaaaatgtaacatataaatgttgtaaattatgattacatttaaaaacaagctaaaatctgcaactaagatctttagggttgggtggtagaaaaagcataatgtgaactgctccacctcttttggcaaaacctgtgtattgaggccataagctatgaaattggatcatcttttcttcttgtatatctaagataaaaaccttcttactgtgcattttgaaaaaaccccaaaaaaaaaaaaaaaaaaaaaagtacacttacaataaccataaatanataggaccatagcaatcttttgtcctacctcagtgacttcatgtatatactggaaacagttctcagtctgaggaaggtcagttgaagtccttattgtgcaagtctaaattttaaggaaaattagtcccgcgatgagtttcctcatgcttcagctgtgcgtggaccagtcagcttccgggtgtgactggagcagggcttgtcgtcttcttcagagtcactttgcaggggttggtgaagctgctcccatccatgt

SEQ ID NO: 13601 - DNA, 640 bp, Homo sapiens
  misc_feature 1, 2, 592, 593, 594, 595, 596, 597, 598, 599, 600, 601, 602,603, 604, 605, 606, 607, 608, 609, 610, 611, 612, 613, 614,615, 616, 617, 618, 619, 620, 621, 622, 623, 624, 625, 626,627, 628, 629, 630, 631, 632, 633, 634, 635, 636: n = A,T,C or G
  misc_feature 637, 638, 639, 640: n = A,T,C or G
nnatagggagtcgacccacgcgtccgcggacgcgtgggcggacgcgtgggttgcgagcaagcacgcagtaaaactgcaccttagtaagacgcacggcaagtcgccagaggaccacctgatctacgtgacagagctggagaagcaatagtgtgccggtgtgcaggtggctgcagagtactgtactcctctcttgctgcactaggcctggcctggcctggacctcggaaatcagtctctcctttgttgctgacctgcctatctggacttggtttttctcacacatattttgtagttatatttatatgctctttgtctgatctgtgcatgttatttttcttttcttttttctttttctttccgtgagtcaaagtctgacctttattttcagcatccgttcttgttgttaagctatcttttgtaggaaatagtgggggcacgcttcggagacattgtttagcagtaaagaaaaagatacaaatagcagcgataaagagacatcctaaaattacaaagttgccatgacaataaaggtcacaggacctggtagtgtcaagtttaaccctttgaggactttatctctgtgcctttcacnnnnnnnnnnnnnnnnnnnnnnnnnnnnnnnnnnnnnnnnnnnnnnnnn

SEQ ID NO: 13602 - DNA, 555 bp, Homo sapiens
  misc_feature 1, 551, 552, 553, 554, 555: n = A,T,C or G
nagtcgaccacgcgtccgatttggttagtaaatgtgtaactattgtacttccagtattcatatgtaggctggtgtattttgctaattaagaaatacaaagtgtctaggaaagcaatatttgcttttgcagagcactttctagtgggtaaccaaagatggctatacccacatgcttttgacttctgtgatagtctaatacatgtgatccttcaagtgtcttaaaaatacccatggatttacgtgatcatctggaaagcctttgccttaatgatgaacaatttttaataatctcaaagtcatataaaatttactttattcctagaacttttcagaatatctatttatctttataacttgtatctaaaaatatttcagtcatgtaagttaaaaataaaaatttggtagtatattatttattaaattattttctagctttatatgaaatgtgaaaggtcttccctctggtttaatttactttaggctgctaataaccaatgttacaagttaacattgggcctcttattgggatggtcactgctgctttgatcacnnnnn

SEQ ID NO: 13603 - DNA, 378 bp, Homo sapiens
  misc_feature 191, 227, 301, 317, 318, 336, 377, 378: n = A,T,C or G
gagtcgacccacgcgtccgtaattactctcctcggtggaaggaaagatggacaaatgatggttggaggtgtcccagaggaaatgaccggtaccggaggaatgattcagagaaacaaaatgaaaatacaagaaatgaaaagaatgacatcactgcagatagtaatgatccaagttccacagataagcatagnaagtgactgggtcccagttgggtaaccagagaaaantaaactctgggctcagatcccaagggaccagaaatcctagaaaaggttaaaagaattcctcactgggaagaaanatcagaaatgaaaatnntcagggaattcttggacnttaaaaactttggcccaaggcttggatgtccagcccgtggnn

SEQ ID NO: 13604 - DNA, 569 bp, Homo sapiens
  misc_feature 1, 563, 564, 565, 566, 567, 568, 569: n = A,T,C or G
nataggagtcgacccacgcgtccggttggtaaagaaagggaagagcaaagttggagacatgctggaaaaagctgccgagctgctgatgagctgcttccgagtctgtgccagtgacacccgtgccggcatagaagactctaagaagtgggggatgctgttcctggtgaaccagctatttaaaatctactttaagaaatcaacaaactccatttgtgtaaaccctcttatcagagccatcgacagctcgaatctgaaagatgactatagcacagcgcagaggatcacgtacaagtactacgtggggcgcaaggccatgtttgacagtgacttcaagcaagcggaggagtacctgtcgtttgcctttgaacactgccatcgctccagccagaagaacaagaggatgattctgatctacctgctgccagtgaagatgctgctgggtcacatgccgaccatcgagctcctgaggaaataccacctgatgcagttttcagaagtgaccaaagccgtcagtgagggcaacctgctgctgctcaatgaagcgctggcaaagcacgagacgnnnnnnn

SEQ ID NO: 13605 - DNA, 554 bp, Homo sapiens
  misc_feature 459: n = A,T,C or G
agtcgcgccacgcgtccgcggacgcgtggggaaacgccttcgcttgctttgatgaggaagccacaggcaccatccaggaggattacctgagggagctgctgaccaccatgggcgaccgcttcacagacgaggaagtggatgagctgtacagagaggcccccattgacaaaaaggggaacttcaactacattgagttcacacgcatcctgaagcacggcgcgaaagacaaagatgactgaagagctgcggcggctgacacgcctcttgcgtttgcttgctcacttcctgtctcagacacacacaccccataggacctactgcgtgccacttagtttctcagtcacttcccctcccccatagggcctactgtgtgccacttagttgagagctttttttttaaatgtatttattccaggccctttctgtcacttagcatgtgcataatcagactggaacggnggacaatgttgtaaattgtactgaaaacgagatgcaaataaaaaatgaaccactgtgaaagcccaggacaataaaaaaaaaaaaaaaaaaaaaaa

SEQ ID NO: 13606 - DNA, 640 bp, Homo sapiens
  misc_feature 1, 2, 3, 194, 481, 640: n = A,T,C or G
nnnagtcacccacgcgtccgcggacgcgtgggcggacgcgtgggcggacgcgtgggctagtctgtccatctgtcttgtttatccactggctctccatttgtccctttggagaggaaggtgggaaggcaatgtcctgtcccatttcatgccttgcattctgcccatcccttccctcctctcagctaggacacacnagccctttcttcttcccatgctctgtccaggaccacagtctggtgcctgattctttgtccatcaccaggacctaagctctccctgggtctgtagctggctgctatcactgcccactctgacctgccaggacagatgcaggtaggagactttgggggctggccagctggtgccaggctttcggtgctaaggcctgcaaggggcctaggtacgaccctcctccctgacctgtgcttggagctggctcttcagcagtgagggccagcccaagttgagtcttctgatcggngactgaattcagaggccacctcatcccaccagccactagaatgatgccagcactagggttggtgggaagtggcaactcactgtccccttccacaccctcagtcctgccaagccccagatgggggcctctcagtgccattgacactgcccaagaatgtcn

SEQ ID NO: 13607 - DNA, 243 bp, Homo sapiens
  misc_feature 1, 2, 182, 213, 214, 215, 216, 217, 218, 219, 220, 221, 222,223, 224, 225, 226, 227, 228, 229, 230, 231, 232, 233, 234,235, 236, 237, 238, 239, 240, 241, 242, 243: n = A,T,C or G
nnagggagtcgacccacgcgtccggaaaatgatttgatgtgaaaagtggtgaaatctggcacttgaaataaccaagagaaaagttcctacttgatgccttaagccgctcctgcccgaagctctgaagaactgagatgccagagatgcttactatggtactactgcattttttgtagagttgnacattaataataaaacttgcctgcttaatcnnnnnnnnnnnnnnnnnnnnnnnnnnnnnnn

SEQ ID NO: 13608 - DNA, 622 bp, Homo sapiens
  misc_feature 1, 2, 3, 196, 197, 220, 230, 241, 620, 621, 622: n = A,T,C or G
nnncactatagggagtcgacccacgcgtccggagaacggaaatgagttcatgtgacttctcggtgctagttggccatcttggctcaatgttgggacacactatcagagagaggagtctttttttttttccccaatgatattctgttcaaaatgaattctgaaggaaaagttgctcatgtctgtttcagagcatacnnccttttaaatctttttagactanctcttctagnaattcatcatnaaccccaaaatagataaaagctatctagaagttgccctgacaagctattgcacatctctggtaaatcctgctgaatgtaaggaatattcagagctctcatacctcatcatgatgttatttaagcagccaatttacacgacctgatttactttgaaaaatttgtttcattcaaactagaaagttccagagacaaaggacatttctcagccaagagtgtgatgcattcttgccctagtctttacttgtgtctgctctgggatggatgctgtctgatgtctgttaccaatggagcagataccacaaaactagtcaactcccgtctgtcctgttgttttctagtgctgctttgtgctgagagaacatgttagtttactgaacnnn

SEQ ID NO: 13609 - DNA, 602 bp, Homo sapiens
  misc_feature 64, 272, 465, 470, 522, 542, 602: n = A,T,C or G
acgcgtccgcaactgaggagtatacatctagtttgtagctcagggctcaggggttaggccctgngtttgatcttcagcattggagggagacagagaagagagggtaacagggagacagagaaagaaagacaaaggaaaaggagaggagtgtaaggaggagagaagtgggaaggacagggaaagagagagatggagagagggaagtggccatagtcagtaatgttttgtgtttatggcggaaagtaagttgaattgttttcttctttttttangctgttcagctagtaaatcactctaccaagtgcttaaaatgtaaagtattttaataagtgttagcaataaaaaatttgacattatcactcttgtcatattagtaagtgtctgtgtcgtacagatgctagagaataaggtatctacacatactcagctggtctcaggaaacatggcacagataaaatattcttnccttntgctgtctctgtctgacttcctatgcatggggggctgggatccatttcttangagaatggataaggaagtangctggtctttggcatttcatcttgcattctttgtcctctttagcttggtacttacatgcn

SEQ ID NO: 13610 - DNA, 640 bp, Homo sapiens
  misc_feature 1, 2, 3, 637, 638, 639, 640: n = A,T,C or G
nnnataggagtcgacccacgcgtccgtaaatctgtggttttatttttctgtaaaacacttaaaggggaagtaatatcttggcatatttagaaatacttgtgactggcttcaaaatataatttcttaaatatcttatagccgattttaagtttacattttctgtacatgttatgcttaaaaccaatactgttcaagatgagcaatcagacttatgttttatttttatctgggtaacatattattttgaaattttcatcttaagtaaaggagcttttgataatcagtctcctgtacaaatattaaaataataatttgattttaaatcatcagcatgttcaaaatactggtgaaaattatttaatataaggactggttagaacattatatatatatcccatatttataactgttaccacacagttgaatatgttgcaaaaattatggttatttctgaacggttgcttttcttgctgttttccaaccaaccaagaagcacctttataaacaggtgctaattgatatgaagatcattttggtatgtcctagatagaatgaagccaaatgtctggatttaaaacaatttcaaacaatcatttactattttgctttactttaaagaacataaatttacttcagnnnn

SEQ ID NO: 13611 - DNA, 489 bp, Homo sapiens
agtcgacccacgcgtccggctggccgcggcctcccggcgctctcgtcctccgcttttgcacagctccccgttccagccttcgccatgggattcggagacctgaaaacccctgccggcctccaggtgctcaacgattacctggcggacaagagctacattgaggggtacgtgccatacaagcagacgtggcagtatttgaagcagtttctggtccaccacctgctgacctgtgtcatgccctacgttggtataatcacatcaagtcgtatgaaaaagaaaaggccagcctgccgggagtgaagaaatctttgggcaagtatggccctagcagtgtagaagacaccacaggaagtggagctgcagatgctaaggatgatgacgacattgatctctttggatctgatgatgaggaggaaagtgaggaagcaaagaagctacgagaagaacgccttgcacagtatgagtccaagaaagctaaaaagcctgcag

SEQ ID NO: 13612 - DNA, 533 bp, Homo sapiens
  misc_feature 1, 2, 3, 529, 530, 531, 532, 533: n = A,T,C or G
nnncgaccacgcgtccgcggttgcctgcagcgcgagtccgtcgaccctcggccattcgccgccgccaccgccgccaaaatgtctacaggtgtgccttcggggtcaagtgctgccactggcagtaatcgaagactccagcagacacaaaatcaagtagatgaggtggttgacatcatgagagcaatgtggataaggtgttagaaagagaccagaagctctcggagctagatgaccgcgcagatgcactgcaggcaggtgcctcgcagtttgaaacaagtgctgccaagttgaagagaaagtattggtggaagaactgcaagatgtgggcgatagggatcagtgtcctggtgatcattgtcatcatcatcatcgtgtggtgtgtctcttaatgaagaaccgatgaaactgaagcccgatattcaggatcttcttcaagactttctacttagaacctgccgtgttatcgagcttacctattggttttttccaaatgattatttttgttagtttcatacagtttagtgcctannnnn

SEQ ID NO: 13613 - DNA, 449 bp, Homo sapiens
  misc_feature 1, 2, 412, 413, 414, 415, 416, 417, 418, 419, 420, 421, 422,423, 424, 425, 426, 427, 428, 429, 430, 431, 432, 433, 434,435, 436, 437, 438, 439, 440, 441, 442, 443, 444, 445, 446,447, 448, 449: n = A,T,C or G
nncgtccgattagattgggatgaacacagttctgctggcagatatgtttctcggcgctgtaaacctctgaaggagtttatgctatctcaggatgccgaacatgagcttctctttgacctcattgggaaaatgttggagtatgatcccgccaaaagaattactctcaaagaagccctaaagcatcctttcttttacccacttaaaaagcatacgtgatttataaacacagtgctctgaaaggaatcttacagactgtatcagtctagcttttaattaagttattttgtatagcttaatttgtaaaacattttatgttttttagatgctttattaaatacatggccaaaccaaataacatctttcagtaattatagaatgatttatttggaataaaatttgtgcttatgaatgnnnnnnnnnnnnnnnnnnnnnnnnnnnnnnnnnnnnnn

SEQ ID NO: 13614 - DNA, 1980 bp, Homo sapiens
  misc_feature 1, 2, 1887, 1888, 1901, 1908, 1952, 1953, 1954, 1955, 1956,1957, 1958, 1959, 1960, 1961, 1962, 1963, 1964, 1965, 1966,1967, 1968, 1969, 1970, 1971, 1972, 1973, 1974, 1975, 1976,1977, 1978, 1979, 1980: n = A,T,C or G
nnatgcaaatgtagcggcgcggcgggagcgcgcggctgatacccgggactgggctgcggcggttagtcctctcccggccgccgtcgcctccgacatattgcccgcaggagctgcggcggcgaagggagagcaccggggggaggagatgggaggacgaagaggtcccaacaggacatcttactgtcgaaatccgctctgtgagccgggatcctcggggggctctagtggaagccacacttccagtgcatcggtgaccagtgttcgttcccgcaccaggagcagttctggaacaggcctctccagccctcctctggccacccaaactgttgtgcctctacagcactgcaagatccccgagctgccagtccaggccagcattctgtttgagttgcagctcttcttctgccagctcatagcactcttcgtccactacatcaacatctacaagacagtgtggtggtatccaccttcccacccaccctcccacacctccctgaacttccatctgatcgacttcaacttgctgatggtgaccaccatcgttctgggccgccgcttcattgggtccatcgtgaaggaggcctctcagagggggaaggtctccctctttcgctccatcctgctgttcctcactcgcttcaccgttctcacggcaacaggctggagtctgtgccgatccctcatccacctcttcaggacctactccttcctgaacctcctgttcctctgctatccgtttgggatgtacattccgttcctgcagctgaattgcgacctccgcaagacaagcctcttcaaccacatggcctccatggggccccgggaggcggtcagtggcctggcaaagagccgggactacctcctgacactgcgggagacgtggaagcagcacacaagacagctgtatggcccggacgccatgcccacccatgcctgctgcctgtcacccagcctcatccgcagtgaggtggagttcctcaagatggacttcaactggcgcatgaaggaagtgctcgtcagctccatgctgagcgcctactatgtggcctttgtgcctgtctggttcgtgaagaacacacattactatgacaagcgctggtcctgtgaactcttcctgctggtgtccatcagcacctccgtgatcctcatgcagcacctgctgcctgccagctactgtgacctgctgcacaaggccgccgcccatctgggctgttggcagaaggtggacccagcgctgtgctccaacgtgctgcagcacccgtggactgaagaatgcatgtggccgcagggcgtgctggtgaagcacagcaagaacgtctacaaagccgtaggccactacaacgtggctatcccctctgacgtctcccacttccgcttccatttctttttcagcaaacccctgcggatcctcaacatcctcctgctgctggagggcgctgtcattgtctatcagctgtactccctaatgtcctctgaaaagtggcaccagaccatctcgctggccctcatcctcttcagcaactactatgccttcttcaagctgctccgggaccgcttggtattgggcaaggcctactcatactctgctagcccccagagagacctggaccaccgtttctcctgagccctggggtcacctcagggacagcgtccaggcttcagccaagggctccctggcaaggggctgttgggtagaagtggtggtgggggggacaaaagacaaaaaaatccaccagagctttgtatttttgttacgtactgtttctttgataattgatgtgataaggaaaaaagtcctatttttatactcccaaaaaaaaaaaaaaaaaaaaaaaaaaaaaaaaaaaaaaaaaaaaaaaaaaaaaaaaaaaaaaaaataaataaaannaaaaaaaaaaaanaaaaaanaaaaaaaaaaaaaaaataaaaaaaaaaaaaataaaaaaaaaaannnnnnnnnnnnnnnnnnnnnnnnnnnnn

SEQ ID NO: 13615 - DNA, 582 bp, Homo sapiens
  misc_feature 377, 581, 582: n = A,T,C or G
gagtcgacccacgcgtccggaagtctacaggacccatcaatttcctgcctgcctgcagcaaggacagacggcatgagcactgcgggaaaagtgatcaaatgcaaagctgcggtgctatgggagcttcacaaacccttcaccatcgaggacatagaagtcgcaccccccaaggcccatgaagttcgaattaagatggtggccactggtgtctgccgctcagacgatcacgtggttagtggaaccctggtcacacctcttcctgcagttttaggccatgagggagcaggcattgttgagagcgttggagaaggggtgacttgtgtgaaaccaggtgataaagtcattccactcttttcccctcagtgtggagaatgcangatttgcaagcacccggaaagcaacttttgtagccgaagcgatctgctaatgcctcgggggactttgcgcgaaggcaccagcaggttctcctgcaagggaaagcagatccacaactttatcagcaccagcaccttctcccagtacaccgtggtagatgatatagcagtggccaaaatcgatggagcttcaccactggacaaagnn

SEQ ID NO: 13616 - DNA, 524 bp, Homo sapiens
  misc_feature 522, 523, 524: n = A,T,C or G
gtcgaccacgcgtccggcccgggtgtatgctgaaaatgccatccgcaagaagaatgaaggtgtaaattggctccgaatggcctcccgtgtggacgcagtggcctccaaggtgcagacagctgtgaccatgaagggggtgaccaagaatatggcccaggtgaccaaggctctggacaaggccctgagcgccatggaccttcagaaggtgtctgcagtgatggacaggtttgagcagcaggtgctgtctcccttgccctgtgatgttctggaggcttctgcccaactgcgcttcactttctccaacccttcgtagctgcctgggctcttttccaacctgtcaggctggcgccttagaactgagccttaggttgggcagcgggtctctgtcctggtattgaatttgcacaagtgtgtggtgacatatgtgcgtgtgggccacagctggaggatggcaagctttctgttgtcctctgcctatgtggagttgacagggtttggcctgcagatgtgtgtggacttgannn

SEQ ID NO: 13617 - DNA, 435 bp, Homo sapiens
  misc_feature 433, 434, 435: n = A,T,C or G
actttcttttttctcttttttttttcttttttttttgaggtgaaatctcactccactgcactccagcctgggcgacagagtgagactctgtctcaaaaaataaagtgaaccagggtgctcagggagcctcggtgagcgagaaaggagtttggagcttcaagtctgaaactgcgtttcacagttttcccatctgtagaatggactgcatgatacctctcttgctaggggatgtgaggattaaaagagatagcctgaaaggcgagctggagcaatggctgatggccaagctccagagctggcttcctgattcagcctggcctccccttcgggatcagattaacctccccaccttcagcctccttgggtataaaaccaggagtatgatattcctctgttggggattattgtgcggattgaataaaataattcatgnnn

SEQ ID NO: 13618 - DNA, 1981 bp, Homo sapiens
  misc_feature 1, 2, 1979, 1980, 1981: n = A,T,C or G
nnatcgagtttctcggccatcgcgcgcctgcgccattgggctgtcagtcaggaggcggcgtggagatcgctgggagcggttgcggcgtgccgggagctgagttatagctgtgacttctgccctgccaggccgcacacaagctggctgacccggtttgtaaaaatggaatttcaagcagtagtgatggcagtaggtggaggatctcggatgacagacctaacttccagcattcccaaacctctgcttccagttgggaacaaacctttaatttggtacccattgaacctgcttgagcgtgttggatttgaagaagtcattgtggttacaaccagggatgttcaaaaggctctatgtgcagaattcaagatgaaaatgaagccagatattgtgtgtattcctgatgacgctgacatgggaactgcagattctttgcgctacatatatccaaaacttaagacagatgtgctggtgctgagctgtgatctgataacagacgttgccttacatgaggttgtggacctgtttagagcttatgatgcatcacttgctatgttgatgagaaaaggccaagatagcatagaacctgttcccggtcaaaaggggaaaaaaaaagcagtggagcagcgtgacttcattggagtggacagcacaggaaagaggctgctcttcatggctaatgaagcagacttggatgaagagctggtcattaagggatccatcctacagaagcatcctagaatacgtttccacacgggtcttgtggatgcccacctctactgtttgaaaaaatacatcgtggatttcctaatggaaaatgggtcaataacttctatccggagtgaactgattccatatttagtgagaaaacagttttcctcagcttcctcacaacagggacaagaagaaaaagaggaggatctaaagaaaaaggagctgaagtccttagatatctacagttttataaaagaagccaatacactgaacctggctccctatgatgcctgctggaatgcctgtcgaggagacaggtgggaagacttgtccagatcacaggtgcgctgctatgtccacatcatgaaagaggggctctgctctcgagtgagcacactgggactctacatggaagcaaacagacaggtgcccaaattgctgtctgctctctgtccagaagaaccaccagtccattcgtcagcccagattgtcagcaaacacctggttggagttgacagcctcattgggccagagacacagattggagagaagtcatccattaagcgctcagtcattggctcatcctgtctcataaaagatagagtgactattaccaattgccttctcatgaactcagtcactgtggaggaaggaagcaatatccaaggcagtgtcatctgcaacaatgctgtgatcgagaagggtgcagacatcaaggactgcttgattggaagtggccagaggattgaagccaaagctaaacgagtgaatgaggtgatcgtggggaatgaccagctcatggagatctgagttctgagcaagtcagactccttccttttggcctccaaagccacagatgttggccggcccacctgtttaactctgtatttatttcccaataaagaagggcttccaaaggcatgctggagacttgtggagcagtccaaagctccatgtcaggtgggctccaggtgtacacagtgtatgttcacgtgtcatgtggtaaagatcatctggagcaagtgtgtgggacaggacagatacagtggcctaactcttgtgtgccaagatgtatcggtggggcagcagctgtccaatgtaaagctcctaggaaggctactttctgactggctgacccaacccagtcctgaaagtatccctcacctataaggacctgggagtacttcagtcccttattcctaatcagcctttctagaccatgctactgctgcagtccacgctgacatcagcccagactctgtctatannn

SEQ ID NO: 13619 - DNA, 449 bp, Homo sapiens
  misc_feature 449: n = A,T,C or G
actttttttttttttttttttaaaggaagtaactcaatccactttaatatttagctagcatttatgttacaggtctatgaggaagaaatatactggaaaaaagaagaaatacatttttttctcattctgaaagatttcgtttctccacaagacagcaaaatacacaaatatatgcaaatgtgtgcatgcacacgtgcacacaacccacaaaagtactatctatgaaggaaagagataccaagttcaattgaaacaggtatttagaaatgatagggaggttggaagaaaaggtgagaacacgtgaaaagtaattttacttttgtttaaccttaagcttgccaactttttttccttgaacagcatttgtcttgttttcatacccacctatgctcatatcaaaaacttaaaactacttcgtgattctactttgaatttatagccacatgacn

SEQ ID NO: 13620 - DNA, 733 bp, Homo sapiens
  misc_feature 1, 2, 3, 733: n = A,T,C or G
nnnacccatggccattggaacaaagaggaagaatcagtccccacgatgttttgggggagtgtttagcacgggaaaatgcgcagaatacacgcacgacacgggggcactgtcagtgtgggagcaatggtttacaacctccagccctaatctgagcactctcacctgtgcaatctgaaaggaacaggagacttgcaggaaagacagtgcctggatttaacttaaaggaactaaaaatgttggaatttttactcttgatatccttccaaatcaactctctcaatgttcccatcctcaaaactatcatatggggtaactgaggcagtcagagatttactgactcaatgtcactcaattgattctgagttcactgctgattacatccgaccaaactgctttttctgaagtctactccgtttaatcatgctggtgatgattttgtgcggctctgggacaaactccacctggctgaagataaagcaaatctgcggtgacttagtcctcctgtcatttcccatcagttccccactctcctcctctgcccctccacagtctcccatgcaggctgacaccatatgacggccttaatggagtccaccgagtatttcaggttctctcctgggccacttgaaagtggatgtacccatgggatttgctttgacccaggagatgtgagtggaagtgaagcgtgtcacctcgaggcaaaagagttgggagccatcgcgacgggccacan

SEQ ID NO: 13621 - DNA, 346 bp, Homo sapiens
  misc_feature 343, 344, 345, 346: n = A,T,C or G
acagaaggcctacgggagtcatgactccaggaataaagtctgggcatatcaattcactcctgagccaaagcaaactttaaaagtgccatttaaaaaccccataatgggtaagtaatgagtgaattagaagtttggtgaattttatgtgaagtgaaaataagaaatttcactacacacatagctataatttacaccataggggaatggatagttatcttgtttttttcttttgggggcgagggggctgtttttttattacccagccacctaccaatagggtttttgttttaagtctattacttgctgctgttatgggtgattatggaactgctgtacctgcccnnnn

SEQ ID NO: 13622 - DNA, 988 bp, Homo sapiens
  misc_feature 1, 2, 986, 987, 988: n = A,T,C or G
nnctgttatatggctgggtgtattgtgcggtccggtgtttctgtgctacggcagaccgacgttgtcgtccagatctgattagtaataaggcacatgtgcagtggagattgggccaaaggaagggacaggagccgttgttgagacactacgcattggagcagtatgactgaattctcaggacagtgccaagggggcatgatgtacctggcctgatccaaatgcagagcaggtgctggagcatcgaacacagcatcttcgctgcgagactttagctgaagcactcgctcagggcagtagcaaggaagagaagtgaggtccagtgagaggtcgcattcgtgtgagagctccatgctagtgcaagtctgatcagttcgcaagatgcccatcaccacaagatgcgccagttggggcaacaagccctgtagtgctggacaggagcagacttcagagctgattgtgtcatcctggtcccggtaagggtcagcgctcttgctttgctcttttcaatgaatagcacttctgtttactggtgtccagctgagttttctcttgggtataaaaggctttcacagcctcacctctgctccctttccagtgacatccttggcatgtgccctcctcctgctggcctggagcactggtccagccggttctgaatttccaagggagcagcactgtgtggtgctcaggagcatggactccggagccggccgtctgggttcagatcctgagcactgaccttatatccactgccagcagattcatcccagggtccctgttcatctggtcaatttcacttcctctgctccagcagaccttctttgttcatgtcctcaagaccctgttttcgggcagcactttgctgtggaccttgctggactgaacaaaggaggaccaaggcgggaataaagacaaagactgaagagtatgttttgaagaagggggtcaggggactccttgcttctagtgaacagggccctgagctnnn

SEQ ID NO: 13623 - DNA, 422 bp, Homo sapiens
  misc_feature 345, 421, 422: n = A,T,C or G
actttttttttttttttttttttttgtagagatgagggcttgctatgttgaaaagcctgatttcaaactcctggcctcaagcaatcctcctaccttggcctcccaaaaagttggaattacaggcatgagccaccacacccacccatttaaaaatttttctataaccttttgccaacttagaatatgcaaaaaaattatatttaattatgatatgaatttcacttgttttctgggtaaatacatattgcaaggtttcatatcttgtttcaaatttcatttaaatgaaaatatttcaaatgtacatagtttgagccttataaataatatggcacaccatcaatcaanttgccagaaaagatcttgattttgctctgcagatgtcagctgaaagcctgagcagataaatgaacttaaatttaann

SEQ ID NO: 13624 - DNA, 198 bp, Homo sapiens
acccagagtcacacagctcacgagtcagtggcgggactggagattacactgaaggttggtgcactgtgctccctggctctgtgcaggtgtcaccctcctccaccaggcagactttgagtcgtgcaaacagaaaagatgctgcccacacttcagggccatgcttccagtccccgtgagctacccccagcaggctcctgt

SEQ ID NO: 13625 - DNA, 1394 bp, Homo sapiens
  misc_feature 1392, 1393, 1394: n = A,T,C or G
acgcgtggcccaattcaagcttgattcaggaattcggcatgcaccaagatggccgcccccgtggatctagagctgaagaaggccttcacagagcttcaagccaaagttattgacactcaacagaaggtgaagctcgcagacatacagattgaacagctaaacagaacgaaaaagcatgcacatcttacagatacagagatcatgactttggtagatgagactaacatgtatgaaggtgtaggaagaatgtttattcttcagtccaaggaagcaattcacagtcagctgttagagaagcagaaaatagcagaagaaaaaattaaagaactagaacagaaaaagtcctacctggagcgaagcgttaaggaagctgaggacaacatccgggagatgctgatggcacgaagggcccagtagggagcctctctgggaagctcttcctcctgcccctcccattcctggtgggggcagaggagtgtctgcagggaaacagcttctcctctgccccgatggatgctttatttggatggcctggcaacatcacattttctgcatcaccctgagccccatttgcttcccagccctggagtttttacccggctttgcctgccacctctgcccaggacactcttccctctcgggatgtgtgatgaactcccaggagagggaagatgggagccagggcaagataggaagctctgcctgagctttccactaggcacgccagccagaccaataaaaagcgtctgtcccactctgctaagcctggttttcttgagcagagggatggaacagagggtgagagaggcagtggccgtctccacctcagctcctgctccctctgcatcagagcccttcctttcttgggggatgggccttgccctcttctcttttcccttcctgtacctttgactaacgctcagcttccgggcctgcatgcagtagacagaagaggaagaaagaacagatgttcacagctgaatctcagtgaacagaatagcagtccctggatggcagtctgcctaaagattcctttccctgccttctcccatacattccaaaaggaagttcaacagtaagcagcacctccaagactgtctccttttggccaatatcataagatggacgccataatcctgaggcctcctagaggctgagggggcaacggtgtgatccagctggctcatcccagcccaggtgggccaattattcaattttcaagaattttgttgcaagccagttgtcaaacacagccattataattatgtaaatttgcaaattatgttaaaaacaaggacaataaatattcaaaatgcatccctaattactaaaaaaaaaaacaaaaagaggggcaatcgctggcgaaaaaggtttgaggcccgggcaaaaggnnn

SEQ ID NO: 13626 - DNA, 589 bp, Homo sapiens
  misc_feature 1, 2, 3, 4, 5, 6, 7, 8, 9, 10, 11, 12, 13, 14, 15, 16, 17,18, 586, 587, 588, 589: n = A,T,C or G
nnnnnnnnnnnnnnnnnngaagcaacaaaagcagatatttattgaaaatggaagtacactccacagtgtgggagtgggcccaagcataggggctcaagggtcctgttacagaattttgggggatttaaataccctctagaggtttccattggttactttgtgtatgccctatgtaaatggagataatatttcccggcatagctgaagtgtgaataggccttatgttctatgcctccagatcctattttcctgcctcatttcctccctgagagatgtcatccccataaatctttatgggaggtggagtgactaatggtctttcttctgtaactgcctcatgctggcttgaagcaaagtccctacctattggggatcacggaactgtcaccctgctctgtctagtggaggcagagtagcttcttgatgcccaggggtggtgtcttcaactggaactggctggaacatttgtcacatgatcttctgaagcttgatggtctctggatgccatcaacagtggagcgactccttgtctggagaatgcagtgacagcactggcccagcttgagaacccagcggttgtgcaaannnn

SEQ ID NO: 13627 - DNA, 427 bp, Homo sapiens
  misc_feature 1, 2, 3, 4, 5, 6, 7, 410, 411, 412, 413, 414, 415, 416, 417,418, 419, 420, 421, 422, 423, 424, 425, 426, 427: n = A,T,C or G
nnnnnnnttttttttttttttttttggatgggtagtatcatggcatgcttgtatgctatcagaaatactctggtgaaagggaaaatataatgctggagagaaggatgataactgtaggaacaaagttcttcatttgacaaaaaggaatgggatatagtacacacttggagcttaggctttaaataaaacagagacaggtcatccacaggaaaaggcagagtagatatatgggtgcttacagtgaataatgaattagagtaagccacctgagaattgtatcacctacatataaaaagctaaactcaaaatccaatagcccttccaagattagaatatttaagatggaaacacaaagctaatacaaccttttcattactaaatctagttacatgcatatcaggaagagaggnnnnnnnnnnnnnnnnnn

SEQ ID NO: 13628 - DNA, 340 bp, Homo sapiens
  misc_feature 1, 2, 3, 4, 5, 6, 7, 8, 9, 10, 11, 12, 13, 14, 15, 16, 17,18, 19, 20, 21, 22, 23, 24, 25, 26, 27, 28, 29, 333, 334,335, 336, 337, 338, 339, 340: n = A,T,C or G
nnnnnnnnnnnnnnnnnnnnnnnnnnnnnggttttttttttttttttttttttttttttttttttttttccaaaaaaaccggggtttttggtttttaaaccggcaaatttccttcccaaaagtttttttttttttaaattaattccccccagggaaggaaaatttaatccccccggtggtcccccccagggggaacattattcccttcccttttagggggggggccccagtcttgttccctttaccttggaaaacccccaaccctgaatcccaaaccctaaattttggaaggggaacgtcttgaatgggccccgggaaaataaagggtttccnnnnnnnn

SEQ ID NO: 13629 - DNA, 1045 bp, Homo sapiens
ttggagctccccgcggtggcggccgaggtaccgcgggggagctacaacaggcaggcaggggcagcaagatggtgttgcagacccaggtcttcatttctctgttgctctggatctctggtgcctacggagaaattgtgttgacccagtctccaggcaccctgtctttgtctccaggggaaagagccaccctctcctgcaagtccagtcagaatattttttttcagctccaacaaaaggaactacttagcttggtaccagcagaaaccaggacagcctcctaagctcctcttttactgggcatctacccgggattccggggtccctgaccgattcagtggcagcgggtctgggacagatttcactctcaccatcagcggcctgcaggctgaagatcttggcagtttattactgtcagcagagtgagattttccccttcagttttggctcagggaccacagtggacatccaagctgggaccaagctggagatcaaacgaactgtggctgcaccatctgtcttcatcttcccgccatctgatgagcagttgaaatctggaactgcctctgttgtgtgcctgctgaataacttctatcccagagaggccaaagtacagtggaaggtggataacgccctccaatcgggtaactcccaggagagtgtcacagagcaggacagcaaggacagcacctacagcctcagcagcaccctgacgctgagcaaagcagactacgagaaacacaaagtctacgcctgcgaagtcacccatcagggcctgagctcgcccgtcacaaagagcttcaacaggggagagtgttagagggagaagtgcccccacctgctcctcagttccagcctgaccccctcccatcctttggcctctgaccctttttccacaggggacctacccctattgcggtcctccagctcatctttcacctcacccccctcctcctccttggctttaattatgctaatgttggaggagaatgaataaataaagtgaatctttgcacctgtaaaaaaaaaaaaaaaaaaaaaaaaaagt

SEQ ID NO: 13630 - DNA, 1966 bp, Homo sapiens
  misc_feature 1, 2, 1966: n = A,T,C or G
nnaaccctgcttttcctctacatctcctcccatctctgctttcccctctctggattctgaatgtctctctggccttgtctatgtgattcaggaggtgggtgatgatttcttttgtttgttgtttgtttttaaaagagaacaatcctaaaggaagatccagcaaatacggtttactccactgtggaaataccgaaaaagatggaaaatccccactcactgctcacgatgccagacacaccaaggctatttgcctatgagaatgggatctagacagcagtgcactcccctaagtctctgctcaaaaaaaaaacaattctcggcccaaagaaaacaatcagaagaattcactgatttgactagaaaacatcaaggaagaatgaagaacgttgacttttttccaggataaattatctctgatgcttctttagatttaagagttcataattccatccactgctgagaaatctcctcaaacccagaaggtttaatcacttcatcccaaaaatgggattgtgaatgtcagcaaaccataaaaaaagtgcttagaagtattcctatagaaatgtaaatgcaaggtcacacatattaatgacagcctgttgtattaatgatggctccaggtcagtgtctggagtttcattccatcccagggcttggatgtcaggattataccaagagtcttgctaccaggagggcaagaagaccaaaacagacagacaagtccagcagaagcagatgcacctgacaaaaatggatgtattaattggctctataaactatgtgcccagcactatgctgagcttacactaattggtcagacgtgctgtctgccctcatgaaattggctccaaatgaatgaactactttcatgagcagttgtagcaggcctgaccacagattcccagagggccaggtgtggatccacaggacttgaaggtcaaagttcacaaagatgaagaatcagggtagctgaccatgtttggcagatactataatggagacacagaagtgtgcatggcccaaggacaaggacctccagccaggcttcatttatgcacttgtgctgcaaaagaaaagtctaggttttaaggctgtgccagaacccatcccaataaagagaccgagtctgaagtcacattgtaaatctagtgtaggagacttggagtcaggcagtgagactggtggggcacggggggcagtgggtacttgtaaacctttaaagatggttaattcattcaatagatatttattaagaacctatgcggcccggcatggtggctcacacctgtaatcccagcactttgggaggccaaggtgggtgggtcatctgaggtcaggagttcaagaccagcctggccaacatggtgaaaccccatctctactaaagatacaaaaatttgctgagcgtggtggtgtgcacctgtaatcccagctactcgagaggccaaggcatgagaatcgcttgaacctgggaggtggaggttgcagtgagctgagatggcaccactgcactccggcctaggcaacgagagcaaaactccaatacaaacaaacaaacaaacacctgtgctaggtcagtctggcacgtaagatgaacatccctaccaacacagagctcaccatctcttatacttaagtgaaaaacatggggaaggggaaaggggaatggctgcttttgatatgttccctgacacatatcttgaatggagacctccctaccaagtgatgaaagtgttgaaaaacttaataacaaatgcttgttgggcaagaatgggattgaggattatcttctctcagaaaggcattgtgaaggaattgagccagatctctctccctactgcaaaaccctattgtagtaaaaaagtcttctttactatcttaataaaacagatattgtgagattcacaaaaaaaacatgtaggacgtatagatgcggccgattcgagtttactgggcctttgcctan
